United States Patent Application Publication US 2007/0054278 A1 - sequence listing, part 89

SEQ ID NO: 96858 - DNA, 97968 bp, Homo sapiens
acatgatcatatcattggtgaacagcgacaatttgacttcctattttccaatttggatcccctttattttttctcttgtctgattgctctggcgaggacttttagtactatgttaaatagaagtggtgaaagtgggcatacttgtcttattccatttatcgggggaatgctttcaacttttccccattcagtatggtgttgactgtgggtttgtcatatacggcttttattactttgaggtaagtcccttttatgcctattttgttaatggtttttatcataaagcaatgccggattttataaaattattttctgcatctattgagatgatcagatgatttttgtttttaattctgtttatgtgagagatcacatttattgacttgagtatgctaaacattccctgcatccttgggatgaaacccatttgatcatggtggattatctttttgatatgctgttggatttggttagctagtatttttgttgaggatttttgcctctatgttcatcagggatattggtctgtagttttctttttttgttatgtcctttcctggttttggtattcgggtgatactggcttcatagaatgatttagggaggattccctctttctgtatcttttgaaaagtttctgtaggattggtactgattcttctttgaatgtctgatagaattcagctgtgaatccatctagtcctgaacttttgttgttgttggaaattttttttattactgttgaaatctcactacttgttattggtccgatcagggtttatatttcttcctgatttattctaggagagttgtatgttcccaggaatttatctatttcctctagattctctagtttgtgtgtgtaaagctattcatagtagccttgaatgatttttgtatttctgtggtattggttgtaatatctccagtttcatttctaattgagcttatttggatagtctctcttcttttcttggttaatctcatttagctgtatttttttttttagttattttcttagtggttgctctaggccttaccatacacattttaacttatcagaatctgcttcagattatactaacttaattccaatgagttatagaaatgctgcttttgtatagctctatattctgttctccttttgtgtcattattgttatacatattatatctatatatgttgcaaacccaaaataacatagttataactattactttatggaattctgtaccttttaaagaagctgagagaagaaaggaaagcaagtatgtatttatagattttgttatattaaccttcttatttatcatttttggctctttttattgtacctgtggattcaagttaccatcagctgatatttccttattccagtgcagctttgctcccacctactggttttgtgctattattgtaaaataaatacatttctatatgtgtagacccaacaatacaattttaaacacacacacacacacacacacacacacacacacacacacacacagagcccacaattgcttttaaaattagttaagtaaagaaagaagaagaaatatgcatttacactattgtttttataattacaaaattatctacattggtgctctttaaattttgtttgtgggtttaagttactgtctaggccatttgctttcagcctaaagaatttattttgctattttttgtgaggtggcatgccagcaaggaattctcttagtttttgtttatctaagaatggttttattttactttcatttttaaaaaaacaatattgctggatataagattcttgcttgacagttttttttctttcagcactttaaatatgttatctcagtgcctctggcctccattatttctgatgaaaagtcaattgttaatctcattggggttcccttgtatgtgactagtatttttctctcggtgatttcaatattttctttatgtctttggctttcaacatttttaagatgatgtgtctgggttaaatctgtttttgtttctcctaattgaagcttgttgagcttcttgaacatgtggattaatgttttccatcatatttgggaagttttcaggcattatttcttagatttttttttctgttttcttctctctcttcctccttcagttactcccattttgcatatttggtacacttaataatgtcacacatttctctgaggctctgttcatttttctttctgctttttttctctctgcttttcaaattgcataatctttattgatctgtattcaagtttgctgattttttcttcttccagttcaaatccactactcagctcctctagcaaattcttcattttagttattatatttctcaactccagaatttccatttggttcttttaaaaaatactttctgtttttatattaatattctctatttgagtggacattgtcataaccttattcacttctttaagcatagtttcctttagtactttgaccatatttataacagctgctttgatgtctctgttaattcccccatctgggccctctcacagagtttttgttgccgggtttttttattctgtgggttatacttttctgtttctttgcatgtctcataatgctttgttgttaaaagctgatcattttagataacatattttagataatatattggagcaactctggatactgatgctgccctcccctccacgtactccttactcctggccaaggcttcttgttgtttttggcttatttgtttagtgactttgcttgactattttgtgaagtgtatttccccataatgtgaagcctctgatttcactcctcagagggcacagccttaggtacatgtacagtcagtcatctggggtgacagaagttttaaccggcctctctttaattttctcatttcctgatctctttgctaagccatcagtctctgttggcatcacacccagctgtcagggtacactaattactggctgattttctattgtttttctacaatgcctggagtatgcaatgcttcacagtatgatccagataaatttgggtccctttgtaggattgttttgagtccagtctttggggtttgttcagacagtggaaggactcttcttagctatttgttttgttttctctggtaaactggctggcatatagtttatcccattatctttattgtttaccaccaaaatctccattgtttttgcgagttcccttatgcttgaacttctctacatcctgttttaaatcaagttagtttcttggggggtcgggggagagcttcagtgctctctgttcttatgatctacctcttcctttgggcaaaatctttgagtcactgctcaagacctgggggtaggggctgtggctggcttctctcagagccctcctgctttacagagcagggctctgcgtggtggcagtagcctcttgtcttctcaggttgctgttgtagcatggaacctctgatccaaacgcaattggggcttcagtaatttcagcctgcatcacctggggtagtctccacctatgagtggggactgggtggaggagagaagcttccattctctcagctgcactcatctacaatttagcctgtgcaaaatgggggctgaggaattctggtggcctgcctcttctggggagccattgtattgcttgactgggagctggatggagagggagctgtgttttcctggctaagtccatgaagagtggagcttctgttaagtgagttggggggatggaggagagaggaagtgagtcatggctcaagtgtcatagattctcattgttcttattgggaacaatttccagagactttaaatgcttaaaaatcatttaactagatataagtgttttgctggggagcaggtctgcagagctcctcatacaatcattctggaagtggtctctgcttttttctcttccttcttttttctttcttccctttctttttctttctgtgtgtagtttctgttttgttttgttaacctatggatcaacagcagaagatgtcagatgtaagaaatgatggtaggacgtgggatgctattagtaggtatatcagctaatgttgaagacactactcttaaatcaaggaaaatatgatcagaataataaatttttaaagtatagtgaacaaattcttcagtaaggctgaaggttaaaagtaaaaagtttcaaagcaatacttttcttggctcttctttataataatttattgtctagtgagctactaaccctttttctttatgacttgattgcccccgtatgctaaaatacttgctgttttacttttcctttcattgacatttacaatcctttgtcttttagtagtttcacaagctttgaaacaatgtttagataattttaaaaaataaaaataaaacaatgctaagggtacaatcattgatgttttaaatatatcagctgctataaggcactttgtccaattttcataataattttgtcttaatggtgttaagagcaaagatttaagatttactttcttagtgccataaaaataagagctattcagctgggtttctgaaatattaagtgcaatgcaaaagtttgtttgcctaatatccctggacaccaggcttcccaaaatatcctgccccagaccatagccacatcttcccactagattcctgggcaactagaaacaatggtaaaggaaaacaaggtcacacaattttttttgagatggagtcttgctctgtcacccaggctggactgcagtggcgcgatgtcggctcactgcaagctcagcctccctgattcacaccattctcctgcctcagcctcatgagttgctgggactacaggcgcccgccaccacgcccagctaattttcttttctatttttcgtggagatggggtttcaccatgttagccaggatggtcttgatctccgacctcgtgatccacccgcctcggcctcccaaagtgctgggataacaggcgtgagacactgtgctcggctaaggtcacactaattgttagctgggagtggaccccaaacctgttgaaagaacccatcagctttcctttaagaaggtaatgccacagaccacaacagataattgagggttattctgtgagcttccactaaagctaaaacatgtgtggaagggacagaagagaggataacaggtttgctggcctgtttaccacttggggacgtttggatggatgatgaagaagaaaaagaatcaaaaggactggggctcatcacaggtgggaatagtataatattagctcttcattcagaaccatggtagcaaaaagagagaaaactgcatctgtggactgaattattcccctcagccctctaccccagtgtgtcttctttttgggaatagagtagaaagccaggaaaatggtggggatctaggaggaagcaggcatctcctctgacttgcacgtccccctgtttcactgtcctttgttaactcactgtgtttgacagccacatctgtggtcagccaggggtgcagctgctcctactggtagctaatggccatagaacaccaggggcgtcttaaagccccttctgtgatccgcaccactgctcctgggtatactcccagggtctgttatatgggtaacatgcacctcgcagcaagatctcctgaaatgggttaggacaggaatattaggtaattgcaaacccatacttcccaccattcttgtcttcaattatggccaattacatagttacggcagccttgtattgttacaatacaatcttcctctatgcttaggaacctctatggagatggttgtgttacttcaaccaaagacaagaagagactaatctgcagaattagaacaattccctagttcttcaacaaatcagtgctgcttttcttgccaataatagacgtgtttgtatttctccgtggaaacccttggggtaaacatgttgcttgttcttccaataaagaattgaaccaccagagggcctcaggcgactcaggaggtttgggaagagacaaaggcacatgcttagagggtctggagaaggcgaggaagaaggaagggagccaagtaaaacatgtgactgaccaggggctttggagaagacaagccctgcaggaaggcacgcatgtggtcattctgtctgtagcctcccattcctccctgctttccccagctgcatctacctggatcctgaatttgaaccaagtggtccaaacggcccggtcacctgagcaacccctctgcaggaaccgcaggtgtgggcggggtggtggggaggaggcgggggggtgggggaaaggcggggggtggggggagctcagcggcgccatctagcgtccagacagcggtggctctgggaaagctgattgttttcttagccagaggaggaagagaaggttggtcctcagcgcctggacgcctggtagacgatagrggatgacatgatgagtaaaataaggacaggaacacgccgaatcccctttcataatgataggaccacgccaaatcccctttctttttaaaatttgacatatacccttgaatatatatgtattcttataaaatatggttatctggtatgtatttatgtatattgatataaagctgcagatttaaaaatagtacttctttcatctctctccatctacatagtcttcgtggttttcagtaaaatgataatttctggattacttagatgtagttattatgatccaacccttgaataaggggagttgagagttggtgaaacatccctgtctcaatatttgttcatgccatatttcctttgaaagaatttacagataaaggcatcaaatacctgaaaaagtaacaagtttactatattttacttgagaatttgtatatatatttttaagaaagctttttagttttggcgtaattataaactcacaagaggtagcaaaaagagtacggagttctgtgaaccttcaactggatttctctaatggtgacatcttgcaatggactgagtatgtctccctcaaattcatgtgttgaaatcttaatctccatagtggtagcattaggagatggggcctttggaaggtgattaggtcacaarggcagtgccctcacaaatgagattaatgcccttataaaaaaaaaaaaagaccgcagaaaactctcttgtcccttccaccatgtgaggacgcagtgggaagatggccagtccatgcaccaggaagcaggccctccccagacactgaagctgccagggccttgatcttggacttccagcctccagaactgtgagaaattaacttatgttgtttataggccacctagctacgtgtttggttataacaccctcaatggactaagacacagataactggagtacaatgtcaaaaccagaaaatccacataggtacacactactattaactaggctacagaagttattcggtgttcactgcttttaaacctgcattcatctctctctctctctgtctctctctctgtctctctctgtrtgtgtggttttgtgtgtgcatacagttctatgcaagtttatgtcaggtgtttttgtcaggtgtggatttgtgtaagcagcgcctcagtcaagatgcagaactgctccaacaccacaaaagaactccctcttgctacctctttttattaacatccatgccaccaccccaatccatccccatcccctggaaatccctaaccttttctccatctctgttgttttcttattttgggaatgctatccgagtgaaatcatactgcatgtgacatttggagtttggctttctccrccactaagcatatgcttagcgatgtctgtgctggttgttgcatatatcaatcgttcattccttttcatgactgaatagtattttattgtgacagagttcgttaaaccatttatccactgagagacatctgggctgtttcctatgctgttataagtaaagctactatgaacattagcgtacaggcttttgtttgaatgtaagttttcatccctctgggataagtgcccagaaatgtcattgcagggtaatacggtaagtgagtgtttagttttataagctaacaaagtatgttttcatttacatcagcaatgtgtaagagattcagtttctctgcaacctctccagcatttggtattatcaccatttttaaatttaactttcctaatttgtgtgtagagacatctcaatgtggctttaatttggatttccccaatggctgtttgtgtgtgtgtgcgtgtgcgtgtgtgtgtgagagtgtgtgtgcatgtgtgtgtgtgcgtgtgtgtgtgtgcacgtgtgtgygtgcgtgcttgtgtgtgtgcatgtgtgtgtggggtcagctgatggctcaagctgttagattcttcagggtctatcttagcttttgagtgaggctctgctcttctctgggtggtccccagtcaatgactgagccgagtggcagttcaaagtctggaccatctctaccccctacaggattccttcctcaggccatcttagttctggcctcttttccttttctttcccaggtgttagctccacaataaatctaactccatttcagcatctcagtgtctgcttccttgagaacccaacaagtacagcatgtttcttggtacttcatggtgtacattcagtccatttgactcatccattcctccaaggatggatactgaatttgcctccaactcccactgccatgacaaatgctatgacgaacatccttgttctcatcccttcatagtcctgggggagaatttctttcaattaggtataatttgtagtgggctttctgagtcataggatgtatgtatgttcaatttcaccaagtacatgcaggctatgttacagagaggcttcatcagtccacatttccaaaggcacaaaacccaccttagacccatgtttgtgtttctgaaagccctgcttatatttggcactagataattttctaattttgataatctcttgatatatttgttattaatttgttttttctatgaattacttgcttctatactttgccatttatagaatgggtttctgacttttacttacagatttgcagaagtttcctatatattctaattatgaattctttgtcagtttgagatgttgaaagtatcttctccctctcaactttgactatggattcctttgttgaatagaaacctgtaatattaatgaaatcaaatctacatatttttttaccttgtggtttatgatttttaggtcttgtttaagaaaatttccacctttaggtcacaaatattttcctacatttttagtttcactgtttatgtatagattcttactcttgctgaagttcattgtatattatatcaggtaaggatgcagttttatttttctccatattatgggagcttttccccactataacctactaaacagtcagttttttcctgtttcttcgtaattcccttatattcatgagtctctgagctctttttggttctgttggtctgttggtctactcttgagccaataccatgattaaaaaaatttccatggctttatagtgtaacttaatatttgatgggaccagtctcacttctttgtccttctttctgaaaaatgatttcaccatttgtgaacccatttttcatatgttttagaataaattcattaacccctaaaaaattctggttgggattttgattgggattggaattataaaaaacatttgaggaggatggatatctttacaatgttaagccatactatcaaagagcacggtttttttatttatttattcatatatttcattacattatggtctcagaacatggtctgtatgctttcaattctttagaatttgagacttcttttaaaatcattatttggtcagtttatgtgaatgttatatgtacacaatatacacatgcattctttggtttgtggagggttatatacaaatatgagtttattaaatgtcttatttagataatctatgtctttgctttttttgtctacttgatctatcagttctgagatttatgtactaaaatcagcaatgttgttggttttcttcttcttgcttgagattatgttgttagatgcatatatgttatgcatgttgtatcttctttgtctattgtttctttcatcaagatatactatacctctttcaagctgatacagaagtagagagaaggatataatgaaccctctcaaatccatcatccagcttcaactactcrtggctactcttattttatccatactacacaaactcttccacaccccttctactggattattttgaggtaatggcaaacataatatcatttaaaaagtaaatacactagcatctatctataaaagataaggaattctttttaagcataatcataataccctatcaaacctaaagaattaacaataatttcttaataccatcaaatatccagtgttctaattttccaattgtcttataaatatttctattctctttacttaaattaggatcctaatragattyataccttagaattagctgatatgcttcttgagtttcttttcatctrtagatataacatatctctatctcttttgatatttcctggctatgaattctattttgttatatattaggatggctacatttttgtaattaaattttttaaagattacaaaaacaatatatgagtaaatgttcataaaacattaaaacacatatggaagtgtgttttttgtttatataaatagaattctacaatgtttattattctgtgacttgcctttatcacttaacagcaaatactgaaacatatcctttttaaaawatcacagctttattgatatacaattcacatactatacaatttatagatttattaaatctattgtcacaaccaattttagaatgttttcattacctctaaaagaaactctatatccaattctccccaatcctcccagaccatggcaaccactaatctactttctgcctctatggatttgtatattatgaacacttcaaataagtagaatcatatactacatggtcttttgcatttgtcttctttcatttagctaatgttttcaaggtacatccatgttgtagcatgtatcaatatttcatttttccttattgcagaatgatattccattgtatggatatatgacattttgtttatttaatcatcagttattggatatttgttttgtttcaactttttgactattataaataatgctgctataaacattcatgtacaactttttgtatggacacattttcatatttcttggacacatacctggggtgaaatttctgtattctatagtagtctgtctaaccttttgaagaactgccagactgttttccaaagtagctgcactattttatattcccaccagcaatgtatgaagtttataatttcaccacatcctcaccaacacttgttgttatctgtctttctgattacagccatcctggtggggatgaagtggtatcccatygtggttttgatttgcatttcccttatgactaatgatgttgagcaacttttcatgtgatattggttactatgtatcttccttggagaaatgtctgttcagatcctttgcccatttttaaattgggttacccatatcagatatatgatttgcaagtattttctcccattctgtgggttgtcttttcattttcttaatgatatcctttgaagcacaaaggtttctacattttgatgaagtttattttatcatttttttcttttgttgcttgggcatttgatgttatatctcagaaatcattgcctaaaattggcaaggtcgtgaagatttatgcttacattttattctargagttttagctgttacatttaggtctttgattcattttgagataatttttatatatgataaatactagggttccggtttcattcttttacatgtgtatatccagttgtcccagcactgtttgttgaaagtctattttgctattgaattgttttggtaatctcatcaaaagtcaactctatatgtgaggttttatttaattaatgtatttattctgagacagggtctcactctgtcacccaggctgcagtgcagtggtgtgatcatggctccactgcagccttgaacttctgggctcaagccattctctgcctcagcctcccaagcagttgagactataggtgtgcacaaccatgcctggctaattaaaaaaaacctttttatttttttttttgaagcgacaagttctctttattttgatcaggttgatctcaaactcctgggctaagcgatcttcctgcttcagcttcctaaagtgttgggaggccaagttgggaggccaggttcctaggagaatgggccctgcagcacacacaagtgcatgatcattctgccagtccctgcctttctaggcctgggaagctggggactggaatgctgttgccactccttgacctcgcctgcaaacacagcagcatcaagggcagaaaggcagtttcagtatccctttcatcttccagatcttgctcaaatgctcctgattggtagaaactaattctatacagagctttagatataaaacaatctgggaaatggagagtttaactttctagttgctkcagaacaggaagatacattaggagggaaatataatagaggttaaggaagtgtccatcatatttcccatgagtccagtgacttgggaaatggctgttctcagtcctggtgagactgtctagaattctgtgtccatttctttccctgaaatgtagagatatagaaaagatttgtattgtgagctaaattgtgaccccctcaaaagatatatttgagtcctaatccccagttcccatgaacgtaaccttatttggaattagagtcttgcagatgtaattgagttaaaatgaggtcctactggagtagggtgggccctaaacccaatgactagtgtccttataaaaggagaaatgcaaagacacagagacacccaggcaagccagccatgtgaagagggagacagagatctgagtgattcctgagctatcctttaaaccatcacctgtatctgtattgcctctcaatgtacagccaggccagcagctacagggaactcagaatattcaggctgtgctctcagttcccccctacctcctacttatttccatacttcctttcttggggacaagtttccatctcagcaggggctcagtgaaggctgtggtgatattgggatgctgggttaggatcatggctggggcaaagacctttttttgatacaaggtctcactctgttgctcaggctggagtgcagtagtacaatcacggctcactgtaacctctgcctcccgggctcaagcaatcctcccacctcagcctcccaagtagctgggactacatgcatgcaccaccaacgcagctaatttttgtattttttgtagagactgggtcttgtcatgttgcctaggctggtctcaaactcctgggctcaagctatctgcatgcctgagcctcctgaagttctgggattacaggcatgagccactgcacctggccttggggcaaatactttgaaacccaactagaaaacctagtccagatcctgcgtgggcagcagcaagtcaatagaacacaggtcattcacagtgacacagagagaggggacaaattccagcctttcctggatctttaggatgtcccttactgtctgtaacttttctgagctcaagtgcacaagctctatgattggtcttagagcttaaacacctgttacaacactactgttaaatgtcaccatcaaactcagctattgacatcctaaactattgctctgggctcagagaagggacaagaaacaagtttttttgtacacgttaagagtatagccaggcatgatagcaagtgcctgtaatcccagctattcgggagactgaggtaggagaatcgcttgaacccggcaggcggaggttgcagtgagccaagatcgcatcattgcactccagcctgggcaatgagagtgagactctgtctaaaaaaaamccaaaaaaaaaaaaaaaaaaaaaaaagtggtgttttcaaacctggctcctctctcagaatgatctttagagcttcccaaaaacacagtattcaggaccacccttggatattctgatatgactggtgtggcacgaagcagcacaacactgggatccttaagaagcctctctaggtgactctggtgcacagccagggttgacactgctgggatagagaagggcagcaaagaaaacatagaaatggatgctgagaaataagcatcacaaatcaacagagggcaacggggtgagaactaggggcagtaggaacacaggaacaagagtggacaagtgctcttggggatggacagggaaggctcattccacygaagctggtgggaagcacaggggcttttgaatgttgtggcctggggcttttcctcctagttgtgaaggagccctgttgcagtgtggttggaaggttgtgtggtttttgacaatttcccccttcccaacagggtcgggccacagggagaggagcgaggccttgatgtcacagatctgctttgaggcccagcctttggatgtgcactgctgccagttcttgattattaaatcccattgtggtggaagcattgtctggtaatatccagaaactcctctttcattagaactgggaataagcagggtggccatgggtgaatttcagcctctgatttgtgggtgggagctgaggggccactgagaggctgagcaaatcttcggggtgcatggtcactgtcactagaaagcaacaaggtctatgaccagggtgactggaaaggaggtagattaaataatcccctgaggttttggagcagtgtgcaaggaattggatttagggtagcttccagtctcttttttggggtcctgtttcttggattgtcacctgcaagtggccttatccagctggaccacagttgggtggtcagtctgtgctgcatgtggttcttctaggacagcagacacttcaggaaccacagaatatggggcacttgatgtccctgggatagctcggtgcctctgtgcagaccgctgtccagaatgtccttctcccttcagttgatgttaaagctcaaactctacytcctttttaaagttttctgtgactttccttgaatgaattaggagggactttctccattattcttgagttattctttacgtgactttttcttacagaaaaacaagcttctagaaaccagagactatgtctttcatcttcgtatccccaaaacctacagcaggatctaatccatagccatttagttaagtgttcgttgaatgaatgaaagagttgagtcatcacagacatgtaagttgtgaatgcgtgttcacacattctaatgagtgaggctatgacactgtgaaagaagactctgctgcagggctgagtagtcctgatgcatcgctggaggtcatatttgataataaggctggtgcctttctgaaatgacaagaacaggacatacatataccactctctcctcccacaccacagcagaggtttcgaattcactatggcgttgttatttactgagcctggttgtgaattcggaatcttttgtgacacagccactacaggcagcttaatgatcaaaactaggatgagagaggaaagctgttttccatcaagagcatgttctgttttgctggcaaatatggatattgtggtgaaaggagaacatttttaccttgacagcagaatataaggagtttctaaagtggaaggtaaactggagacactgctccaaggtgtagaaaacttcggaggctggaaccaaagacttttgaaacatgattgcagcttcagcagaggtagagctgcctttactataaaggaaatgagtcatggagtggcagttctgaaccatggcccctctcacttttttgctggtcctcccattgagatgtggggtctatgtcttcttcctttccatttgggygcaatggtgaccactgaccaatagagtatggcagaaatagtcatgggatttctgaagttaggtcataaaaggcrtgcrgcttccttcttgtgtgtgagaacacccatcttgaagccctgagcctccatgcaagagtctgattacttgagaccactatgctgtgaggaagccccagccccgtggggagaccacacataggtgcttggtctacagttctagttgagcacagaccagtccagatgccagacatgtaagggaaaaagctgccagacaattgctgcctccrgtattagcatccaagatgctatcagcttccgagtcctcccagctgaagccccagacatcatggatcagaragaagccatctccagggtgtcctgtckgaatccttgtcccrttgagttcatgagcataataaaatagttgttgttttgtgccactgagttgaggtggcttgttatgtagcaatggataactgtaacgtggaatcagctctcaggcagtgacgggggatcttgtgagttttgcaaaccaatccttggatgctctagcaaataagcatgagggtttagcaggcaaccttttaacatcctgactaagttcttggatcagacatctacacctaatatttttttttttttaacttttaagttcacagtgcatgtgcaggtttgtttyataggtaaacttgcatcatgggggtttgttacacagattatttcatcacccacstattaagcttagtacccattattatttttcatggtcctgtccctcctcccaccctccactctccaacaggccycagtgtgtgttgttctcctctatgcgttctcatcatttagctcccacttataagtgagaacataaggtattttggtttcctgtgttagtttgctaaagataatggcctccagctccatctgtatccctgcaaaggacatgatctcattctttttttatggcagactagtattccatggtgtatatatatcacattttcttcatccagtctatcactgatgggtatttaggttgattccatgtctgtcgcccagattggagtgcagtggcgtgatctcggctcactgcaacctccgcctcctgggttcaagcgattctcctgcctcagcctcccaagtagctgggactacaggcacctgccaccacgcctggataatttttatatttttagtagagatggggttttaccatattggccaggctggtctcaaattcctgaccttgtgatctgcycgccttggcccctccaaagtactgggattacaggtgtgagccactgcacctggccaattccatgtcttttctattgtgaatagtgctgcagtgaacataggtgtgcatgtgtctttataatagaatgatttatattcctttgggcatacacccagtaatgagattgctgggtcaaatggtattttgtctttatacacctgatatgttttcatgagatatcaggttcatcctggccttagccattagaaattccaggttatgggatgtagccaccttgaagtggccccaggayggggaatccatgcagtccaaagtagcaggtcaattaccaaatgtatgaccaaaaattatgaatgtctccccctaactgggagaggcacagcaaattaagaggagagattaatgagacaattagtatatatgttctgagaaacagctcgtagttggccaagagtttaggattagtccctcaggaacttacagttgagaaaagcatttagctaatcacgtattttttgtaaaaatgtttactgccaagataacttagggttaagtgtgcaattgctctaatttgcataagcttgaatttggtggtaaatgaaacatttactataactggcatattgatttaatacatatttatttgcttttgrgaagcagaacatgctttgaggagaagattatgtgctctcttgctgcaatgcattactattagaaacacagcccaggaaatagctgccacctcagggccatggccgaggtgggtagtgggagcagacggcaggaccagctccttggggctggtatcttagcctggggtttcactctctgctgtcaacacctttaaattcttaataattttgaaacaagggcttgcattatcatttgaggcccacaagctatgtgccggtcctggcgtgcaggggtctgcatcagagtgagctctgggttagatgttagctgaggtctcctcctacattgaagggacagagggaatggttctgcagggagcttaagaggaaaggtttaaaggctcccaaaggtagaggggcaggttgtggagggcttggtccactggcccaactggaggtttaggcagaggccaccagcagtcttgatgaaacaactccaagccccaggacttcttggttgacatcactcttactgagctccaccagctaacagagaccttgtcctatttatgccctatgagtgctggtcagtcactctcagggaaggcccactggctgcctgggccatgccgtccatctccactcagggattcttggggcatccgagttttcagaggtgagccaggctgatcatggagattcctgaactgcctgtcttctgggtctcccactcttgggtcatagttgggacttgggtggggaatacctgctgctctcagttctccctgttgaggagggtcagacaacagggacagtagccctctcacgtgagtgtacgtggtgctcagggagaattcaccacccaggcagagctgaccttccaggcctggggaggctatgtgcttgggaatggcagagtcgcacatggacaatcattgagtgagtccacggggaccaagctctgcctacttgagggttagaccaggcttgcatttttttttaagaggtagggtcttgcaatgttgcccaggctgtaggcttggactcctaggctcaagcaatcctcctgcttcagccttctgagtacttccagtttttattaggaaacagaggatgagcatccgaggacatccccgcctcggtacaggagccctcaggcttccctgtctgtccctccctgtctgtcgctctgggctgtcacccctgtgactgtggacatcttgaggtcggggacttcatcttccttgtctttgtgtcccaggccagttacattctgcttaagggaaggaggaacagtgagaaatgctgaaaagtagaagccggggcctcaggggaggagggggaaagtagtacctgttaggaccattagagatggggcctgggaggaagggaaggggccctgggattcttggggctgctttctcaggggtgaagtcaggtccttctgccatcttgttaggggtggatggtgttgggagatggcactgtggtggccacaggaatggccagaataattatgtggggcaaagtgcaaagactcaacagggcagggaagtgagaatgtgacttgaggcttgtatttctgaggctctcagccgttagtcactcaacaaggactgctgagtgcccgctgaatgcacaacaccaacaaacaactatgaaaaatcacccaggtaaagtaagcaatgcctttggtcttctagctgcccttggtatggtgggtgatgacagtcatacacccacatctcagtgtgtaaaggagcccctgagcctctggtgtcctgcacccccttgaaatgtttatcaaaaccacgcacacccttcctttctgtcttcttggagggagagaaaggctggaatctgttctattgaattgtccagtttgaaaagatccaggaccctgccccacatgacctgactcccctgttcctgcctccctgtcactggttcctggttctgcggctggctgtgggtgactgagctctgagcagggctgggagggacagtgtgagatcccccatctgttcgcttgtctgctttcctctgtcagtggttccccatgatagaaaactccacatccattgtattagctcctrtggctgctataaacacagtaccacaaacttagtggcctcaaacaacaccattgyattctcttaccatctgaggtcttcagggccttgttcctaatggaggctctaggggaaaatctgtttccttgtcttttccagtttctagaggtcgcttacattccttggcttgtggccccttctgtcatcttcacagccrgcagtgtggcatcttctctcctctcttctctcctgtctcccgctcacaagggccttgtgattactcaagcccacctggatgatccaggataatttcccatctcaagatccttaccttaatcatgcccacagaattccttcctagtgcatgtaaggtaacagatccacaggtcccagggatcaggatgtggacatcattagtggggggtggagggcattattctatctaccccatccatcctggccagctactatagtaccacacatcagcaattagagtttcatttttctttctctctttccctccctcatttcctcccttcctccctcttgtaaaatttagatttcagttttttgaataggtaatacattctcacgattcaaaaataaaaataacatagcactggggcgagaggctgtggcacctgggtttctgcagttagtgctttcctgggccatgtgccatggccgggacacttggggctccctcagctccagagggagggaggagaccctccttgccccatccccatccccatagcgtctggccaggccactctgctttctccccagcctctatctccctacctggccagcccgtggcccggccctctccatcattccccttctgtccccaaaagcaagcaaacaaaacaacaaaacccctaacaactcaatagaaaggtttccatgaagaaagcctgctcctatccctgttctcatccaccatgcttccctgtcgtctacatggagaccagtctagggaaactcctgtcctttctcatgcaaagttagcatgctgtctgtattattctatgcctcttctcttttcttacttgctatggcctgaagttttgccctatcagcacacagagtatcctcattcgtgtgtttctyttacaatcagctagaattgcactgtgaggttgtgccacagttcattcaattggggttttctacagatgagaatttggttgtttccagactttcgctgttacaaacaatgctgcaatgaatcactttgtacatatgtcgttcctgtgtttacaggtggatcttggggataaaccccctgaggttgggccagtgtgccaatggataaaggcatggtgatcctgctagatctccctgtagcatcttctctatggttgtgccattttgcaagcctgtcactgacactgggaaattcccttgcagcctccccaagagaaagttgtcactctcagatttttttttttttttttttgagacagggtctcactgtgtctgtgttgcccaggctggagtgcagtggcgtgatctcggcttctcagctcaagagatcttcctatctaascccctctgccccaggactacaggcgtatgctgccctgcctggctaattttttttgtattttttaggagagatggggtttagcgtgttgctcaggctggtcttgaactcctggactcaagtgatcctcccatcctcccgyctcagcctcccaaagtgctgggattaccagcgtgagccaccgtgcctggccagtctcagattttaaaaaaacaatctgataggtgcaggatttcagcgagcttcctttttgttagtaatggtggcttttctggactgcagtagaccagtgtgaataaagtacatgccatgtgtgtgcatgtccgtgtgagtgcrtgcacgtctgtgtgtgtgcacgtctgtgtgtgtgtgcatgtctgtgtgtgtgtgcacgtckgtgtgtgtgcacgtctgttcgtgtgtttcctacacacatggccctgtgcctcccygcaagaagcagcacacagagcgaggctctgagrgtttattgtctgccccagtgaggctcctgggcttcctgggaggaactgggggaggaactgggggctggtcacacaggtctataggtcccattgtagctaaaagggggaggcatcgagcagtccctgtcctcagggatccagcgctggacgtagttggggccgttgtcccgaggccacacgatcacagtgtctctggatgccagggaggggtcctctgggaagaagttgaatggccggagcaggaagcccacggagttcccaggtgtggctgtgttgggaatgtcctctgagtgggggatgtgcaggaagcccaccgtcacccaggccaccaggtcctgcaggagacagggtgggcttcagtgggcagggctgagtactgaccactggaggccactctagcctttggtcattttcagttctgcctggaaacttgctgaattcctctccagcccctttttaaagagatgagcagctctgttgtgacctctgaacttgccgtccacacagcaaggcacagctcctgcgactggggacagatctgggcaaagggtggttgggactccctgatggtgatgaggatggtcctgggctgagctggaaggaggcagggccagcacygggcagggctggggacagggcagtacctcattttcaatgtkctcgttgttgtgaagaaactgctcaaagaccacgggcgggtsccaggggtcgttctggtggtagatgctgctgctgcacagctcygactcccggtacttggtcactgccagggggtamctgccaggcayaggcgaagcagcttggctcagggccctgggctggcccccctcagtcctgcccagggaacagcctcagggtcagaatagaggaagatgattgccttccccaagatgasagatcatctgtcctgggagtcagcaggacgggctgctgttaaccgggttcaggtgacccacaggagtcctccccgcccccctccccaaatgcacagagacacaggcccagaacagcaggcaacccttgcacaacacaggtgtgagctgcatgggtcctctttctctctctttccttccttcttttcttttctttttctttttttttgatggagttttgctctgtcacccaggctggagtgcagtgatgcgatcttggctcactgcaacctctgcctcccaggttcaagtgattctcctgcctcagcctcccgagtagctgggattacaggcgcccacgaccacayccggctaacttttgtatctttagtagagacagggtttcgctgtgttggccaggctggtctcgaactcctgacctcaggtgatctgcccaccttggcctcccaaagtgctgggattacaggcgtgagctcctgcrcccagcacacaagtccactttcatttggagtttcttccgcctctgccaccgtgagacagcaagaccagcccctcctcctcctcttcctcagcccacttaaagtgaaggagasgaggataaagacctttgggatgagccactcccacttaatggattgtagatatattttcttttccttaggatttttttttttttttttttgagaactagtcttgctctgttgcccagactggagtgcagtggtgtgatctcggctcactgcaagctccgcctcccgggttcacgccattctcctgcctcagcctcccaagtagctgggactacaggtgcctgccaccatgcccagctaattttttgtgtttttagtagagatgaggtttcaccgtgttagccaggatggtcttgatctcctgacctcgtgatctgtctgcctcagcttcccaaagtgctgggattacaggcgtgagccaccgtgcccggccaggattttattaataacattttcttttctctagcttactttattgtaagaacacagtatctgacacacagaacctacaaaatatgtgttcacggaatgtttctgttagtggtaaggcttccggttaacagtaggctattcgtagttacgttgtgggggagtcatagttacacttggcttctttactgctttggggggttggcacccctaccccccatattgttcagggtcaattgtacacacagatatacacatacgtatatgtgtatatccacatagactaggaaccccatagacacaaacacagacagacacagacacacacactgagggaagccactgaccctcccccaggcccyctgggtcttcctcaccttgcccaggtgatggcctgctcctcctgccagcctgggggcagcacctggtcggccatggagtggatctgcaggcggtagctgcgcttgtggccccaggggttctcctgggggctggtaaagagcaggtacttrggcagcttccttttgaagcggaaggccgcctggcgctcccaggagtactgcgtctgctccagagttggctggaccacgcggtgtctygggctccaggggttggtgatgttttctagcttcatctgcagtgtctggaagctgttcttggtgcctggaggtatgcagggagaaggagaacgagaatcaagctgycagaactgaaacctcctcattctaccccaggatctccatcctccaccacatccaacagccaactgtcttgaataaccgggatgttgggggatgccctgggcggctgtggtgattccattaccactctgggaagttcctctcaagagctgtgctcatgcccatctgctgtggctgcaatcctagagcaggggcacccatttttctccaggcatgggaggctctgtccagagaggtgactggggctgaggggtaggagccgcccrtgtggtcctggtggccttgttgggtctggcagcattagttattctacccatgccattcttttatggtgatatcatccaggagacaccctgaatattcccagacaatactacactccatctcaaagcgctagacagtgacatttcttaccctcataggcaccgtcccctcccttgccccatgcacagccccagggtcaggacagggtccacactgttgcatccagggcaaccctcggcactgttcgctttcaccatttttcagggacacacaaatttctagctttaggttttacagaagcaggcttggcaaatgctcctaactttccaccaccagggagttatagtgccgtctcctgggagtttaagttattggctggatgcagatgtttgaacgggagagtctcgctttgagtcctacctgccacatccaggtctacgcggtagtgcaccaagtgagtgtgtatgttgccaatcaggtgggtgtgcaggcgagtgccgtggcgcagcccctcgggggtgtagaaggtggcgtggacgtagccagtggcatgcatcttggcctccatcaccccgttggggtagaagataaagtcccaaatgtaatcataattgtagacagttgaagttgtccgcagcaccagcacctggcccttcagcccygcatagaagttgaagccacctttaaagttggaattaaagtgccgccgaaggggcacccctgtgggcatttcaaagaggcagagggctcggggataatggaccgggtcatcggcatcatagtagtggaaagtgtccaggaaggtggcggtctccgggcagtcgatgccgggggctaactcatgagtgacgctgcccaggccccagccgacatcgaggtacttggtctgcatgcctgcaggtgtgtgtcctccatacagcgccactgcctcttgcacgctgacctcataggcaatgcgctctccrccgaagtgcacgttcaggacctgcagcccgraggaggagcgcagccggaaggcaaagctccagycgccgtagagcacagcgttgccctccagcctgaagcgagggccgtggggctggaccaagcgggggccrctcacatggatggggctggggaagtccccgcggggcttgtgggaggagaagaggggcggctcctctgtgctgtcatgccccttgcccccaggcagcgggtcctccaggaccaccacgtccacctctccatctgcatacttccgagccagttcctctgggctcccatagaacttcccgttgtaccacacctgctccacggcccagtgcccagcatctgtgctcccatgatccacgaggagctccagcccagtggggtgcagaaagtagccttctacatagcgctgtatgataagccaactgcggcgctggccagaagccacaccccggggggccacatcggtgaaggccaggcatctgtcatggcagtcttggaatgagaagcctgtggtattgaggaagaactgatgcaggggcttggtggcttcctgcagggtgtggtagaggagggcatactctgctgtggagatgggcctcgatgcccaggaggactggtacccaggcctgggggacagtgctcgcatgtagcagggccctggcaggggccccacagcaaactcggtgacattgggatgctcctggtcaccaaagaagatgacggcacgggcttcccgcacaggatgcctttcacctttatccagaaacctcagcacatggtacttcttgggcagcagcatctcgatgagaaacacggtgttcttggccatggtggtggtactggagggctgcagcctcagctccttcttggaccagaggaagctgtgcactgccttcagctcttggttgcttaggtctgaaaacacccctgccttcctgggcagagtccccggggagggctccgccatggccrtctgcagcatcaggatggcagccacggcccagcccagggccggcatctctcgctccacggctctggaatgcaatagaggagatgaacttagttgtcttatgggcagagatgggcttccctcaggttaggrccatgraattttcccatggactgagcttcctccccttgccctgccccaagctggaggctgtcctggggcagctggggccccatgcatagtccccagmgccgtcgggccgctgcctgtgcatccatccatttatttctgccctctcctcactcctctgtaaatgtccttcagtcctgcagccttccttactcaggggaacacccttgtttttgtgtattatctcagccaggggtgccgtgagtcacagaggccaggctgggcccctgcacatgcccccaggtgcttcttgtgtcctggagaagaagacacctgtattaacagcaaaactacatttctgacacaacgaaataccttttaggtagacagattttgaaatttagtgtagaarttcaaaggtaggctctagagtcaggctgtctgagtcaagtcccagtgactcatgccactaggacttgctgtgtggccttgggcacgctgcttaaactctctgggccttcatgttcttagttwtaaaatgaaaataatgacaacagtgcttagctcctagggttgtggagagaaatcaattaaacagtaaatataaagtgtttgtaacaatgtcygccatatgggaaatacatgagaaaygttagctgctcttcttgttaaatacaggctatcracaccagcccatttaaagttttacgcaatgtagagtgattcaggtgtgactaggctgcagactgatggctttgggggtgaggtagaggtgcccagtcctgcctagccttctttgtgccccattcacctctcttgtccacccaaggctactaggaggggacctcagggagggtttcatcttaggaagatgccttttcctttctcagggagggtgggtcagggtcttcacctcataaccccattccccaagcagctgtaaaatcctgtgcttgtagctgtgagcctcctgcagggctgggagacgtggtggccacagctctgtcttcccatgtgctgtgtgcggagtctctgggagactgttactcttgcctgttgcgctgttgctacagatgctggctggagctgtctcccagccttagtttctccagaccctaacttgtcctcctaggtgatgtgggcctccctggaaggctgccgtcaccgtgaaatttccctacagaagcactgcctttgccaccttgcacccccttcctcaaggctctgggttgagctgggagccccgcttcaggattcctccctgtctcagctgtgcttttcacttcctgcaagcagtgcctgaggcacagacacttgatttataaggtggatgcatgagtgggttggactctgagagatccttgttttcatattttcataggtagttgccttttgctccctaaatcagaagccctgggggtaaacctggagaaaactcgttctcctgtgcagacagacaggtagcagagagggttaatccactcctgtctcagacctctgcctggcccagcctcttcccagggggcccaggctgcctgcaagggaggccccgaggatttcacctggaaagtcggcggcacagggtgtgaggtgtaactgaggtgcagcagctccactttgggtgtatcgtggagtgacccactgaggaaacctgaccatcatgagcgcttttcatttcttgcttttgtttttggaaaatgcatttacacatcacatttccgaagcacaagcgttgggaacacaacccatgtgttaactagaggccctgttttcccgtggcttttttcctccagagaagctcagctgcacattgtcccttcccacccgactctgggccagtgtcacatcctttgccaccttttgaggtcagctgaaaccccgcactgccgaggaatgctgtttttggccccaactaacatacttctccactagtccccttagcactttgtatttaatttgtacacgatgggcagttcttgattcatagacaaatgaaaggtgttggctgggcctgttccatcacccgagggctctctagccctggaggccacggtaaaggctgatctgagatgtccttctctccctttcccatgcccctctccccgagggctctccccttgccctcgttttgctccatggtcatggcctctcatggggatgtccctctagttgccttgtcttgccctctggtgctggcagaagaccctggaacccacatgatcttgggctctcggaggccctgcttacctggagggagcaggtgaggcaggggctgcaggcggaacccagagccagcaggaaggatatgaggtgagttcttgtgttctcctattaaatattggccaggcctcttttttttcttctttaaatagactattttttctttttcctgagacagtcttgctctgtagcccaggctggagtgcagtgatgcgatcttggctcactgctacctctgcctcccaggttcaagcaattctcctgcctcagcctctggaatagttgggattacaggtgtgcaccaccatgcccggctaattttttgtttttagtagagatggtgtttcaccgtgttggtcaggctggtcttgaattcctgacctcaagtggtccacctgcctcagcctcccaaagtgctgggattacaggcatgagccaccaggcctggccccaaatagacttcttattagacttaaataaataaataaataaatatatatatatatatatatatatatatatatatatagtcaggatctcactatgttgcccaggctggtcttgaactcctgggctcaagtgatcctcctgcgttggcctcccaaagtgctgggattatagtagactttttttttaatagacttttaaaaatagactttaatagatttcttaatagactttataaagtctgttaaaagtctttaaaaagtctattaaaagtcttttaacaaactttataaagtctattaaagtcttttaaataggagtcttttaaagaggaattttaggttcatagcaaaattgagcgaaaggtactgagagtttctgtatactcacagcccctacacacgcagcctccccactatcaatatccacaccagagccatacatttgtggctgatgaacctgcacatcactctcacccagagcccacagtttacatcaggactcactcttgctgctgcatattctatgggttggacaaacggacaatgacatggatccaccattagaatatcacacagaatagttccacctcccccaaaatcttctgtgctccacctcttcctccgaaaccctagcaatcactgctctttttattgtctccatagttttgccttttccagaacgtcctgtatttggaatcttacagtctgcagccttttcagattggcttcttttgcttggcagtgtgcatttagggtacctccatgtcctttcacggctgggtctccttttttacaacctcttatacccacgtttctttttgcttttccaggaaggagaaagatgtggaagagacctttgctttccccaggacaaacctctgtccccatgtgcagtggcagtgggggtggtggctggtgagacctccaggcaggaacaggaagcaagccctctccctgctcaccctcctctctgagctttccccactccaccctggccggctgttgcctgccaccaagcacccgggcaccttctgtgatgtgctgggctcccgccctcacttcctggccctcctccctctgtgtcctgtttcttctgcccctcactctgtgccctccttccactgcttttctgtcctccaggtcagccccttcttgactctcccgaatacccatcagaacgcacctgtgtgctctgctcccagttcgctctgcttccagcctttgcccttaagctgatctctgactccttcttgaagtcaatcagaccccrccctgcagggagggacaaggtgaggcctgagctggcctaggaggggcctatggcttgggaggtgcctctgtgggcagctacagtggcgagagtgggtttgaggaagctggctgtgcarcacacttgtcctgagtctgtttccagacaagtgccgccttccacaagaatttgccttggcttctctgtgacgagccatgcaatgccacgatctgttaatttaggtggcatattttagaggcagagataaggacaaggggccatttcctagccggtagtcttacctgaagctgacagatggaccagggcaggggctgatagaggctggcacccacagcaaaacagagaattcaaccgctcctagaacaagacaccagaggcagaaccgtttgggaggagcagccactcaagacgagttgcaaactttggcggctttttaacgatctttgagaccctgaccagattcagaaaggaggaaggacttggctgggagaaagctggccagggtagctaaggctatggcacagagcggagaggggagaggacactggggcaggtagtgcccatgcagtgggcggacagtgctaacgmccacttagtcaggttgagaagggcgaacgtggtgaccggggtaactcctagttggaaaggaaagaatagagtcaggaaaagttcgtggctcaggagtgccaaggggtcatcatcccccattaccaaggtttggttgctcagggattgcacaccgctttgtggttataggggttttgtatttctcatcatcatccttcctgctgcccgcaatgcaagccatttcagtgtgcactggcagctagatgaaggaaggtgaacacacttagtcaacttgaagcttgcttgcaattccagaaggtctttggtgtttctgaggaaggggatttgccttccatgttaaaatgatgattgatacaaagacaatgaatgctaaygtctttcaccctcagtgttcaagaggactgtgagttatgtattctcagttatgggctcaccaactccgcagagaattggggggatttggattagaagagagtttcaggaacaacctgattttgaggactacaatctgtttccattccacaaaggaaactgcgacraagttaatggagtgaggatggatcgagaaaagagacttgcaaagatttaaagggaaaggggccacatgcacatgatggagttagaccctttcacacacggaaacggactcgaaagggaccaaagacatacatgtaagagctaaaactgtaaaactcttaaaaagaaaacataggagtaaatctgcttgactttacatctaattcttggatgtgacctcaaagcacaaataaccaaagaaaaaaaaatagataaattgacatcatcagtattaaaagacttttatgcttcaaaggacacccacaggaaaatgaaaagacaaagcatagaatgggagaaaatattcacagattatatatctgataagaaaattatatctagaatgtaagaagaactcttccaattccataataagaggcaaataatccaattaaaaatgagccaaagatctgaatagatattccccycacgaagatacacaaatggccaatatgcacatggaaagctgttcaatgtcattagtcatcaggggatgcaaatcaaaaccaccaggagataccactttatatccactaggatggctagaattcaaaagcaaggtaataacaggtggggccaggaggcagagaaactggaagcctcacaggcagttcatggtgagatgaygcagccacttcggaaaactgtctggctgttcctcaaatgacttaacgttgttatcatataacccagcaatcccactcctgggtatatgctcaagagaaaggaaagcctatgtccatggggaaacctgtaccagagtgtttactgcagtgttattcacaatagccaaacagtggagacgactcatatgtctctgcattgataaatgagtcaacaaaatgtggtctatccactcaatggaacatcattcagtcataaaaaggaaggaatcactgttacatgacacaatgtggatgaaccttaaaaccactacggcaaatgaaagaagccagtcacaaaagaccacattattccatttatatgaaacgtgtggggtaggtaaatctctcaagcagatgagaagcacattagtggttgcttagggctggggtgcgatggagggatggggtgagagctaatgcttatggggtttctttttgaggtgattaaaaagttctaaaattgaaggtgatggctgcatgtacctgtgaatgtactaaaatgcattgaattatacactttaaatgggtgaattgtaaggtgtgtctcaataaagctgttttcaaaaagtgacaggactaatatctakaatacacaaggagctcttgcaaatcggtcagaaagaggcagcagtccccatggaaacctggtaaagaatcccaagggtaacttgcagaagaggcaccccaaagggctaaagagcacatggaaagatgctcaaatgtagtggttactagaaaaatgcaaagcattcaacaacgagatataatttttcatgggaaagctggatgatgccaagtgttgacagagatgtggggaaacggggaccttatgtgtggttgtgggaaggggttattgatggcacagccattctggagggcactttgcagggtgtgggcaaatgagagaattgcatgctctccagactcaggaactctgtctcttggaatatatgtcaaagaggttctcacccaggcctagaggtgggatgcagacacaagtggctgtgaggctggggagctggaggccatcggggtgccacccccaggagagtggtcactgcacaccatggggtgttgtgcagttggcgggtgcaaaggcatggatgtccacacagccactcctgagaagggatctcaggatcatggaagacgcaggatgagtgatagcacgatgccattacacaacaggaaacacgtacacaccaagccacccgctttcaagagtggatacacattagaatggatgtgagggcgggggtgggagtgggaatacatacatacacacgtgagaaagacaagagagaggacttgtatgggccagtgatgacgacatccatgcactgaggtagaattaattcagttctgcaatggacgtccataaataaataaaagaaaggcctgggagacagactgagtgactacaggtcctcacaccagggtagatgtggctgaggacaggaaccaccacaggtcccgcacctggaggatgcagtgagggcagggaggaacactgcgtgtaggcagggagctgaagcacaccagaaagaattgcattttttatgtaacggggcccataacatgtacatagaaggattaatattacaaggtggcacagagtaagtgcaacacattgatgcccaagggcctgtcctgcaagggcttggaaggagattcccctcaagactgcaagcccccaagtcctgggactctatcccctctgcagtagcctccatggctgctgtcacagaggaccacacacaggggcttaaagtaacagaaatgggttgtctcacagttctggaggcctaaagtgtgaaatcaaggtgtaggcagggccatgctccctttggaggctcaagaagagggtccttcctctcctcttccagcttctgtgttgccagcaatccttggtgtccctcagtgccttggcttgtggccatgtcactccaatctctgtcctcacatggcgtcctccttgtctcagtacctctattttcaagaacaccagtgattgtattgagggcctaccctactccagtatgacatcatcctaactaattcatctgcaacgaccctatttccaaataagaccatattctgaggttccagggaggacatgaatttttagggggatgctatgcaacccagcacaccttctttacctgcctcattgcagagagcatggtccttggccagtgagtgaattccaagccctgtgccctggggggctgctgccccgaggatccacaaggtagagcctgtgtggggttttgcgatacacgagggacttaggaggaagaggacacactgggcaggggcgggggtgggagtgggagtgtgagtgggggtaggagcagagtcctgaactgagatgtggtgtgtttcccaacatgggaaaaggtcagggctgatgcggggagtggggtgcggtttgtgtcgctgtgctgaggaagggcaggtggtgtgtctggaaggaggaggtagagtgaggaacctccctatgcgcttctagagaagtgtgggggtgaagaggggcttgtgggaatcctatagagacagaggagatagagaagccctctagagaggcactgggaaagctgaggcgaacagaatccttgtgcagaaaagctggtaagtctgttgttatatacatatatatatttgtagagacggggtcatgctgtgttgcccacgctggtcttgaactcctggcctcaagtgatcctcctgccttggcctcccagagtgccgggattacaggcatgagtgaccatgtctggccaaggccattgtttctgctcatgtttgtgtgcactgtggctggggaacttgagatgtcacacttgaaatttggggtctgttgccttgccacctctcttcctgctccctggctggggctggcccctccatactgaaggtgaccttggtttctgaggtgtggttcctcgcttgtggaattaatgattgctgacagttagagatagcacttgggcaaagaccgtatcctgtcagttgttcgctgcttgcctttcttaaggaggtccaggcctaaggaggggcagcgctatatacaaaggtggagctaggaagccagaggtcacagctcaccatgtcctgtggctaaatcttgatattttgctttcagaaagtcacaacctgtcagagctaatttgagaggatctagagagtgggattgtttccacgaaaccacagagaagaaacagagcaacccgcgcctgcaccaggacctactgggggtacaccagggaagctcattcgattagatctttatgtgaatgaagccaacatcatagcttttgtccctgattagggaaggtgggtttgtaaaaaagaaaattccaccattttccgaggcagggccattggtcataaggggccctggtgaggtcctgatggcttgggcagccccacccagagaggggagaacgttcatctccaggtgctagccctgcttctgccactggctggtgggcttatacttgacagtccttaattcattcaacaaatgtttatggagcactcattctgcaccagggagacacagcaacgaacaaacaaaaccaaagcctctatggagctcatattttagtgaagactatccaacagcgaagcttgtgagccttcacagcagacctcctcactgggacagctgatgacaggggctggccctgggctggcatctgggaacttaactttcaggatcctgccccgctgtgccggcctgctgactgtttttacagacwatgtgattagtgaacacctgctttcctattgggaatctggaatcttgttagttgtggtgggcagagagtgtgcctacgtgaccagccccaacctctgccccagctctgagcttctacttccctggggagatgcagggcgcagggtatgctctgtgcagccttcatgggagggagagctcagcgagtctgtgccctgacccctccagaccccgctgtgtccttgctgtgtgttggccgtgggtatamctgtctgcttagtctggtgagtcctagtgaagctctgacagcagaggtgccatgaggtgtcacgggtgttcasagaggtgtcctgcaggcgttggcggcaagtggtgacccagtgtgttccagtggggcacatgctcaggggaaaacagagcaggggcatgtggtgggggcagggcctgacctttcagaaaggggactcctcttctcctcaatgtggtgaaggagtgggccacaaggatgcctggtggcgggggcatttcaggctgaagkagcaaggaatgcaaagtccctgatgcagagtgaggggactgctgtcgccaggggcaagtggtggcaggtggattcagagagtgaccaaacgccctcgcctccaaggctgtcactgggattttactctgagccacttgggaagcctctgtcaggttcgtgcagaggccaaaactgacctgcctctagcaagtgctatctggaggtgctgggggagacagaatgcaaaagagtgaaggctgcaatgatggcaggagcagagagcaggccggggggtggttgcaatagtcttggggggcaaggctggttgccaggycagkgttgcaggggtggaagtgatgagaagtggccacattctggatgtagctggaagggaggctgggggagatttgctgagggctgggatatgagactccagagagaagagccaggtgaccccaagttcgggcagaggttctgctctgctggggcagccaggagctgagtcaggatgcttcagtgtgtgagcatggctggctgctggctgagcccacttctggactttgatgctggatcccaaggcacatgaggggcaagggtggagggagccccaaggagacctttgtgaggagtcagagaccagggctgggtcctccaggcgctctttgtatcttcactgaccatgcctggcagtgctggccagctgacagcttccccgtcaaatcccacattcctccctccagctgcagctgtgtctggcagcyggggctgggcagtagacacagcagaattcttccttcctcctggctctctttagtagctacctcaygaaatgtgcattggattcttaaagaagaaaaaaatcaagaggccagaaaatcaggaagcagaagttaaaatatgttgctgatctttgaaataaagaatttgtgttggtagacatgtgaccttgtgtggtgmagggatgtatttgtgttaaaccattttggtgactatgacattccaggtgcatattggaggtagcatgtaggacttcagaaatcaccagaacagtcactgcctctgtgcagccctttgctgagcacaattttggaaggaaatatagcagcatggttactggtacaggatatagagccagaaggcctgagtttgaatccaggttctacttcttttagttggatgttatgtgggaaaagcggttaacttttccttttagagacggtgattttctctggtggtatgatttgatttcttgctttttaatttttgtgcatctgttgtatgttttttgatttgagattaccacagggcttgcaaatactcttacaatctawtaagttgataacaacttaacactacttgcataaacaagcaaactaaaaagcaaaaagaamactaataaagactttctctttatctttgttcccctactttttgttcttttttttttttgtttgagacagcatctcactctgtatctaggctgaagtgaggtgcatggcgtgatctcagctcactgccacctccgcctctggggctcaagcgatcctcccacttcagcccccaaagtagccgggaccacagatgtgagccaccatgccagttaatttttgtatattttgtagagatggggtttcgccatgtcatccaggctggtcttgaattcctgagctcaagcaatctgcctacctctggcctcccaaagtgcttggattacaggggtgccctgtgggattataggcagaagccaccatgtgaggccttcccccactttttaactcttgatgtttccatttatatcttacygtactgtctatgttttgaaaagttgttatgatttttgattggttcatattttggtctttctacttaaaagtagtttacacaccacagttacagtgttgtattctgtgtttttctgtgtacttactaatacccgtgagttttgtatctttagataatttcttattgctcattaacatccttttctttctgattgaagtactccctttagcatttttttgtaggacaggtctggtgttgatgaaattcctcagcttttgtttgtctgggaaagtatttctccttcatgtttgaaggatattttcaccagatatatrattctagagtaaaagttttttccttcagcaccttaaatatgtcatgccactatctcctggcttgtaagatttccactaaaaagtctgctgccaaatgtattggasctccattgtatgttacttgttttttttttttttttctcttgctgcttttaggatcattttwaaaaaaaatccttgccctttgggagtgtgattattaagtgccttgaagtggtcttctttgggttcaatctgcttggtgttctataaccttcttgtactcagatcttgatacttttctctagttttgggaagttctctgttactatccctttgaataaactgtctaccccatctctttctcaacctcctctttaaggccaacaactcttagatctgcccttttgaggctattttctagatcctgtaggtgtgcttcattaaaaaaaaattttttttgtctcttctggygatataatttcaaatagcctgtctattctcactaattctttcttctgcttgagcagttctgctattaagagactctgaygcattcttcagtatgtcaattgaaattttcaactccagaatttctgtttgattcttttcaattatttcaatctctgttaaattttctgacaggattctgaattccttctctgtgttatcttgaatttctttgagtatcttcaaaacagctattttgaattctctgtctgaaaggtcagatatctctgtttctccaggttggtccctggygccttatttagttcatttgatgaggtcttgttttcctggatggctttgatgcttgtggatgttcgtcagtgttcgagcattaaaaagttaggtatttattgccatgtttgcagtctgagtttgtttgagcctgtcctccttgggaacagtttccaggtattcaaaaggacttgggtgctatgatctaagctgtatctgctttagtgggcacccctagcccagtarcaccgtggttcttgcacacttgtagaggtatcacgttggtggtctttgataaggtccagaagaattctccggattaccaagcagagactcttttttcttcccttactttctcccaaacaaatggagtctctctctctgtgttgagctgtctggagccaggggtagagtaacacaagcacccctgtggccaccgccactgggactgtgctgggtcggatatggagtatcagcacaacactgggtcttgcccaaggcctgctgtaaccactacctggctactgcctatttgctcaaggccctagggctctacaatcagcaaaggtggtgacgccagccaggcttacatccttcccttcaggttggtgaggtcccctaggtcctgagtgggtccagrgatgccatctggagccatggatgggaatctaaaatcttagaagtctacctgttgttctattctactgcagctgagctggaactcaaaccacaggatgcagtccttctcattcttacatcccattctcacaggcagaggagcctcaccaggcccgtggggagtactgccaggctaccactgatgctcagttaaggaccaaaggaacttcagtcagcttgtggtgaatgttgccaggcataggaactcatccttcaagacaatgggctcccttggcccatggtgtgtccagaaatgttgtckgggagctagggcctggaatgggggcctcacagcctttatcagtgccctaacatactgtggctgagctggtatccaaaatgcgagacaaaatcctctttactcttccctctcctcaagcagaaggaaggggtctcttttggagctgtgtgctgtgctgcctggggttggggaaggagtggtgcaaacacttccttagacaccacagttggtgtctcatgtgccccaccagttcactaactccaagcccagctcagcactaggtcttgcctaggaattgcagtccttgttgcgtagactgctcctcaagttcacttagggtcccaaagcactgcagccaatgggggtgaggcttgctggaactcatgctctgactgctgggctgggtgagtaccctctggccagggctggtccacatgttccctccgtggtgtcagctgagtayagctcagttttgctttccgctgtgacatagcagcactgagttcaatgcaaagcctcacagtcatggcattctccctctctcaagtgtatatacagattctctgtgccatgtagccactgccaggggatgggggaagggtggcatcagcaactcaagactgtccttctcaccctcctcagtgcctctctcaggaatttgaagtcaaaaccaggcactgtgagtgctcacctgatttttggttcctatgaaagtgctccttttgagtagatagttgtcaaacttggtgttcttgtgtaggggtggggatgtttggtggagtcctttattctgccatcttgccctgcccctagggtaaagaagttaattttttggccgggtgccgtggctcacgcctgtaatcccagcactttgggaggccgaggcaggcagatcacgaggtcatgagatcgagaccatcctggctaacacggtgaaaccccgtctctactaaaaatacaaaaaaaaattagccaagtgtggtggcgggcgcctgtagtcccacctacttgggaggctgaggcaggagaatggcatgaacccgggaggcagagcttgcagtgagcagagattgcgccactgcactccagcctgggcgacagagyragactctgtctcaaaaaaaaaaaaaaaaaagttwattttttaaacctcactcagttttctcatttgtgaaacaggcacaataatggatatgaaggtrtgacaaaatygttggcatcagatgaggtaaaaggtatgtaaagcacctaactaatgtttttgacacatagaaatcactcaataaatgttagctatgatgatgatgatcatggttagctatgatgatgatgatggttacagttggggaggtatgaatgmgggtaatacagaggactccaggggccctgagatgtggtgagtgtgtgtgagggctccttgacttttccccttcccctgctccataagatcagagagttgatttagttcaygtctgtcttgtttagttcacgtctgtcttgtttagttcacgtctgtcttgtttagttcacatctgtcttagtaacaagccagtttccmtaaaggcttttcattcacccccctctcttttcaaaactcttatttttctttctaagtgttattttccctctgcatgtgagtaagttgttggccatctcaggaatcaaaacttccagaaccagctggctttgtaaccagcccggggcttggacctgctcactcaccaaggtggtatcttccagccacctttactgatgaggtggccctgtcaatctgtaatttatcacagataccactggtaagaaattaacccaaaagcataatgaacctaggaagtcgaagccgaagtgagctgtgattgygccactgcactccagcctgggcaacagagcgagaccctgtctcaaaacaacaaccaccaccaccaccaccacmacaacaacaacaaacaaagactgcacaatttccttcaagatatagcaattggctccttgtcagtatctaactggttttgaagttcttcctgttctaattcctaaatagctctggatttctttccagcctcayggtcttwgctatyattgtctwcatcaaggatttttaaccttggcaccattgatagtttgagcctgatcatgctcacgggcctgtcctgtgtgtagtaggacgtctagcagcatctctggcctcaacccactagaggccaaaagcagccaccgccctatcaggacaaccaaaaatgtcttcagacattaccagtcatttcctgggaggcaaaactgctgccctgctgagaacttctggtctacatttaagcccttgtgatttggcctgaaaactgcaattgcctccagacgccctgactctcctcctgagcacctccaatctgcccttcatgcttttgctggaagatagatctgaccatgtccccttcctccctctggtgggttccagttgcctattggataaaatataaactatttaatttggcattaaaaaccttttacagcctagccccaatcttccttttgttcttggtacactaatgctgcctcaccctgtgcttgagctatttcaaatcatgccaggttcactggggccacctggcctttgccggctttgttccctttctgcaagcctttctgtcttcttattttgggagcaagctcttgcttcaaggctcagcaccaactaccccctacccctgctgtccccaccctctttacatcttccacatagctggcttgtcctctctggttccagggcacttgcccatctccctcattgcatgtgtcatatggctttataactatttgttcacaagtctgtctcttatacggcttccttgaggtcagggattctgtcttaatttattcagaaccacagagaccaacacagcgcatgggatacagtggctgctcatttttgggttttggagtgaattaataaacagatgacatggacaaggaagatggaagaggtgttaggtacctagacgtcagaaaacttttaatttccctgtggcattttaagraaaaaacatgctaggtaacctggtttcaaaggatgctattaactctcaactcaagggaagagtctttatacaacatcgcaggctccttaggccgaggccaaggacaactgggagtggtctgagtcagcaccrgctcctggccatgcggctgtgcagtctcccacgtctcacactcagaagggctctctacttggcttaacgctccgctgctgtctttagattcttaacttttgaacaaggggccccacattttcactttatactgggctttgcaatttatgtagctggtactggcttgggttgagaaggttggggagggaggacagggcagtgggcagtgaactagcccttgcagggaatgaagttagatgaataggttgataggatgagagctgctaggccaggtatcagcaggcatcaggaagagaggccccaggcagactggtggcagcagcaaaaatgtaacaggtaactgaggccaaagtcttggatgctggttctgagcttarcccttgctggctccaattccttcctgttatgattttctcttttagtccccttcctcttctacagctccccattggcagaaggaaggagtgctagacagggggtaatttctttaaaaccaaatgcccctttgcagtgacacygcacctgggtctggagggaggttgaggactgaagaaacaaaattgaargggctggttgacatttgcacctatgtgagcaccagaggaagccttcaggctatttgaaaatgcaccttcaggctgcraccagtaacatgaaaaatcaggagagcctggcagcttcttaccactagaattgtaccccaggggctctttctccagcttagggacttattttttcattaaaggtggtaggattttataaatagcaaggaaaaaaaacccgtggtattagcatacattatctaccagagtagagggatggatgaggcccaggcaagtagttaggtcagtagccagccccagaattggggtcttagggctgggaggggctgggcttggagaacatcatgagatgaagctttgagagctgcaagccaggttccagccttgctctccatttgatttgtgccccactaggatttggtaaagtttggctttacaagtttcagtctgtgtgaactgtgctaaggagaaatgaagctgtgccctgtgtccatgttaatggaaggcaggccttgcaggcaggtgacactcagggggacacatggaggccatggtcagttattctctgcagttaggagggtccctttcacattaacttgagaaattctgggtttggctaaggaatgaagaacaatgatcacgcctgccatccactgatggccctggcactcctgtgctggggacttgttcaatcctagagatgactctgcacagtaggcatcgttcctacgacacaaaagttgcacagctagtaaatggcacagccaggatttgaacttgggtttttctggcccccaaacctgcagcaatctcacgaagggcatggcatccctgtgtaggtagcatcaagacctacaaggggcatttctttcaaacagttgtgggggcaaatgagaacttttctctgctaatgaattatgtcccgagccctcaactttctctgcacccttcactgccataggcagcccttctaaatctgctcctggaaaagggcttttgtgtctatgctaggatgtgtgtttgagaaaaaagactcactgtgtcagggagcatgccatgcttacgtgtgtgttcgtgtaaattttttttttttttttttttgcgatggagtctgttacccaggctggagtacagtggcgccatctcagctcactgcaacctctgcctcccgggttcaaactattctcctgcctcagcctcttgagtaactgggattacaggcatgcaccaccacacccagccgatttttgtatttttagtagagatggggtttcaccatgttggccatgctggtctcgaactcctggcctcaagtgatcctctcacctcagcctcccaaagtgtcaggattacaggcgtgagccaccgcacctggcccatgcaaatatttttacataactttaaaaatcttcaaacaactattagaccctgagtatatcttttaccatctcaatggcattataacttattctagaagkgagggctccagtatgataaattagctttttgtggggcttaaaaatgttttgcaccccaatagttgtgctatctctgatttgaagccattggaacctgtcctgtataaatgccaattctatgcactggaagtctctccttaaagcttagaccccactttctacccagtggccccagcatgtgatgggtttgatgagccctcaagccctggagaagtttatttgatgaaaggcaccccaggcccactctgagcaggctcaaaaccacggagagaggaaaactgagatagtgtatctgattgtacttatggagctcatacagaggrgtgactgtgaccaccatgccaacatacactgcactgctccagatacagaccccgttttaaatgctttatgagcattatctcattccaccttcccaacaatcctctgagaaaggcgtttttcaaacgagaaacccatctctgaaacatcctgaacaattacatccctgtaattgttctttgtctgcaccaagtcctgggccagctgcacccagagtctctggagaagaaccctgttttctacagcataggtgtcttgactaagcccttgctccatctccttagtaagtgattttccagcaccctcaggatacaaagccaatgagggttcgagctacctaagaacagtgagccttatgcccaatttgagaaggaagaggttttattctctcatgggtagggtcctggggtagtggagcagcttttgctgtgtctgatccccattttggatgtgagtctccagcaggagagcttcttgcctcttggggtttaatggcacactggaaggaaaccctggtggctttggacactgaggagtttcctcactcaagctggtctgctggacttccaccaggtcacctgagggacggtgttgactgcacagtgcaggagaagaatggacattgcccagcatgagcatctaagtgccttagcaggttgtcattgytatggacgtgattcaaggcttctcttgagtgacagaaggagctgatgagctggtgttggcttaggagatttgtgagcactcagggtagaaaggcctctgccacggggctccaaaactttccacagaagcagggtcttggctaggctgtgcctctgggttattaggtcagctcatcccacttaggttcctgtgccaccamtgtctccctgagtttcactgatccctgggcttttctgttgctctgggaatgggccatgatgctgcttctcctggtttttcctgtctgtgactgatgtgggcacaggatgcccagaggcgtgaactccacaacattcctgggtctcacaagcatccaactgcctgctttgtcctgagtccttcactgtgtccctgttctataaaggttttgttttctaagggaggcagccacagcctggaagcccttctccggatttcactgcctgggaggtgctgactgaagggagtcatgcagatcctaaggaacctcagtggaggccccgtggagcccctgcaaagcccccaaagacccatgccctggaccagagccattgtggggtgttctccccgctggctgcatgttggaatcacccaggcagtgttcctaactattggtgcccagaggtcccacctccggattctgatttagayagggrgrcctgggtttgtagggggtggggttaaaagctccccagttgattccgaggtgcaggcaagactcagagccattcatggagcagctccattgataaaaaagaactcaaygcaggcactgrtggtgctcagagaaatctgctttgcttttttttttttcatcttttttttttttttacttgacataacttgtatgtttttcttgggtgaaacatgatgttttgatatacatatacattgtagagtggttaaatttagctaattaacaaatgcattacttcatataagttatcgctcttgtggtaagagcacataatgtccattttctacatttttcaagaagagaatatattgtcattaactataatcaccttgctatacaacagatctcttgaaatttattcctcctaactagctgtaattatgtatcctttgaccaacatctccccatctccccactcctttctaaccagcctagcttctacttctttgagttcaggtttttttagattccacatgaatcttgatgagtgagatcatgcggtatttatctttctgtgcctggcttatttcacttacagaatgtcctccaagttcatcctgttatcacaaatggcagayttcattcttttttatggataagtggtattccatgtgtatatatacaactcatttttttaaatccatttgtcctttgatggacatttaggttgataccatattttggttattgtgcatagtgctgyaataaacatgggagtgcagatatctcttcaacatactgatttcaattcctttgaatatatacccagtagtggggttgctggatcatattgtagttctgtttttaattttttgaggaacctctatactgttttccataatggctgtactaatttgcattcccagcaacaatatataaatgttcccttttctccacagctttgatggcaagtgttatcttttgtctttttgataatagccataataatgaggtgatatctccttgtggttttttatttgcattttcctgatgattagtgatgttgagcttttcttcatacacctgttggccatttgtctgtcttcttttgcaaaatgtctactcaagtcttttgccaatttttcactgggttattattattattattattattattattattttgctattgagttgtttggtttccttatatattttggatattaactgcttgtcagatgtatagtttgcaaatattttctcccactatttaggttgtcttttttgctctgttggttgtttcctttgttgtgcagaagctttttagtaaatttttagaaatttgatgtaatttcatttggctctttttgcttttgttatccatgcttttaacgttttataaaaaaattattgcccagaccagtgtcgtggagttttccccctatgtcttcttctagtagtttaatagttttgggtcttggatttaagtctttaatctattttgagttgaacatggtgagatataagggggtaatttcatttttctgtttgtggatatccagtttttctaacaccattctattgaagcaattgtcctttttccactgtgctatcttcgcactgctgttgaaaatcaggtggctatgaaggtgtagatttatttctggrctctctatyctgttccattggtttatgcrtctgtttttatgccagtaccacgctgttttagttactattgctttgtattatactttgaggtcaggaagtttgatgcctctagctttgttctttttgcttatttcagctttttgggtttttttttgtgtgtgtttccatacaaattccaggaatacttttgttatttctgygaagaatgtcattggtgttgtgatatgccttacttttaaaagttaaacagcaaattctcattaagttcaatttttttttcattttaaaaatacttggttctaaggagctgaaatttccactcrttactcttgttgatggagcagcctggtcaggatcaagtatcaccagcacctagtgaggygctgtcatgggctgaactgtgtcccccaaaatkcatatgttgaagtcgtacccctagtacctcagaatgtgrctatatttggaaatagggtctataaagaagtaattaagttaagatgaggtcattagatgagtcttaatccaatatgtctggtgtctttatgagaagaggtaattggaacacaaacacacacagagggatgaccatgtgatgaggagaacacaggcagaacacagacatccrtgagcstaggagaggtctcagagggaaccaaccttgcagatgccttgggctcaggcttccagcgtccagaactgtgataaataaatrtgtgcgtttcagcctcccagttgtggtactttgctatggcagctctagmaaacaaayatgggcaccaaccaaacaaccaactatcatagtcacatggaatcaaggctcaggtgaaaggacctgacagggatctaggaggaaggggaagggggagcaggtaggtcttcacttgaatctctgcacctccctaccacactgcccagtccagtgcctgggctttgggttgtaattcaccatctcatttgctgcctttgctgcctctgagagttgagctaagcaaacacttacctaggcaggatgagcaggtgaaggatgagggtccacatgaccacccagtctggactcttgggatcttcccagttggcaggttcaggagttttcttcaatatagcttttccttcagtccaccttggtcacattgaagcctgtaaaaaactagtcctgtggctgggcgtggtggctcatgcctgtaatcctagcactttgggagactgaggcaggcggatcacgaggtcaggagttccagaccagactgctaacatgatgaaaccctgtctctactaaaaatacaaaaattagccgggcgtggtggtgcgtgcctgtaatcccagctactcaggaggctgaggcaggagaattacttgaaccygggaggatgatgtkgcagtgagccaagattgagccactgcactccggcctgggtgacagagcgagactccatttcaaaaacaaaacaaaacaaacaaacaaacaactaggcttgttggaccaagaaatctaattattggtgtttttccacttgtgggaaaaatgtgcctaatgcatttgtatgtcagtctacttatttgtttatctatctatcactagtgaaaagatcayacaaaaatattaacagtggttatctctggggtgtgaaattatgggtaatttttgtctttttgttatacttttccatttttcccagctttctccaatgggcatgtatttatttttataatcataaaaaagcaataaaaaagtctataaccaaaatatagtgttcgagaagctcaagttcttgatgaatagygtactctgaaaaaaggcatataatatatggcaaagacaaggagaaattccatyaaaatattcttcttmgttgttgctggattgttaacctctttaggctccagattagctcagaatgagaacatttagcaatctcaaggtctatgttggagccagtttcacagtgaagcaaagcccctaccccagggcacagcaaagtctttgtgctgagaggaaaacaatggcacatatgtcccagagaaagaggcagctcataattctttwccctggcagcctattaaagcttctcagacattggactaaattctgtccttcctccaagaagaagtggacttctgtgtccttgaataaaactcaaaataagttatggatataagccagcagctcttctcatggattgcagagccaagagtcactacttgtctgtcctccacattcaggtcagttttcagaaaaaggagatttctcactccaacgagaatgcaaagaawccaaggcggccattgtgtcattatttaacaagttccttcatccatttatgccccarttgaatcagatgcagattctgtgcccggcactgtgctaagtgcytcacgtgtatattttattcactcctcacaatgaccctgtgagggtcatcagattacatatgaagaagtgagaaccggctgggcgcggtggctcacgcctgtaatcccagcactttgggaggccgaggcaggcagatcacgaggtcaggagatcaagaccatcctggctaatatggtgaaaccctgtctctactaaaaacacaaaaaaattagccgagcgtggtggcgggcgcctgtagtcccagctactcgggaggctgaggcaggagaatggcgtgaacccgggggtggaggctgcagtgagccgagactgtgccactgcactccatcctgggcaacagagtgagaatccatctcaaaaagaaaaaaaaaaaaaaagaaatgagaaccaagatctcaacccaccctggcagtgctttcagagctgcacagccctaccacactatactgcccttgctgtgcagacacagatatgaaawgccctggctgtgccctggggggcatgaactagagtgagtagagtcagatgtcctcaagtaagggtcaagtaaacaagtaagggtcataaaagggccaggtgcagagagygaggtatgtacagggcatggaggagggagtggtccagtcacccagggtggggcagtggtttgggaaatgtttcccagagcaggtggcctttgtactgggtataatgaggctgacaagggtgactgattctttgtgaggggaacagatgctagtggtgaggttattacaggccaaaggagcaacctcagcagcaggttgggaagcacaaagattgacccccactctcagcaytggacatatatcatctaggcagaaagtcaacaaagagacattagatttaaactgcactatagacaaagggacctaacaatttgcagaacattctatccaacaactacagaatatacattcttctcatcagcacgtggtacattctccaggatagaccacatgttaggcttcaaaataagcctcaacaaatttcccaaaatcatatcaattatcttcttagagcacaatggaataaaattagaaatcaatacaaggagggaacattggaaactacacaaatacatggaaattagacaacatgttcctgaatgaccattgggtcaataagaaattaagatggaaataaaaacagttccgtgaaagaaatgaaaatggaaacacaacataccaaaacctgtgagaaaagtaaaagcagtgctaagagggaaatttatagcaataaattgttccatcaaaaagtagaaacattaaaattaacaatctaacaatgcaaggtgaaggggcaagtgagcaagaagtgagataagaagtagaggttgagcagccaaaacaaaagtgagattagctgggcgtggtggtgggtgcctgtaatcccagctactctggaggctgaggcaggggaattgcttgaaccagggaggtggaagttgcagtgagccaagatcgtgccactgcactccagcctgggggacagagcaagactctgtctcaaaaaaaaaaaaacaaaaaaaaagataatacaccatgattaagtgagatttatgccagggatggaaagatggttcaacatatacaaatcaataaatgggatacatcacatcaacagaatgaaggacaaaaccatatgatcatctcaataaatgcagaaacagtatttgataaaatttctgataaaaatttttgataaaaattgatacaatttacataaaaactctcaacaaactagctataaaaggaacatacttaaaataacaaagaccatatatgacaagcctatatgaatgaaacatgtcatttgcagcaacatggatggaactggaggccattatcttaagtgaaataagtcaggcacaaaaaggcaaatatcacacattctcacttatatgtgggagctaaaaaatttgatcatatggaggtagagagtggaaagatagagaacagagatggaggtagagagtggaaagataaagaacagagactgggaagtgtgagtctggggaaagggggaggatgaagatgaggcaggacagttagtcaaggaagttactatgcccttgggatttggcaaccttggtgacctcatagtcaccacaataagccccagcattcgcactgcagtcaagctcattcagcaaagctgtctccagtagggaatttcccctgtagagagcatgcacattttgattttacctgtcctcagactgaccctttgctcaatataataataaaaaacacccctggttggagatttagggtgctaatgacacatgcaatgtatgaacaagcatgtacaggtactgcacatgtgcacccatcccagaacatgcttcctagcaacacagtttcccaccccctcatgaataatcaggtaagccttcgataaagggagtctccctcaagtgggtctttgctatctcatcctcataggcagcccaccctgaatccctcttggggcatcctgtctattctgcacctaactttcagggtattcttcctcctttgcaataaattgctctacactgcatctcctttgctgtgtgtctcctgtttaaattcctttaaactaggaacacaagaactgaggtttcacagcagccatcaacaaagagaagtgggttaaagcatataaatatacagttagatagaaggaataaattcaatgtttgatagcagaggagggtgaccatacttaacaaaatgtattgtacttgggtgatggacacctggaataccctggcttgatcactatacattacacataagtaacaagttttctcatgtaccccatagatttgtacaaaaacaaaaaagcacaaaaactggaagcagtctggagtctgtcaacaggagaatggatgaataagggaactatctgattgtggcctatttgatggaatattactctgcaatcaaaaggaacagactgagactgatacacgcagcatggatgagtcttcaggacattgtgtcaagtaagagaagtcagattcaaaagatgaagtcctttcctgagcacttactacatgccagacaccataccaggtatttgcaagataacgccatctataggaagttctgaagaggcaaaaagaacagtggctggctctagggggtgagggtgagactgggacagactgggaaggggcatgagaatgttctgggggtgatggtaaggctatcttgctgggagtttgagtcacacaratgtatgcatttgtaaaaactcattagatgtgcatgtggtaggctgaataattgctctccaagagggtcacatcctgattcctggaagctgtgaatatgttgtttcacatggcaaaaaggactctgcagatgcgattaaactaagaatcttgagatgggagattatcctgcgytatccatgtggaactgatgtaatcacagtctttataagaagaaggcaggggatcagagtgagtaggagaggtaactatgaaagcaagaggttggtgatgtgaggaaggggtcatgagccaaggaatgctttygaaggtgaaaaaggcaaggaaacagattgtcccttcagagataccagaagaagccagccctgattacaccttgactttggcccagccagactgattttggacttccaagagaataaatgtatgtcatttaaagacactaagtatgtggtgatttgttaccatagcaaggatactaatacactgcctctaatatttgtgcatttcgttgtatgttaattttacatacaatgggaaaaaatttcattgtatgttaattttacatacgaaagaaaaaaagaactggaaacaaatttggaactctagttaataatatgcatgctgaagcatttaggggtaagtatgcagatatctactacttactttgaaatgcacaaaaatgggatggataaatgaattgatacatgataaagcaaatacaggaaaatattaattttagtgtctagatagagaagtattcacttgtaaatttttaaaattttatttttgaaaattttcatagtaaaatgttgaagggaaaaaggcagaggcttgatcctcgatggtgtttaggaattgtgagtagttctgcaaagttaggttgtctgtactggggtaagrgtagttggctcagccagtcagaatgctggaggagtagggaaggagatgtggagggaatatagactttatcctgaaggcaacgaggagccagtgcaatgctttaaacagggaggtacagaacaggatttgcgttttcaactctcactgcacaagtcatacctccgactgaattctttgaacagctgcttacttgatttgaatgcaggtcattcgaagagaagttagggctttagtcctttacaattcagctttagtcaaaggggttcctctctctgtgtttgcctcatcattggtagtaggggacaaacctggaggttctctcatcaacaggtacagatttgaaagctgaaagtttgtaggaaaagggcagttaattctggtctcatctttaaggcttacctgttcttgggggtaaactacatgaaggacaaaaatataaaatctttttatagaacaagtaactgaggtgaaccgggagtcagaaagtctggattcaaatctcagttatgacattttctagctgtgtggccttggacaaattctgaacttctctgagccttagtttcctagttcaaaaatggggaaaacactagtcagggcctcatagggttgctgtgaggattctaataaatgaagtcaaagtattcaccatgaagtacctcgtatattgcctgccatgtagtcagtactcaagaaatgttcagcattttcattattgttcaatgacctacttctcaaccgaaagcacggaagcagaagcttagcatactccttgcttataccattcctcccctatcatgaaaatgatgatcaactgcatgcctttagtctagacaattctgagcttcagacccatatccccattttcctcatgggcatttttccttgcctagaccacaggtacctcaaactcaacaaattccaggaagaacatattgcccctcccttatcatgggaatgccaccataaacccacgaatgctccagccaggcatgtgagagtcctgccagactcgtatttcttcccctcccagtcacacccaatgccccagcaagttctatttcctgagaattccttcacctatctcctgcattccatttcctcctgtattattttggattgtgcttttgctatgtyttacctaaattcctgcagtagactcctactggctttcctgctcccaaacttgtctcctccaaatatagcctgtctgcctctgctagaatgacctttccacagtgggaatctggccatttgccaccctgccaaagtcctccagaggccgcctactgggacatgttggcttctgtgtacctctagggtctgacctctcatccgtctcagcaatgccagcctacctaggctcctatctcggcacacaccccttgcctggaacactctgccccttccgacctttgcctggctgctgctgactctctgatgcctcccttgatcatcttcctctctccgccatgcccctacctggagctgacctccatcatagccctggcctcccaagatatccacagactgtaacctgtgcctcttatctctgcatggccagtgcttagcacactagctggcaattgtaggtactctctggtgaatgcagttgattccaggatcaaaggagagtaaagttgaagaaaaagaaaagtcagttagggttctgctaggaaatggcattctcagaaggaggaatatcgagtttaaaaaagggactatttacaaagatgaggcaggggcaaggacatcaccagaggaggtgaagcaccttgaagctaagcgtagttggaggccattttcacccctaggtaggtgagaagaggcaaggagagggcatggctaatagatcgggggagacttgcaggacacagtcacctgaccaaatcggtggcttttggcagaacagtgctaagccaggctgtgatctggcacagaggaagccaggggaacagatacttcgatctcattcctttcttttgtttttgtcttcagggctggctacatactctgttgggaagaaggctcaaaaatgaatcctctcaagcagacccgctttggtttccacccctctattctgagaacccaagctcaacccatgtgttctgccttyaggtagaaaatgtcagaatcatagggaagactaagctgaaaaaagaatttggagttccaaaggaattctgtgccacctgccgtccggcaattccctttgccaggtaatggcatgacagtaaagacgcactctgttctgaataagcagagaaccggcttggcctaggacttacgttgaggtgggtaatgttcgaaaagacccatttgctagggcatctcagggaaggcacagaagcctttgcaggcgaggctgcagagagaagaaaacgcacgggagacagtcctgattccaaggggttacaattggttggggaggcaaggcagccacaaagaaagcacagcatgtttgggccaggtgggtgcttccttaggacagcactgcctgtttgggaaacagttgtagaaacagatgggacaatccttgtccatcgagatggggtcagagtgactgcacgaaaatatggctaccccgagttaccatggctaccaacacttgccctccttccatgccyaccaggcagggtggaggagcttgttctttctgcagcctgacccaggagaggaggtaaagcagagggctcccagaggccgcccttgtaggtcctagcgcagcagggtgacgctgggccaggagggccccgggagtggggtgggggagggccactgggtggaggtgcccttcagggctgcatctcstggcgccggctccagttycacttcggctcctgaccctcaattcccgtctgcggcccggggacctcggccttctccccagccaccttgctggctggccctgtcttcccaaggtcaagttaaagaaccaaggtgtgtaaggtcatgtcttcccagtcagggggccgccatatcttggtatccaatggacaacctgcctgccgctcactctctaamagccaatgatgagggagctatgtgctaagccccgcctccccaccccatgaatgygcacagcaccacctcgtgtcccagtagcgcagctttggggagtttggaaacactcctggtttgggattcactcagcaaatatttaatgtgtgtgtgctgtggccaggtaaaatgccaggtactatcttcctctacatggcagggacagacatgtgttcctcaagctcactggggatagcaccacctttctaaagttcctctcatctgttgcccggcctccaaacccggtggtcctttattaattcagctgtggcatgggcgttcatactctcagcttcctttactgcrtttcctactgtttctggcttcaagttgttgaagtcaaaataaaaaagtagagactgagctctaaatttaaccgtttatttgggaagaaaggattgccacttgggacacacatgcacaccgtaagaacaaagagaaggctggaggttttaccgaatgttacccattgctctttgagaaagttcrttggcactaataaggttctagggagctggcaagttycaactggtgggcaatggcattgggcaaaattagtcctagagttgcagcaagttatctcagcagggtagataaaactggtctcaggttacaacagttggtttcagcagttagacatgcggagaattacattcttggagcaatgctatctttcctgagtgcttttccccctggctttttgactttgttttagttgggtatgacaaaaatgacccaattcatttgatcaactttcgcaaacatttctgcaactagcggcatccctgatgttggttttattttgttcttcttgaaagtgttaccagatggtgctgtgcagctccaggctcttagtgtcctgaccgaagaattggacgagatacacacagatagcaaagcagcaaaagtgtatgacgcatagtattacactcccagagaggggagagtggactgacctctgcgaaatgagatcaacgtcaatttggtgtactttgaattcttttatatattttttctcttctgtggccaagactgcctgatgtctagccagtgtctgccttttgatggacaggtgggctgcttagttatttaatactatggcccgtgtgcgcttgtgacttcttgcgagtcacctccatcccataattttaagtacgtgcataatatgcagtccatatgcatgaaccttaagtagctaattaccatacgggaacattttaaggatatgttttctgtctaacgtgcatgctcatctctgaggagctgcccctgacaggtttggtccagatctaggcggccatgtgggctccttactcacttttttaaaatctcacttttgttttggctgctcagcctctgcttcatatctcacttcttgctcactcgccccttcaccttgcttctgctctcatgctctcactcattcttcctgtatccagtctctggttccctctctaccatctcctgcctcaaaagtgctgctcagcatataatttctctttgtaagttgtggttcttgattttgggaaatgagtttccatcttgctgaacttcttaactagagaatactgttgggatgtgtctacatctatgtgacactactgggatcccttgaatcctatttagagtctaaaagagggacattgttacttaaaggcggtggccatttagctgtccctcttagatttggttcatataatttctgattttcatgtcagattataatctgtaaactcctactcaggtcactgcaccactttgatggaatttccattccctttgtcctcaagatttgtctaaagatatttggctttgacagaattttgggttcttcagttttctttttaattataaaatatacatacaaatgaacattaagcatatgtagttgtgtgagtaattataaaacaaacttaatgtatcaccaaatcaaagaatagctcattgccccagaagcaaccccagtcccctaataacaacccctccctttctccctctctccagaaatgagccatataataactcttgtgcaaattacttttttgcttttctctagatttttttccttttttgtaggcattcctgaaggatataagttggtttcgtctgttttgaactttctataaacagggtcttaccaaagataatttttttgtcttatttatttttcttaattttatgtagttgtaggttgttcattagtgtgtaattttctactctaggaatttgcaacaatgggtgtattcattctaatgatgatggatattagtcttgtttctagtttggggatattatgaacaatgtatttataatcctttctgcacacatgaccttggtaattcgtgtatctgggtgtataccttgaaatgcaatggtggagtcataagtcatatatttcaactttgctagttcatgcctgtttttcaaagtggttgtaccagtttacatttctgccagcagtgtacaagagttcccattgctccacatcctaaccaacacttggtattgccagactttaatttttgtggaatattgtggatttagttcatgttatcttattgaggttttaatttgactacctggtttattgatgaggttgaacacatttccactatttattggccatttgggcttcctcttatgtacagtgtcagatctttggcaattttttctgttgggttgtccgccttaatgatttttaagaattcttcatgtgaaattgctgrcacttgaccatttttgacttacaaaaaatggcagtttcatatgattcaatttaacaccttctggaattggtcctttgttatttatgtgttgactaatattttatcagattatgtggcttatcttttcatttccttccttcgttttttgagaatcagaaagttttaacattagtggatttggacttatcagtccttttctttatggctggtgctttttatgtcttgtttgagaaatccttgtctttgaggctaaaggtgaccagattgtgctgggggactggggctgcattctcagggcattctactttgggccctgggtcacattgcctctgctggggaggaggcaggtttctctgtgcccctagccttgactgggtgggggagggaggagaggccactcctgggctctttgtagggtagcactcatgttttcaagaagatcctttcctgtagattgtttccacactgttctttcaagtgcagagggtcttcctaatgaatyggcagccctgcatctcactgggccagggttggggcaggagtaggccagcatcacggtggatgttcagctagggtgggctgtgacgggggttggctccagctcagaactggaaatcctgtttgctgaattgtgtgtcctagccgatgaggtgggacaaggagaaactggctgaagacagtgaaacagtaggaaaaaccctgcctgccctgtaactctggggcctgggggatgtaatggtgtgattctgactagttggctggagcagagcaggtagcctggggcgcgccagacgaagactggaaaatgtcatggctttttggccctcactcctcaacgtcactgtgggttgggggaggcaggggactgtccaacctgttcacagttccctttccagtgctgacagtgcctgccacatgagagatattaatacacatttgttcaattaatgaattaatatttttcacataatttcatgaaagagttaatgttttcttttctatttctttccctggggaaaactttttgtagcccctaggcggcagaattaatcacatctagctggcttgtgatacggaaccaggcttttgaatttaaaattaatcttgttctaattctgtttttgaacttgttaatcattaaggtcctaagaaacattggcagagtaaaactgaaataaagacctggtaaattactttctcaggctaaagaaggtatgaatttttcttctaagtgcttctaaatcagtcctttaatggttaggttggatgtaaattcttaccattcttcastcagataaatgaatgtcaacccagtttttccttctgctggaaaatggtcttttactctcagaatctggcaacctcctttgtgtctcgtgtctggagggtcagagtctgggaaagcagctcccctccaccccacttctcaggccttctcccagcttcccagcttctctccctgcagccaccctgccccctcccaaactgcctcggaaagtcccatgtctcgggttttctcttctgtaggaaatcagatgtcgtgccaccgcaacctttcattcaaaataaaaattcaaaagcaatttgtgtatttgaaaacacatctaaaccacaggcttgaagttcctgttttgatggggaaaatgaatattcccatctggagataactttgggacgttgagatagagacaggcaaattcatctcaaactcattattattttagattcttatcattatcaattattattatagcaaaactcatcattttttctgtgtacaatttgtgaattttaacatatgtacagattcatgtaaccaacaccatgatcaggataaagaacagtattgtcaccccacaaatcttccttgggsggtccctttttcagtcacatgctcttcccagccctaaccacagggaaccattgagttgttttccatcactataatttttccattttgagagtatcatatcagtggaatcatgcagtacgtaacctttggggactggcctctttacctcagcataatgatgttaagattataatctgtaaactcctactcaggtcaytgcaccactttgatggaatttccattccctttgtcctcaagatttgtctaaagatatttgactttgacagaattttgggttcttcagttttctttttaattataaaatatacatacaaatgaacattaagcatatatagttgtgtgaataattataaaacaaacttaatgtatcaccaaatcaaggaatagctcattgccccagaaacacccccaacccccacatcattcatgtgattgtgtgtatcaatagtttattccttttattgctagtagtattccagtgtatggatgttcctacagtttatccattcacccatgcaaggacatttgtgttgcttccagttttttggtaattataaatggagctgctataaacattcacatacagatttttgtgtaaacatgagctttaattttttrgggtaaatatcatggagtgtgatcactgagtcataagatgtagggttaaatttggaagaagctgccaaagcattttctagagtgactgtaccattttgcattctggccaacatctggtattgtctgtgttttctatttgacctgctctaatttgtgtgtagtggcatctgatcatggttttaatttgtatttacttaatgcctagtggtgttgatcattttttcatgtagttatttgtcatccgagtatcttcttcggggaagtgtctaagtcttgctcatttctaaaacttgggtttcttgctttctgttgagttttgagagttctttatatattctggttaagttcttaaccagatatatggtttgcaaattttttttccttgcatatagtttgtcttttaataaagtattttgtagaccaacaattattaattttgatgaagtcaaatttatcactttttttgttttgtgaactgtattttagtgtcatgtctgagaactttttgcctaacctcaggtcaggaagatatttttcctgtgttttcttctacaagttttatggattcattttctacatttaggtctattatgccttctatgttaatttttctgtaagctgtgagattgacgtcaaggttaattttttgcatatagatgtccagttgttccaacaccattagtgttgttgtctttccttatcaactccaggacacacaatttgggaaacrggttttccagctctgagctggagtcaacccctgttcacattagttgaaaagactatcctttctccattgaattgctttggtacctttatcaaaaatcacttggccatgtttgtgtgactatttcaagactttctttctaccctgttctactgatggatgtgtgtctctctccaccagtaccacaatgtgttgattgctgtagctttatagcaactcctaaaacatccaattttattctttgtcttcaagattgtttcagctgttgtggtttatttgctttttcatattcatttcaaaatcagctcccccctctctctctttctatctctttctctatatgtttatatgtatatttatatatacataaaatttctgctgggattttggtttgaattgtgctaaatttatagaaaactttggggagaattgacatctttactatgtttagtctcccaacccatgaacacagtatgtatctcatttagtaaggtcttatttgatacctgtccttaacattttgtcgttttcatcatacagatccagtaatattttgttagacttacatctaagtatttaattttttggagcagtggtaaatatattttaatgttgctcaccaattgtacattgtgaatatatttaagtacagttgttttttgtgtgttgacttgtatcctgtgactttgataaagtcacttattagccacagggctttgtgtgtgtgtgtgtgtgtgtgtgtgtgtgcaaattccttgggattttttgtataggcaattattgtcacctaaaatagggacagtttttcttttccctgtttaatctatatgcctttttcatttcttgccttactgtactggctaggacttccagtataatattgattggaagtggtgggaggactcatttttttctttttctctatcttagggacaaagcattctgtttttcaccattaagtataatgtcgactgcaggattttggtagatgctgtttatcaacttgaggaagtttctgtctatgtctagtttactgagacttttttaaaaaagtcatattttgatgctgaattttgtcaaatgatttttctgcatcaattgatacgatcatgtggtcttttttctttatacttttcatgggggatggyctgtagtttttcttatttttactgtctgattttggtctcagggtgatgttgagcccataaaataagtttggaagttctcctcttctattttctggaagagattatgtagaattagtgttatttcttctttaactatttggtaaaattatccagtaaaaccatccaggccaggagatttctttttcagaagatttttcgctataaattcaatttctttaatagatgtagcaccattcatgtcagctaattcatattggataagttggtatttcatgggttttgaggaatgagtttatttcatctaagtggttgaccttccacatatagagttgttcataatattcccatattattcttttagtgtatgtggggcttgtagtgatatccccccatttcattctggatattggtaatttgtgtagtttttcttattttctttttttctctttttggacagagtctcactctgttgccaggctggagtgcagtggtgcgattgtgggacttattgcagcctcaacctcctgggctcaggtgatcctcccacctcagcctccagagtaattgggactataggtgtgcaccaccatgtctagctaatttttgtattttttgtagaggtggggttttgccacgttacccaggctggtctcaaactcctgggctcaagcgatccacccaccttggtgtctcaaagtcctcggattacaggcaagagccaccatgcctggccagtttctcttattattataattttttgacactcttactagaggtgtatcaatcttttcaacaaacctgcatttagtttcattgatttccctaatttttctgtttaatcaatttatcttctttataattttctttcttctattttgctttgagtcaattttgagtttattttgctctttttttagtttcttaagctaagaactttcttattcttytctcatacaagtacttaatgctatgaatttacctctaagcacttctttagctgtattctacaaattttgttaggaaaaaatttcatttttgttctgttcaacatattttctaattcccttgagatttctttgatccatgagtgatttagaaatatgttgtttagttttcaagtgtttggagattttcccattacttttcatttgttgatttatagtgcattatggttaagggatacaccgaagatatggtctatcttggtgaatgttccatgagcacttgaaaagaatgtgtattctgatattgttgtggattgtattataaaggtaatgagatccagttgttgatgatgtggttcggctcttctatatccttgctaatttctgtccactcattctatctattactgagcgaggaatgttgtgtctccagctataactgtggatttgacaacttctcctttcagttctatccacagttgttccatgtacttggaagctctgttgctaagtgcatgcacatttaggatgattctttctgaggtgaaaatttattaattagagttatgtctggcagcgagtgccagaatatgtaaacgaacccaagcttttttcacacatcaacatctaggcaggcagcccaggattagtatgttgtgcataggtcacactctgtcctgttgctcttcaatgaatggatactattcctaaatcacatcatggcccaagatagcttgctctagatccacgtttttttttttgttttgttttgttttgttttkttttttagacggagtttcgctcttgttgcctaggctggagtgcaatggtgtgatctcggctcactgcaacctccgcctcctgggttcaagcgattctcctcctcagcctcccgagtagctgggattataggcatgagccaccacgcctggctaattttgtatttttttttttctttttttttgagatggagtctcgctctgtcaccaaggcgggagagcaatggtgcgatcttggctcactgcaagctccacctcccgggttcacgccattctcttgcctcagcctccggagtagctgggactacaggcgcccgccaccacgcccggataatttttttgtaatttttagtagagacggggtttcaccgtgttagccaggatggtctcgatctmctgacctcgtgatccaccttcctcagcctcscaaagtgctgtgattacaagtgtgagccaccgtgccggtccggtccgtgttttaagtgaaactcttcattcaaaacagtttttttccatcagcttggctggtagctactgtccacagcagctaacagaggtctggacaaaagagcagcaggacatccacctgcatgggtccctttggggaagccttgccataggggtcagatttcargcatggcttcaatgamacaaccacaatgtgacaatttaagagattttagtacttgcagaccctgggggctayatggcatgcctggaggtcaggcagcacaggcagagacagagagaaaaggatccctttattgggtccagggcattatttaaataggtttcccacagggagttttagttggtggatttagagcaagcaggcctgagttccaggagcatgcagaggtggtcactgcagmatgtctgcacrgtcgatacagggtgtgggcgtcagcagggccagtggaacagggtgtatccagttgacccatagtgagctggtcaccaggaggcagttgtataaggcagctatctggattggccacacaggagaactgggatcaagtatagaactggaaactgtatcgagggtaactgagctctgttgctggtatgggaaagtccagttaatattgaaaattaatgctgagacaaataaaattataagcattcattatactgctgctatcacacctgcactccaagcgtcaaaagagatcatgggggcaaagggcatctctctcttaaaggatgttcccaggacacacacacactatttcctcttaaatcttattgcttagaattaagtcgccaaaggaggctgggaaatctagtctccattccaagaagctatatgcccagttttttttccgagggacctattacaagaaataaaggaagaaagaatgaaaattggggaacaacaccagtctctgccaaaggccacttcatgcaccttctgtggtgtctgcatagtcagtcccactgatgatgtatatagctctggttttccgcatgcccattctagaagtttgaccaaaggagattatattcccatttggggactctgttatacttcctttgaagtagggaggagagaggatttggggattgttgagtactttctgttctccccaattttttttgttagtaatccacatttatttgagtaattcatactgtagggtgtccagtttttagacacttctatatttatatgtatcatttgatcctcacattagccttgggttttagatacaattatccacattttacaaatacaaagactgttgctcaggaggttttgtaggtaggtcaaggagctaggaagtggcagtgctgagatttgtrctcatgtctctgactgcaagctcagagctsttacagagcaccatgccagctttattccccctgtcgtccttgggacagctttgccaaytggggccatagtctggtttaactccctgctttgtctaactatttatttggatttcgggggacgtggaaattttctttgacattcttgattttttttgtggtgtttggtgaatttttttttattactatactttaagttctagggtacatgtgcacaatgtgcaggtttgttgcataggtatacatgtgccatgttggtttgctgtgcccattaactcgtcatttacattaggtatttctcctaatgctatccctcccccagccccacacctcatgataggccctggtgtgtgatgttccctgcactgtgtccaaatgttctcattgttaaattcccacctatgagtgagaacatgcggtgtttggttttctgtccttgtgatagttttctcagaatgatggtttccagcttcatccatgtccctgcaaaggacatgaactcatctgtttttatggctgcatagtattccatggtgtatatgtgccacattttcttaacccagtctatcattgatggacatttgggttggttccaagtgtttgctattgtgaatagtgccgcagtaaacatacgtgtgcatatgtctttatagtagcatgatttataatcctttgggtatatacccagtaatgggatcgctgggtcaaatggtatttctagttctagatccttgaggaatcaccacactgtcttccacaatggttgaactagtttacactcccaccaacagtgtaaaagtgtttctrtttctccacaccctctccagcatctgttgtttcctgactttttaatgacgaccattctatctggtgtgagatggtatctcactgtggttttgatttgcatttctctgatgaccagtgatgatgagcattttttcatgtgtctgttggctgcataaatgtcttcttttgagaagtgtctgttcatatcctttgcccactttttgatggggttgtttttttcatgtaaatttgtttaagttctttaaagattctggatattagccttttgtgagatgggtagattgcaaaatttttctcccattctgtaggttgcctgttcactctgatggtagtttcttttgctgtgcagaagctcttttgtttaattagatcccatttgtcaattttggcttttgttgccattgcttttggtgctttagtcttgaagtccttgcccatgcctrtgtcctgaatggtattgcctaggttttcttctagggcttttatggttttaggtctatcatttaagtctttaatccatcttgaattaatttttgtataaggcgtaaggaagggatccagtttcagctttctacatatggctagccagttttcccagcaccatttattaaatagggaatcctttccccatttcttgtttttgtcaggtttgtcaaggatcagatggttgtagatgtgtggtgtcatttctgaggcctctgttctgttcccttggtctatatctctgttttggtaccagtaccatgctgttttggttgctgtagtcttgtagtatagtttgaagtgaggtagcgtgatgcctccagctttgttctttttgcttaggattgtcttggttatgtgggctcttttttggttccatatgaactttaaagtagttttttccaattctgtgaagaaaatcattggcagcttgatgggaatggcattgaatctgtaaattatcttgggcagtatggccattttcacgatattgattcttcccatccatgagcagggaatgttcttccatttgtttgtgacctcctttattttgttgagcagtggtttgtagttctccttgaagaggtccttcacatcccttgtaagttgcattcctaggtattttattctctttgtagcaattgtgaatgggagttcactcgtgatttggctctctgtttttctgttatttgtgtataggaatgcttgtgatttttgcacactgattttgtatcctgagactttgctgaagttgcttatcagcttaaggagattttgggctgagacgttggggttttctaaatatacaatcatgtcatctgcaaacagggataatttgacttcctcttttcctaattgaataccctttatttctttctcttgcctgattgccctggccagaatttccaacactatgttgaataggagtggtgagagagggcatccctatcttgtgctagttttcarggcaatgyttccagtttttgcccattcagtatgatattggctgtgggtttgtcataaatagctcttattattttgagatacgttccatcaatacgtagtttattaagagtctttagcatgaagggccgttgaattttgttgaaggccttttctgcatctattgagataattgtggttttttaccttggttctgtttatgtgatgkattatgtttattgatttgcatatgttgaaccagccttgcatcccagggatgaagctgacttgattgtggtggataagctttgtgatgtgctgctggattcagtttgccagtattttattgaggatttttgcatcaatgtttatcaaggatattggtctaaaattctctttktttgttgtgtctctgtcaggctttggtatcagagtgatgctggcctcgtaacatgagttagggaggattccctctttttctattgattggaatagtttcagaagaaatggtaccagctcctctttgtacctctggtagaattcggctgtgaatctgtctggttgtggactgtttttggtgggtaggctattgattattgcctcaatttcagagcctgttattggtctattcagagattcaacttcttcctggtttaatcttgggacagcgtatgtgtccaggaatttatcygtttcttctagattttctagtttatttgcatagaggtatttatagtattctctgatggtagtttgtatttctgtgggatcagtggtgatatcccctttatcattttttattgcgtctatttgattcttctctcttttcttctttattagtcttactagcggtctatcaattttgttgatcttttcaaaaaaccagcttctggattcattgattttttgaagggtattttttgtgtctatatctccttctgttctgctctgatcttagttatttcttgccttctgccagcttttgaattcgtttgctcttgcttctctggttcttttaattgtgatgttagggtgtcaattttagatctttcttgctttctcttgtgggcatttagtgttataaatttacctctacacactgctttaaatgtgtcccagagatgctggtacattgtgtctttgttctcattggtttcaaagaacatctttatttctgccttcattttgttatttacccagtagtcattcaggagcaggttgttcagtttccatgtagttgtgtggttttgagggagtttcttaatcctgagttctaatttgattgcactgtggtctgagagacagtttgctgtgatttctgttcttttacatttggtgaggagtgctttacttccaactatgtggtcaatttcggaataagtgcgatgtggtgctgagaagaatgtatattctgttgatttggggtggagggttctgtagatgtctattaggtctgcttggtgcagagctgagttcaagtcctggatatccttgttaaccttctgtcttgttgatctgtctaatattgacagtagggtgttaaagtctcccattattattgtgtaggcgtctaagtctctttgtaggtctctaaggacttgctttatgaatctgggtgctcctgtatcgggtgcatatatatttaggatagttagctcttcttgttgagttgctccctttaccgttatgtaatggccttctttgtctcttttgatctttgttggtttaaagtctgttttgtcagagattaggattgcaacctctgcttttttttttttttctttccctttgcttggtagatcttccttcatctctttattttgagcctatgtgtgtctctgtatgtgagatgggtctcctgaatatagcacactgatgggtcttgactctttatccaatttgccagtctgtgtcttttaattggggcattaagctcatttacatttaaggttaatattgttatgtatgaatttgatcctgacattatgatgttatctggttattttgccagttagttgatgcagtttcttcatagcatcaatggtctttacaatttggcatgtttttgcagtggctggtactggttgttcctttccgtgtttcgtgctttcttcaggagctcttgtaaggcaggcctggtggtgacaaaatctctcagcatttgcttttctgtaaaggattttatttctccttgactgataaagcttagtttggcaagatatgaaattctgggttgaaaattcttttctttaagaatgttgaatatagtcccccactctcttctggcctgtagagtttctgccgagagatccactgttagtctgatgggcttccctttgtgggtaacctgacctttctctttggctgccctcaacattttttccttcatttcaaccttggtgaatctgacaattatgtttcttggggttgctcttcccaaggattatctttgtggtgttctctgtatttcctgaatttgaatgttggcctgctttgctaggttggggaagttctcctagatgatatcctgaagagtgttttccartgtggttccattctccctgtcactttcaggtacgccaatcaaatgtagatttggtcttttcacatagtcccatatttcttggaggctttgtttgtttccttttactcttttccctctaaacttttcttctcactttatttcattaatttgatcttcaatcactgataccctttcttccacttgatcaaatcggctactgaagcttgtgcatgcttcacgtagttctcgtgccatggttttcagctccattatgtcatttaagctcttctctacactgtttattctagttagccatttgtctaatcttttttcaaggtttttagcttccttgcgatgaattcgaacatcctcctttagctcagagaagtttgttattactgaccttctgaagcctatctgtcatctcatcaaagtcattctctatccagctttgttccattgctggcaaggagctgcgatcctttggaggagaagaggcgctctgttatttagaattttcagcttttcaggtttctctccatttttgtggttttatctacctttggtctttgatgttggtgacctacagatggggttctggtgtggatgtcctttttcttgatgttgatgctattcctttctgtttgttagttttccttctaacagtcaggtccctcagctgcaggtctgttggagtttgctggaggtccactccagaccttgtttgcctaggtatcaccagcrgaggctgcagaacaggaaatattgcagaacagcaaatattgctgcctgatccttcctccggtagctttgtcccagaggggcacctgcctgtacgaggtgtcagtcggcccctactgggaggtgtctcccagttaagccacacagggctcagggacccacttgaggaagcagtctgtcagttctcagagctcaaacgctgtgctgggagaaccactgctctcttcacagctgtcagacagggaggtttaagtctacagaagtttctgctgccttttgttcagctatgccctgcccccagaggtggagtcaacagagaaagcaggccttgctgagctgcggtggactctgcccagttcaagcttccccagctgctttgtttacctactcaagcctcagcaatggcggacgtccctccccctgccaggctgctgcctcgcaggttgatctcagactgctgtgctagcagtgagcaaggctctgtgggcgtgggaccctccaagccagtcatgggatataatctcctgctgtgctgtttgctaagactgttggaaaagcacagtatttaggcgggaatgtcccatttttccaggtatagtctgtcatggcttcccttggctaggaaaggaaaatcccccraccccttgcgcttccctggtgaggcaatgccctgccctgcttcggctcaccctctgtgggctgcacccactgtccaaccagtcccaatgacatgaggcaggtacctcagttggaaatgcagaaatcacccatcttctgcaatgatcacattgggaactgcagaccggasctgttcctatttggctatcttggaacacaccaacattcttgattttttgatcttttgtatgaagttgagaattggccaatcacatactaagaaaactctggtgagattttgatttggattgcactgaatttatgcatcaatttggagggagatgccatctttacaaaatggagtcctctcacctgtggacatagtatatgtcttttttatttaatttaggtattcattaatgtttttcaataaagttttatgattttctttaccagtcttgagtgtctagatttatttctaagtatcttatagttttgttgctactgtaaattaaaaawwtttttttttccttaaaaaaagccagcaaggcatttatttttgtcatatagagctgttcaaaggtaagtatccaggattcgttgggcatattcaattaatgttgttgagggtccagcctccttagtcttttgtatcatttccaacctctgactattacccgcttagccacaagatggctcctccagtgccaggtatggggtcctgattcctgggagaaggggaggaagcagggagcagaaagtagggaaaccaaccaattctttctgttcccagtgaattctcttgacttctcattggctgagagtgtgggtcactgcaatcctcagttgcaaggaaggctggtagtagcracttaaaaacaaaacaaaactggatttctattagtaaggaagagagaatgacgattggattgaccgtgagcggcctctttgtctctggcaatgctcttgaatacagccatactaatttggttgttatatcttttttccccatccttttactatctttctgtatctttgctttagttgtgttttgtgtaactagcatatggatgagttttataaaaatacagtctgtctatctggttcaaatggactattttatccatttatatttattgcagttactcataaacttaatttataatcatcatcttttttttgctttctatttatttgtctcactttaaaaaatatagtcatgcwgatcatttaagggtttagttgaaggtaaatttctccagcagaatttgcatttgtttctgacaggtgtcaggggtcactaccatcttgagaacctttaaattattttctcagggtttgggggtttatccaaggagtgggaattccatccataagtccatgttagggccggcttgtattcacgaatcttcatctgactcctttcaccaagagtttacttgtcatctccctcaaaggagtggattttttcccaaatgtcctctgaaagtgaagatttatmctgggtccttcactgtaactctccagcttaagtggctctaggcttcatttactgtctttcacatagttattaagtgcagttttgggttgcaagaggttggcagatgcccttagggcagtgtgcaagaaagagttaacacagagggtcaccctttacaaggttttgctacccttggctgtcttctaggaattgggcttctggaatgttccttggctgataaggtggttttgtatgcctgcctactaaattccagtctatcagcttgcctagactgtacaatrtgatttcaggtggacacctgcttttcctctgggagtctggaattgcagtagctgtgcaggtggagggagtgcctatgtggccagctctcaataaaaaccctggtctttgagtcttaggtgggtttccctgggcagaaacactgctgtgttactgtgtggcctctcaccgtgggaagatataggaagcctgtgccggattcttccagagtcygcctaatgtgttctttccccaccttgtgtatccttttactataatataacttagccatgaacacaactacatgctgagccctgtgggtccttcaagtggaacactgagtatgtgggtggttgtgggactgacacaggcagatactggcttctactctctgaattcttgcccctacttctactataggctttgatggcctccatctttttcttggttcatagtcatgaatttaaaaatacatgattcatattttatcaagsagttttaggattttttatggggcaatttgtaagggtttctattttgccatgttgttggatgtcctttctatgttgttggatgtcctatcggtgttatgttgtctacttaattttttcaaacagtcacaataaaaaaaaatctaattcttaaattgccaagcattcaccttcttaaatgtgagtggtagggagtgggctcagagtctcagccccgttcatcctttattcctaggcttttgaacctatagccacaggatcagcctcaaagaggttctagctccagggccagcaactctagcctgaggcaggaggttggggagctgtgggaggtttgccattggctccttctccacttcctcctccagccaagagaaattccctggaataactaagcgagaacctgggaacaataacatgagagtttattatcacatgactactcaggaggggacatgaagcggagcaggatggggaaggggtgtaaggaatgggcaagtgctgctggagcagggctgtggccacggtcatggggscaggataactggggctgttgaagagcctcttttcctcagtctggttcttcttccagcastcagatgcagggacgcccggtgcagaagcaccaggcactaataatcaggagaggcatggctagattccactcacttccaacatttccttctggtctcttttctaatggaagaggaaaggcaagacaatcgtgagtgggagagaaagggcggagtctctcctccagggkcagcttagctctggagctaccagaatcagcagcatggtacctgatccaaaggcayagcatggatatggacttccctggattcctgggctctttgacttgggggccacttggttggggataggggctttctgggctgggccaccactgggtagaaagacaggcatgataataggtgggacttgggtcatgggcccctttctcctccccaaactrtccactgtccattcctgtctcctttgagcagttccactgccccaaatacacaggcacacaccttagggactcacccctttggttgggaacattctccagcagtacagccacagaggggycagagatgccagaagcagcagaatccagacacccaagagcatggcctgaagggttctgaamaaggcctggggacagagggccaaggccataagcaccaggatgacagctgccttcctgctctgtccccatgctccttattgacctgggaaaatctctacccctttatctccaagttcgtggcttctggaggggaagtcaatgcattcaatgtacagaatacagctggaaactgctcacattgggcctgtgtcctcatttgtacagtgacargtttgggctatgatttgattccctgataacctccaagacttcagaggatcaagggaaaacatgcatttaacacctttgcagcacttggcacacttgctatagtggttcatttattattattttaatgcttgtatttcccacttgtctgtaacaccctacaggagccatttctattttgtctgatgctttgtctttggtgacaatacscaagcttggtgcagaataggtaacacctatttctggtggagaamctgactcttgcccctggcctggcctggccatccctgccccacctgctgctgccccttccccttggccacctaccttcagcatgtccatgaaggaggtacataggtgtagccttctgacttcttctggactctgagtgggggctggagtgttccagtcactcgagctggagatgcggcaggcactgttgtaataagagtagccatatcggaaatcttcattccaaagtttgagggcagcgatggctgtggagaaagctgccagcgytagcagagtcctcagcagggcctggggagggaggaggcagagagaaatctttgtgtttcagtctctctcagagtccagtcgggggaaaaaagggcaaggcccagagaagcctgcaacagggcaggagattggggtracctccagcctgaaccyggtcccctcccatgcccttccctgaacttacccagtatgtaycaccccgtttctcrtaaatgaaggcagcagctccagccagcacagcctggggagagattgagccaggagcaggcttagyacaggaaatgcaactcctctcccacgagagagcctccatgcaggcccttccccagcacacagcttgggcgggaggtttcatgctaagctttattatccrtggtaagataattgctgagagggtggagcctggatccaactcctgaggctgcaaaaggccctgctttagtgacacctaagagcttgtggtcaagccaggtgtgagcccctcttcccttctaaaccttcctttttaaacaacaccaagtgctttatgaaagttctagggatggtgggatcctgtggataaaagtcatggggtgctggagaagatctcaatgaagggtgagtctatacagagtgggcactgttaggtctagaagcctgtcctaacagtgcccaataatccactcagctgggcttgaagaacaggaaatctagtatrtcccagtggacaggtggacctgaatcctgtttggctaattctgtaattaagctgggtattttgccacaggctgggtgaaggtaattactctcggcttctgtcagtaaatatgagtgttttagtgctattctgagagtgtaggtaccatgaccagcctacccagctcctgtgcaaactgcacacacccatctgttgacaacmattcctgggtttccattgtgtrcagggcctgtggaggacaatgrgaataaccagggggtgatgcttcctgggggaccacatactatctggaacgctctgccttccccatctcaatgcaagtatctggagatgagcaggtccttagatccttagttgacattaactgttgaaggcagggagaggyrgccagcctggtgggaacagcactgggaagggtatgggagagcagacagtgtgaataggacatgccaccaccgccctcagctgtttgctcatctgaacaggcagggaatggtcctagataatcagatctctccgactgccagcattctgtggcgccatgttggaggaaggcaatcaggagagcaatgccccacccctctcacaggcagtcaagcactgtcctgctctactcaccacagcccctgtccagatggcagctcccgaggtgaygaggagggtgtagtcgcggatgtagaaaaatcctcctaggactgcactcaagatccccagcacgatctgcatcacctgaaagacaaaggacccaagatcccggctcctagktggacctgccactgcagggattaaccgctaaaaccccaaaaagagagggagaggtagagagagagagaaagaaagaagagaagagaagagaagagaagagaaaaggagaagaaagaggaggagaaggagaaagaagaagaggcaggaggaggagaaaagagaagggaaaggaaggagaggagagccggcccatcctgagtttggcccagaggaaaggatggactcagggctccactgattgggactctgcatggtcagtggctcctccacaccccttcagcccagagcctcccctccccaggctcttactgagaaggccagagaatcacatcgctaagtaagaagacataactggctcggtgtcctgttcagagggaggctggcagagagtgctgctgcggctggaggtggggagttcctcccgccgcccsacgaggcaggccgtcacactcacccaygaggccaccagcagccggctgctgcccctggcctgrgtggcccggggccgcagcgcagagcagcaggtgagcaggagcttggccagggcagactcctggtggatgtgcacatcgatgtgggtgtgctgtggggcctccggggccatctcatcactgtcggctgttcccattgtcagggacacagtctatgaggaagggagcaccagagaggaacggctgtcagaagattttcgcagatttcattggagttggggaggtcaggggccagtggtggctcaaagtcacccartgaatggctgtmctggtcacagggccgcacccctggcccctcacgaggggaatgtgtgtagcagagggggtgctgaccatgctggaactgcggcgactacwgagcctgcgggaacctcccctttcgcccaagatctgctctgtccccctcatcctcctcccagggccctggcgtctgggtcaagcagcgccccacacctcgacccctcaccccctcctcccgggctcttcctgcggcctcccctccacagtccgcaggctctgggacaggaccgagtccttggctgcctgtggagctcctgtgccagcagctgcgccccggctgcgctccggatacccccatccccgccaccgccgacctcccgctccaccgactgctgctcacgcccgacgggttcacgccgcccctgccccgtgaaggaccgcgctgcggtgcggaggtaggtcaaaagccggggccgcacctggcttcctcygcagtccccttcctggagtgtcatccctgggtgggggtccctcctacgctcctccaactgtgcggaggcagctcggggtgcgtgcggaaggaggcccgggggccgccgggagtggggtgccgcctcacctgcgctcctcgggacctgcgagcgggcggcgggagggctggggcgctggctggagaagtgggttgagagttggagggggaggcggggaggggaggcgggggtggggctgaacttcagcccctcgggttcatgacaggctgcagggcctggggtccgtctggggttctcctgctgcgcgagggtcactgggctctggggagctgggagggtccgcgggcggacggccctgggaaagcccgtggggtcgttctcgcctccagccccgcccggccagggccggcgtgcaagtgtgcgcgagtgggagcgcagggggcgcgcgggggctcggtcttctcccgcccggtccgctcctccgggcggaaccccctttgccgggcccccgggccgcagctggtttcgggaaaccgcgcagcctgggcggggccgcagcccccacccgtgcatctgccgtctccgccctcccgtcgctcccctgctcggggtcagctagtgtccgctctgctcggccgcgggctcccggaggactgcaggtgaggcagggcctccgcggcccgggagaccctcttgccgcaggaccctctgtcacgaggagtccccagggccatgcccccaccccgtcctgtccacaggacgtctttcttcctccaacctggtttccaggaggactcacgtaggagggagggacagctgggtgcaggtgtttctccccagaaaaacggctggagagcgggaggagaggcctggggctggcgcgtcccgtccaccttccgccgcctgcacgcctggaccctggctggagccctacggtggggtggctcctgggacggggccagggagcggcggggctgccggacgctttccccagccccggggcacgggaagagctggacagaggaaagtgttcggggcagccgggaagagcccaccacctaccaggcgtcgggcggcccgcaggggaatctccgtggtgccggcctggttcagatccgactcttcaggcgggggcgaggcagatctaggggttggcgtggggcgggggaagcggtggtcctgggggcccggaggtagctggaacccgaggtgccctcagggcgaggcctgggccgtcaagggaaggtctggctggaatctggggctgggctggaagcagtctgaagctcctttgtacgtgtgcggaattgtctaactcctgtcctttctaaccccaaggaggccaggtgggtgaaagagtgaaactgctttgaaaartaggtagagtacgaatgggaggtgttattagaattgttaataatatttgatttaaactgtgatacttagccaggatgtccattagaattgcctatgcaggatttattttagagccaggcaagctgattctaaagtgcayrtgaagaagtagtctagcaaaaatggccatgacaattctgaaagaaaaaccacacgaggggatcatgaaacagcccaattagcattaagctccatgttaaaattgtggtaatgatgcctagcccatgagacatgccaatgggcagaatataaggactagaataggcctacattcctaggggaacttcatttctgctcaggagagaattttaaatcactgagaaaaagaggatgtattttccgcaaatggaacgtatctttcagaagttaaacatctgaatgacagcaacagaacttggatccgtgtctcccaacggcsaaggttggtcacccagctcccaaattccagatggtcggcatttaaaagtgaaaactgaaagcataaaggcacttagaagaaaatgtggaagattattttataatctygaaacggggaagtcctttaaaagtgtaagagctagacaccataaatagaatgaaatagaacatggattgtatgaatatacaagcaaggtcaaaaaataaacttcaaattgtaaagaaacatttgaaactcatatcacaaacggtaattttgtgaatagataaagaacttccatagaaaaaagcaaaacaaaacaaaacgaaacaaggacataggatgtgaacggagagctcacaaaagaagaaataaaaatggccctgaacatatgaaaagacaaccaacctcactcataataagagaactatgggccaggcgtggtggctcacacctgtaattgcagcactttgggaggctgaggtgggaggattgcttgagtccaggagtttgagaccaccctgggcaacaaagcaacaccccayctctctctctaaaaaaagagaactggccgggcgcggtggctcacgcctgtaatctcagcactttgggaggccgaggcgggcggatcatgaggtcaggagatcgagaccatcctggctaacacggtgaaaccccgtctctactaaaaatacaaaaaattagctgggcttgatggcgggcgcctgtagttactcgggaggctgaggcaggagaatggcgtgaacccgggaggtggagctggcagtgagccgagatcgcgccaccctagcctgggcgacagagcgagactccrtctcaaaaaatgaataaataaataaatacataataaaaaaatgaaataaaagaaaaccatggattaaaaatatatggaaatcattacagaaagcaggtcagtggttgctcatggccagtggttgggggtattttctggggaggggctttagggaatgtattgctgtgtaggaatgtcctttatcttgattgtagctgtaattgcacaaatgtgtaaatttgtcaaaactcgttgagatatacatttaaaatgggacatttttattacataaaattgattaaaatcaatgcatttttccccatataaaaggaaaaagataaaagagtttgcctcctgcatgtgaattgctaccacctccgtggaggataactgacaatatctactaaaattgcaaatgcgcattcctggtgccctgccaattccacattgtctgtaatggaaaaggattagaaataacctaaatgtctgccaatagggaaccacttaaataaattatgaggaattcatactctcaaaatatatgcagttacacaaatgagtgaagaagcttttgtgaaagttgtcagaatcataatcgagtcacttgagttaaaaaaaaaatctgaaaatggaaggcccacaaggcagggttctcatgcgtaaataacctgggaacaaaagtcatcacaaaggactctgtaaaatgacaaccttacacaaaaaaatacttctgtgaggacatccaccagcaactgcctgtctaaccctggacttgtgtcacccttgttattgatccttgtagccaaggatgatcacctcaaagagattatgtaagtctccccatttttcctttaaaaacctttgtcttcctttacctccctgaaygtgcacatgatttactatggtaagcatattctcattgcaatgccctattccagaatcaatctcattttcttttggagagcctctctctgttatttaggttgacactttttatggactcatgtaggattattctaaaaacatatgatcgtgtgatcacagcatcatgcaaatcagtgtgtatagtatgctgctatttgtgggaaaagggggcagaaatactttttcacacttttgtatgcaaaaatgtcatggtaggatttataagagactgataatattactttgcatctgcaaggcaaataggtggttgagggaaaaagatgagcgataaggttttaaaggtatatatacccttttgtatctcttaacttttttatgtgtaaaatcactattgatttccagtgccattgatatctgcactgggaagcccctttgaattttgacaaagacactgttttttgtttgtttgtttgtttgtttttgttttttttgagatggagtctcactctgtygcccaggctggagtgcagtggcaagatctgagctcactgcaacctcagcctcccaggttgaagtgattctcctgcctcagcctcctgagtagctgggactacaggtgcrcaccaccgtgcggatttttgtatttttagtagagagggagttttgccacattggccaggctggtcttgaactcctgacctcaggtaatccacccacctcagcctcccaaagcactgggattacaggcgtgagctattgtgcccagctgggatcttgacaaaracactatttctctcctttcacctgtgctgtgtatttttccctcgcctagttcccagacctcactgctatatgtcttctccctggcaggcaggatgacgcaaaacacggtgattgtgaatggagttgctatggcctctaggccatcccagcccacccacgtcaacgtccacatccaccaggagtcagctttgacacaactgctgaaagctgraggttctctgaagaagtttctttttcaccctggggacactgtgycttccacagccaggattggttatgagcagctggctctaggggtaagactgggstggtgcggggttggggggcacgttaacgaggtgatgaggtcaattaaaatatagagccaaatcttcaaaattaaaacgttttatttgggaggagagaattgcaatttggggcatacacacagaccaggtggtctccagtatgtctttagaacaaagagaaggttagaggcttataaaaagkagaaatgttacatattgcccttcatgaaagatcataggttttggggagctggtgagctctgatgggtgagcgatggcatgagtaaaactaatcctagagttgtagcaaggtcagaagctgtagataaagctggtttcaggttgcagcaggcagcttcagcagcctgatttgtagagaattacattttgggagcaacattttgtgccccgagtgctttttgcccctggcctctcgactctgttttagttgagtgtgacaagaatgaccccatttgtaggctcagctttcacagtggaaactctccttcttcaataggatgcaaaagaggaaagtgggttgaattcccatgagagggacatgagaaatcactatttatatctcattctgtgtaggaaaaagttgtaagtgtccccacagaaatttggatggaaaggaagaatcgacctcctctttggcacagaggagtcggtcccagccagaggtagggcaacaggaagaacagtctagaggctgttaattcggttttattgaccccacatggactgaaagcctacaggtgcaaggcaatgtgttcagcacttcaggccaagctacagagagaatccctgggctatatctaaaagtactcagtgaccatcagaaggaacagcagctacactaatgactggaactaaaggtagatcaggtgagggagaagcacatctgacatccttgagggcaggagaaccctgaatggagaaggaataggtatagacagaggtggaagatggacaaaaaagaattccaggttaaagaatggcaggagcaaaggcaaagaggccagaaggcatagggcaagttctataatggttaagagtaaagggaatgggcttcatgaatgggtgatttgggcccatattgctgagagccttgaacgaccaggtgaggagtctgtcctgaatcagctttgacagtgagaacgctgtcaatggattctgagcaggaacctgcctcagagtcaggaggcatccaggtgagaaggatcgaggatctgcactcacataatcatagcagaaatggtgaggagacaaaggagtccctgtccttcacagacctccatggcatgggagtgaaggggtttggggcataaggaaagagaggcattcacagcatgcagagagggttgaagtgtgggtgaccaggagatcggagccctgaaagtcaggaggagcagccattcgagaggtgtgtgtgtgtgtgtgtgtgtgtgtgtgtgtgtgtgtgtgtgtggtagtaggggatttggatgtgacaaatccgagatgctggtaggatgtggaggtggtgacagttgggttttccaggaagaagaggagttctcttctgagtcggagttgggtgtgtgaacggcttattggggtatgacacctatgaaatgaaaagagggggagcaggattgagcaggaggaaccatcaggctgcaatgcagactctgccaggccagtgggggagctcccaggcaaaggttgcccactgcaggagttccacactgggtggagatggcccttgagccactgtcttgcttaatcattggctggggggccctcctcagtgtgtgtcttcagcttgaaaaattagggtgaccctgaaggagctgacaactgcaggctgtcagcaatcaaacaagccctttcttgaaggaggtctcagcggcacttctttgtgtctgccacagagccctcaagagtgtgtgtttggatctgaagagaaaggataggccagaagctcaggtcaggctgggggtttggatgggacaatgggacctctgaaggagaatggggggggaaaagtgggaatcttcaggtgggatgagaaagtgttgaagttgggaaaaattgatgaaggataaatagccaagcctatgagaagggtgaggggagacccaggccagtgctgcttcatggattttaaggggacagaatcttccagaatcagagctgcagagaggtcaaggcagaggaaaaggagaggagagccacctaggtaggagccaggcagctggtcccagggcagccrgggcatgtggactcacgggaaggggtctggtttctcatcctgtcttgcaggtgrctcagatattgctgggggttgtgagttgtgttcttggagtgtgtctcagcttggggccctggactgtgctgmgtgcctcaggctgtgccttctgggcggggtctgtggtgagtaaggaacaggctgtgagcctggagggaggcaagtggtgatgggcaagaaggcgcttatggatcttggttggggctttggggaagcgaccaaagtctctggagccaaatggcctttggccatgaggaggctgctctggggtgtagctaaaaccctgtcacttccatttttctcttgaagacagatgggaggggtggggcaggtataggtggaatcctggtctgtgtgtcagagttctttgtctgtccctgggatcctgcttcacattggctattctgggaactgctggtgggagggtgatgatagaccaattcagaagagtaaactggaggcctttttctggtgtctcttttcaggtgatcgcagcaggagctggggccattgtccatgagaagcacccgggcaaacttgctgtgagtcttggacaccctctctccaccttgttcactgaccccctcctgaattctgctccattatctgtcttctgccctttggttgtcaatatcttggggtctttcttggaggggaggagagggtttcctggacaagggctggggaagaggagagggrtttgaggcggggacctcatgactcttccaccgattgaargagcstgtgtcwtgaccctctttctcttccagggcwatatatccagcctgctcaccctgrcaggctttgctacagctatggctgctgttgtcctctgcgtgaatagcttcatctggcaaactgaaccctttttatacatcgacactgtgtgtgatcgctcagaccctgtcttccctaccactgggtacagatggatgyggcgaagtcaagagaaccaatggcagaaggaggagtgtagagcttacatgcagatgctgagggtgagcaggaagagtccagtcttcggggacccatcacagctctttkttcccagggagctgggggccctggaggacagagatgtaggctctttgagcttggacttcatgctgggtctttcattcaggaggttttaatgtaagctacagacatttttcagacctcatgacacgaagattctctgaatcaaggagggtgaggaacaaagaggagacatttcagagaggagatagtgggtcacccttctggcttttctggtgtgttggtatcacagttttccattactgaattaaaaaccacaccaaaatgtagtggcttaaaatgacaacttattatttctcacggtgctgtgagttggctggattcagatgagccatyctcactcacgggttttctcatgcagttacagtcagatgggggtgaagttatccaagtgctcgccgaggctggaggtctgagatgatgtagttgcatggtccggagctcagcgggggctgtcagcaagagccggcaatggcttctccacttggcttgggcttctcatagcacagaaactggattccaatggggagtaccctagttgcaagcatttcaggagacagaaagtagaagctgccagaccagctaagggcttccctgtcactgtatagtgtcactttcactgtggccaaagcagttctaggcccttccagattctacgggttgaaggaatagtctccacttcttgacagggagtgataagttcactctgcagacaagccaacgggatggaagctgtggctggaaacacagtcagctgtggtgggagcagcaagctggatagagtcagtgcctgggtgggtggagagggtggtgatgtgggcagcattggagtagctgacacctgactatctttgttcttcccttatctccagaagttgttcacagcaatccgtgccctgttcctggctgtctgtgtcttgaaggtcattgtgtccttggtttccttgggagtaggtcttcgaaacttgtgtggccagagctcccagcccctggtgagttgtcggggaggggcctctgggcagcgtgagtctgggtggtgagtgtgtgggacaggtaggagtgcgggrccaggggcacccgaacctgaggctgggcctggtgcccctcagcttctttccatatgcagctctcccctttgctgtctggggaatgtggccatcaccatggtcctgggccaactgtcgccgccctgtgcctctctgcgccctcytctgctctgatctccccactctcccctctgccctgtcccaggtgttcgtctgactccccttcctctgccaccttgttttttttttgcctgatctgcttttcctgtcaccttttcctttccctcctcctttcctctttctgctttctgagttctatgatactaactctgcctgcatccttttcccctaaggatttcttttttcttttttttccagaatgaggaaggatcagagaagaggctactgggggagaattcagtgcccccttcgccctctagggagcagacctccactgccattgtcctgtgagcygccaaagaccccacggggtgcccgcatgtccctgtctagggcagcccagggcccccactcctggctcctcacacttgcctcccctatggccgctctccagaccctcctcctttcttctccycacatccgcacctgctgttcccactcyggggttctcaagtccatgaacagatattgttgcattttccacaatgctgattaaacataataaacaatccagaaaagcagttttgcccagaaagatatggtttccctttgtttatacacctcgtgcgccatgaaaggcctttctttgtgtcgctatgtatgaggttaaatgggagctgatttatcccattaaaacactgtcccaagaagattaaatttaattatgttctgctgtacatccaggtggcaaaacccctttttatgattttcttcaattcagtgtaaagtgtaagtctagtgggcctagaatcttcttacctgctgagattgtctaggctcctacaacctcggcctgtagacttaagagaactgtgtggagcatggaatgagatttttgccccctccctccctgtcttccttcctttctcttttttcgttttgcagtaattagtgttggttctgtctcttttcctgtctccacacacacataaacacatccttagtcttccttcctttcattgtaaatgatagcaaactgattttgactttttccattttctttatatatgaagatataacataaatatatagatgtaagcatttctgaagggcaggaaagctggtaggggctttatgaaatctccatgaggccagtttcatgacttagcagccccacagggctggtcttcagatccaaggcgatgggctgcagggcctgcaccttccctcttggcagagcggtgccacagaggtgcagagctgctgcgctgggcaagacctgctcctgcacaggacttggagtaggggcctgtgccgagggcggtgctgctcttcctggggccctcaccagcctgtgctttacatagaggcttgtaaagaagcctgcgagacaggagtgtgttcagaatatggacagggtcagccgattacagcctgaggggtaaatccagcctgccattgaattttgtaaataaaaatgtatctaaacacaaccacacccatttctttacacattgtacctgtttttgtgccacaagggcagagttgaggagtcttaacagagactgaatggcccacaaagcataaaatatttactattaggctttttacacacaaagcttgctggccccgatgtaggagcttgcagtgtagaatgttacgttctgtttcgctgttgaggggtgtggagtgctcaagaatcccttccaaggggagccagccttggatgagcagcgggtgtgtagccagctggtttcctcatttcccagggtccagagcccacaaatcatcaggcagaaaaacttggactcagaaccattgcagtccccatccctccctcagtccccagtaaagaagacattagaatctcagaggaatttagaatctcctgaacctcaacatttattttactgccagtgatggagtaatggaagcccccaattctttgctaaacaggcaaatgtaaagtagctaagcccagaagccaagctgggttgaaatggatagtgtggaaagagacccattagcagggcaagaacctatggggcctcacttagccaggcttcagggaatgcttaacccatcaaaaaatgcggatggctgcctttccccgtgtctcatgtttccacacatcttgtgagcagtggcactgactgccttttcaaagatgttctcacctcctaatgggcagccttggaaaatagtgtcttcttctggaccaaaggacaggcatgatcacctgttataaaagaatcagattccttaagctcagggttccttttctagaacccagcccaccggctgtgctggtgtcacctgcaatgcctctttgcattgtctgtgggaactggggtcctagaacccacgcaaaaatgctgctaccgtggccactgctattgccgtgtgtaataaattgttttttgtcataactcggggttttgtggcttctaccagcatccatgaaactgtggcagactgacttgttgacctgcatgtacagttagatctcagacccttcaccgttcccgactaccatgtcctgctgtgtgcagggttatgatacacacagacttaagacagagcttctgacaccaagaagtttacagtctgcttaagaggtgaggcataaaccctttactacaaagaacaaatgttacttgactgccaagttagcgatgcagcaggcaggaaggtggtgtgcttgctgaagaactgtaggaagacaaggaacatgagaaaggagaatgcaaagtagcagacactcaggggcagagcaccctgagcttgccgttgctcatgtcgtgaacagccatgagaacgcagagtgcgcagggctgctcagacctcagtgtccatgggcacatttgataggactgagttacttgcccactcaccaccctgactccaaggaactttggccaaagttgggcaggggggttgtcttttagttgtcacagatgttgatattcagaactccatctgcaaagatctcaatctatactgcagcatggacagagggctggtcctcaagcctggagagtaccagagtccttgaggcaggaaggaaaccttttttgcttctggggtagggtgggaggtggtgggcgtgagaggctgaatttttgtcccctccaaatttatatgttgaagccctcacccctagtagctcaggatgtgactgtatttggagacagtgtcttgaaagaggtaattaagttaaaatgagatcattgtggtgggccctcatccaatatgtctgatgtcatatcagaggcaatcagaatgccgacaggcccagagggaaggccacctgaggacacagggagaagacggcatctactagccaaggagagcctcagaggaactccgctggtgccaaatcttggactttggccttccagaactgagagaaaagaaatttctcctgtttaagcccctcagtcggtgttttgttacggcagccctagcaaactcagacactgggagacgggagacagcttgggacagcctgagagggggatcaggtgtgccccagcactgcgttttcaaaatcccttccttgtttactgttgaggagccctttgtgcagccctccgggttccccataaaggggtgcctctcatggtgtgggaccacacctgcctttgccacagctgaaagctgcagttcccaggagctggtgttcctggcatatcaccctgaggtctcatcacatcctcaggccaccatcgccctctgttgcctggtcccaccagcctctcctctccctccacatctgactcctcagggtctccaggacagctccccactccctaagtgccgcctgaggggcaccccaccccctttgtcttcacaacatctcttctagcataatctctataatcacaggcatttctagcacagtctcctctagtataatttccagtaaatctcctaggcttttctggtataatctcttccgggagctcagacgttaacaagccagaaagagcagcttctgctttctgctttggatatcagccaaaactgtctgaggccgagagaggcttctgaaatgtccttctatcaagggcccagctatatggtcaaaaagaggaagtagaaatacttggaaatctggggccacttaagtctgttcgttatcttgtcctgatgaccttgggtgctgacatttgcagctcctgctgaatgtcctctctgccctaaagcaaggccctgccactctgttctgggaccttttctttctgtttccacgtaaggcagatgactctgctaccccagagtggggctttgcaggagctgccctgtttcaaactgggcatgtctgttccttgggatgtgtcactggagcagaatgaggtgaaggagggagagcctggccagggataatgaaggagcagtagaaactctactctgttctctataatcatgagggctttgggggcagagcacgggattctctgtgcaggtcacactccccatgggatggcacagtgctgacctgttggcactagcagagcaggtggcatgcggacacacctggtccagactggaggcgagggaagatgtcacagtttctcggctcataatcctgagcttctccatgggctggaggaaggtgggagctatgtttttcttgtattcagccttctacgggttattaataaatattcagtcaataagcaacaaaaaaaattttttttttagagactagggggtaaaggttgattttttttttcacttctatattctgtaaaagaaaaattttggcagccagtgggtggtctcaattcttgctgctcaaggtgtgatccactggcctgcatgggcaaccctgggaactggctagagatgcaaaatctcctccacgccagaccagccaagtcagaacctgcattttcacaaggtcccaggcactatatgtgcttcgtacatttcgaggggcatgggtatgaatattacagttaggtggtttgcaggaaagaattcagatacagaacagggctctgaatttaatctctttgttttcattcttttcatgaacttgttaaccttggagttttacaaaataattctagtggtggctggacgcggtagctcacacctgtaatcctagcactttgggaggccaaggcgagcggatcatgaggtcaagatatagagaccatcctggctaacatggtgaaaccccgtctgtagtaaaaatacaaaaattagctgggcatggtggtgctcacctgtagtcccagctactcgggaggctgagacaggagaatcgcttgaacctgggaggcagagtttgcagtgagctgagatcatgccattgcactccagcctgggcgacagagtgagactccatcccctacaccccctgccaaaaaaaaaaaaaaaactctagtggttttgaaatactgaaattaaaagtaaaaagtggtctctttccttagctgaagatagtattaattcctgtacttcagtgtctctaagttagtccttttatggctagatccagtagcaattcttttcctttttttactctggtagacaaatgtcaacttggtggttttcttttttctttttctttgttccccctgggttgttgttgcacaaaatggcccctttctgccgggcaacttctgtatttttcccctggagtttccaagcctctgagtgaagatggtctcccctctatctgatccctctcccggccccacttcctctattcctgtctctccttcccatcctttcccctctcccctcctgtgaatagccttagaagtctgaatctttgtgctctgtagaaagtcagatgtgacactccttctttctgcttctgtttacttggaaaagctgacagctatttgtctctttgcacagctcagtcttggtggtaaaactgcacagacacagatgggcatgacttcacggccctggcacgagggcatgcagataatctcaagcctatttgtgtgcaacatatttattgaaggatttaaaaccattcagagtataaacaggaaatgattcttcttctttttttgttttctagtcacttcttttaactgtattttgtcaactcactcattccccattggatcttgggttctttaacatcaggaccagattctagatttcacaactctgtcattgcccaatccttttcgtgttaaaaactgcagctatcggctgggtgcagtggctcaagcctgtaatcccagcactttgggaggccgaggcggacggatcacaaggtcaggagatcgagaccatcctggctaacacggtgaaaccccatctctactaaaaatacaaaaaaattcgccaggcctggcggcatatgcctgtagtcccagatccttgggaggctaaggcaggagaatggtttgaacctgggaggtggaggttgcagtgagctgagatcgcgccactgcactccagcctgggcgacagagcgagactccatctcaaaaacaaaacaaaataaaacaaaacaaaacaaaacaaaacaaaacaacacaacacaactgcagttatcggatcatggtttgcctgtctcccagaggagactcagattgctggacggggaggagctggggagggaagtgt

SEQ ID NO: 96859 - DNA, 23750 bp, Homo sapiens
aacattctgaaagaactgggccctaaagtagaaggaggttgggaagaaaggtctaaaacaaagaaagaatgacttaagaagggggctggtgcagtggctcacgcctgtaatcccagcactgtgggaggcggccaaggcaggcagataacatgaggtcaggagtttgagaccagcctggccaacatggtgaaaccctgtatctactaaaaatacaaaaattagccgtgcgtggtggcgggcgcctatagtctcagctacccaggagcctgaggctcgaaaaatgcttgaacccaggaggcggaagttgcagcgagccaagatggtgccactgcagaccagcctgggtgacagtgagactctcactcaaataaaaggaagggaaagagacaaggagggagctcagcataggcaagagttgtagaggtgttggtcgttggggctattgcctgagatcccagggtaaccctgatagcctggtagtatcaatgcttctgaaagtcagtttagcaattaatattcaaaacacgttaaaactttaacccagcaattacacttggaaagaaaaggtacgtgcacaaatttgcctaaaagggaaaactgtagctgtgaaaaatagttatcaaaaatacttattggtatggagagttgtttgagaaatagtaaatgaaaaaagattagactgaagtgagctgaagatttaaaaaagaaaggtggttacaaagctatgttacagtgtgctccattaaaaaaaaaatatgcgatttagttatgtacccaacagaaatgcatatacagtcatgtgtcagttaatggtgggatacattctgagaaatgtgtctcagtggtttttttgttgtgtgaacatcatagtgtacttacacaaacctagatggtgtagcctactacacacctagcctatagggtctagactatggctcctaggctacaaacctgtactgcatgttatactgtagtgaatacagttgctgcattccccgtgcccactagaattcctgcaattactgtaggcagttgaaacccaataatatgtattcatgtatctatctaaacacaggaaaggtacagcaaaaatacagtgttataattttatgggggccacctttgtatattgcaatcttgttgactgagaagtcattacatggtacatgactgtatttgtataccaaaagtatgaacaagagtgttcacagcagtattattttttaatagtccaaataggaaacaaccaaaatatccatcaatagtgaaatggataaatgatagtgtattcatacaatggaatagtccacagcaatgaagatgaatgaactacaactatattcagcagtgttcacgattctcactaacatgttttttaaaaaacagacacaggccgggcatggtagctcacacatgtaatcccagcactttggaaggccgaggcaggtggatcacctgaggtcaggagttcaagaccagcctgaccaacatggtgaaaccccatctctactaaaaatgcaaaaaaattagccgggtgtggtggcacatgcctgtaatccaagctactcaggaggctgaggcaggagaattgcttgaacccgggaggcggaggttgcagtgagccaagatcatgccattgcactccagcctgggcaacaagagcaaaactcccatctcaaaacaaacaaacaaacaaaaaaaaccagacacacactgaagatgatgattccatttttccatttataaaaagttccacaggcaaagtcgatctatgctattagaagacaggacagtagttatttattttaccttcagtcatttttttaaaattgtggtaaaattacacataaaatctgccactttaactaatttaaagtgtatgactcagtggcattcagtgcattcacaagttgtataaccattactactgtctagttccaggtaagtagtcaccacctcccattcctccctcctcccaaggtgttttttttttgagatggagtctcgctctgtcgcccaggctagagtgtgcagtggtgcgatctcggctcactgcaagctccacctcccgggttcacgccattctcctgcctcagcctcccgagtagctggaactacaggtgcccgccacgatgcccggctaattttttttatatttttagtagagacggggtttcactgtgttaggatggtctcgatctcctgaccttgtgatccacccgcctcagcctcccaaagtgctgggattacaggtgtgagccatcacgcctggccccaaggtgttacttttgaagaagagagagtaactgctggaagggtcatcatggggacttctggatattagttatgtgtgtttctttaaaaaaaaaaaatctaaattgcggctatatggctgtgtttatgttgtgaaaatttagctgtacacttgtatatactttgctgtatgaatgttatatccgagtatatatagataaatttggaggggtatgtgtgtgtgtgaaatatattattgctaacactgatttttttcctgggaggtaggagtatgaatccattttgtacttactatgttttgctgacttgttttccaattggtattcatgacgaatacatgtattacttttgtaataaaaattttaaaatttaaaacatcttttttttttttttttgagatggcgtctcattctgttgcccaggctgggagtgaagaagtggtgcaatctcggctcactgcaacctctgcctcccaggttcaagcaattcttcctgcctcagtctcctgagtagctgggattacaggcatgcgccaccacaccaggctaatttttgtatttttcagtagagaccgggtttcaccacgttggccaggctggtcttgaattcctgatctcaggtgatctgccttggcctccctaagtgccaggattacaggtgcgagccaccacactcagcctaaaacgccttaaataaaggacaataacattgattttaagcctttccccccaacctttttttttttttttttttttgagacagggtctggctctgttgcccaggctggagttcagtgacatagtctcggctcactgcaaccacctccacggctcacgatatcctccctcctcagcctcccaagtactgggaggtgttgcccaggctgggagcacgtgccaccacacctggctaatatttttaaattttttgtagaaacagggtttcaccatgttgcccaggctgatcttgaactcttgagctcagtccatccacctgccccagcctcccaaagtgcttggattacggacgtgagccaccgctttccaccaattttaagcctttcaagagaaaacattccttatcatcagtggcaatgggagtgtctcaccaaaactttgcccaattactctttagcctcaggattgatacttctgcatctgttcatcaccctctgtggttctggacctgtccactcttcctggctgcctttcttcttggtgggtatggaaggagtatgtgtgggagagatgaggaaggaggtgttcccgccctgcttggacactgggtggttgtgctcagaagactcactccttgccaggctggaagtaaacttgaagcaaaagctgggggatttgagaagagaaggtagactggcctggaagttgcatcaggagaagccagaggctttaagcaagcaaatgaccccctagtttctcatcccataaacaagcaaccattacagaaagagatttttgttaagagaagactttcacagccttcctcaatcattctgcatccaccaaaactccctgtatttcttaggagtttggaatacctttaagtcatccttgtcttaatgactttctcacctttcaaatctcaattttcatcttcatcccttctaggttcttagacactattaacctcttcttcctctgtgcttccatccatagcacttcctttatatgtctgttagaacagccatcacattctataataatttgctgccaaactgtgatctccttaatagctgggactaagtctttttgatcactgcatcttcaacacatatggtccacaacacacatgcagtttcctggcaaaccacatatacctaacaaatgttgatctaaattgttgaaggaagatcttcccaccctctatcttttccttaagcagagggactacacacattccttctcttttccttaaggcttttcttcactacttttctttgttacaaggtttctttaattcttaagagattattgtgcgcttacacatgcgcatgccccggaacaagtcgtgcagatttacgcccatttccatgtgcatcatggggtctgtagtccttctacttctccagtcctcttctagaacttttctgcttcttcccttaattccacgacctggggacatggtcaataagttgcttttagctgggcttttatttatttatttgtttagtttttgaaatggggtcttgcttcattgcccaggctggagtgcagttgcgccatcatgccccaaactgcagccccgacctccctggcttaagtgatcctcccacctcagcctctcgagtagctgggactataggcacacaccatcatgcccgactaatttttaaactttttgtacacacgtgatctcattatgttgcccaggctggtttcaaacgcctgggctcaagtgatccttctgcctcagcctttgaaagtgctgagattacgggcttaagtcacctctcctggtccctagctgagcttttagagagaaattttccctacacattaaaaagtgtcagtccagtactagcccttttccttacctgttgagcccttataataatatgccaggcactgtgttgattcataatctagagaggcagccactgcctcaggtggattcatttattcattggacatgctctggaaacatataacaaagtatctgatctagttcttggtcaggcgcagcttccttaaggaattgacattcctgccaaatgctcaaagttaagtagaaggtgatgaggggaacatgggttataaaagagcccaagagaaccatgcatttaagtccctgaagtgtgggggatgatgggacggataagatgttcaaggatcctgaagaccttgccaatagttggaatgtggagctgggggtggagtgacccagatgaggttgaagtaagcagggacaaaacaggacagagccttgctgtatgctaagtctgctttagtcaggaatcttttggttgaaagtgacaacgaacccactgaaggaaaaaaaggggctaagagttcagggttctcatctttggtctcctttgtgttagcttctctcttgatcaggcctctgtgagtggtctctgatctccctagtcacacagaagccaacagctggagtcaagagaagggggtgaggaaggccgatgaataggggctacttgtctttccactattaccctcaagtctaccttctttgcaggcaagtctagacctcctcaggtagaccctcagtgggagggcaggaagcttagccttttagactccaaagccgtttgctttcttaaaaatagcaaacccacagccccctatctctttaaggggctaaacacattttctctgctgtatcctcagcctacctggggagcaggaccatttgggtttggtaagagaaaaaaggagggcgaaaaccccggacactcctcctgtctcccgacgctcgttctggccgtctggccctcagtactaagcaggccctgacctacttgtcttactcttgctgcttcttcccgccgggcctcttgccccttctccgaccatgctgcaggtcctgccccaactttaggacttcagaactcctccaccgtgccgtggaggaacagcccttcttccacctcacgcacaccctaccacggcagaaccaatcgaagactatcccagccggggaccccccttttttttcctgggacccagcgtttccgcctccggggcgcagactcctccccctcaccgtcccaattgtattccctggaagagcagccggaaaagcctccgcctgctcataccaggataggcaagaagctggtttctcctcgcagccggctccctgaggcccaggaaccaccgcggcggccggcaccacctggacccagctccaggcgggcgcggcttcagcaccacggacagcgccccacccgcggccctcccyccggcggcgcgctccagccggtgtaggcgaggcagcgagctatgcccgcggcatggcccggcgctgcggccccgtggcgctgctccttggcttcggcctcctccggctgtgctcaggtaagggaaagacgggcactggccaggttctcctaccccagccaacggcccaagactcgccgccctctgactcacccctgctaggccggaaggtggaagaagggattccctagaggtgggggagtctgctggaggttaggggagagccccccgggactgcagagagcacctgggaggctggactgggaacgagacatactcgaaggagtaagtgaagcaagaaagagatggaaacctggccagcggtggtaggggtggtgcaggcacagagagcaaggaggcaggggatctccccaggcgtcctggggtggcaggaggccggctctgagggcgctaagatgccatctgactttttgtgaaacattatctcaagaaaggtacctggaccagcacccctccccgggctccccatcgtttcccatcccccacattgggctccagattctcgtcacccctcaggggcagagaaggggagaaaacggaacggacttttcaaccctcctgtagggtgggacaggaggcttggaagggaagaagctctgccaggctgaggactaggaaggaactctctgaggggatggggaggggtgtgttcgtgcagagttgcagagggggatgcagtgtgccggggaggggcaggtacaaagggaatgcacaactgaatgagctttccacacctacaggccacctctaggggtgggctgctgtgtgtgtgaaacttggggctacatatatgcctgacccacagcttaggcagcccagctattccactccaacccagtgcctttagggagaggggaggatggcatcgtgaccacagtcacatgtcattacgtgaggcacataatgtcatttgcacatgtaaatggtgaacgggaacagttatttgtgtcccaccacacatacactttctcctcaatcggcaggagaaaggatgtgtgtggtgggacacaaataactgggacaaataactgttcaccttcactgccctgctaaacctcccttgagtcataggtatttgctggggaagccatggaagcagaaatctcaaactgccctctgagactttgggggaagagcaggtctccatgaatccttgcagagtgggttcttagtctcaagtcatctctgtggagctgtgtagactctttggtcagtggtctcagagaggggcttttctatgaagacattaatctggggcctccctggggttaatctaagcattttgcagtatccttagggatgtagggagatactggttgggcctggattgtcccatttgcctggggagggtgggatgctgggtgggctctccttgcctgcttactttcgtcctgcctttcccctgcccaggggtgtggggtacggatacagaggagcggctggtggagcatctcctggatccttcccgctacaacaagcttatccgcccagccaccaatggctctgagctggtgacagtacagcttatggtgtcactggcccagctcatcagtgtggtgagtagrggtcccaggctctctgcccagctactgaaatcagccccgccaaaatgtgttaatgcttgtgtgcttcctcccctggtgtttccaaggcttggggaggtgtgagagggaccctgggtggtggcagtgaccccacaggcttaggggccttctcggcagcctctcttcctccctgcagcatgagcgggagcagatcatgaccaccaatgtctggctgacccaggtaagcgtaagtgctctcttccacccacacccctggccttctctctcctcctttttccccatgtgcttttttctttcttaatctctcaaaacaggcagaaaggtatagagtttggagtcctaaacaattggatttgaatcttggcactcaccagccttgtgactttaaacatattaaactctccaagattcattttctcatttgtaaatgtagattctaatactgtaccttggcctagctgtgcaaattaaatgagaaagtaccacatgagccatacctgatgggcagagaagtcactgtggggaagaggctggcttttaaaaggtccctcaagccatatgggccccctctagttcgtttccttaaccttgagccccacccagggcacaagttggtactgcctccctctctcatttcccaggagtgggaagattatcgcctcacctggaagcctgaagagtttgacaacatgaagaaagttcggctcccttccaaacacatctggctcccagatgtggtcctgtacaacaagtaggtgcaatgggaaggttgggggagaccattggagggctcagggagggaaggggttctggggaaaataagagaaattacttatgctgtgggaggggagggacttataatagatatgtagtcactacctagacagacagacccagaccagtgaggtacagcgtggacagccaaggtgacctgggcaatgaccagcccactcccagccggttaggactcccagtatgtatttgatgatgtggtggggatacaaacaagtattgacagcccccagcgcctcaactgattcaggaacaggctttcctggaagcctgggaaggatcaaagaactttaaggtcccagtttctcctccaggttctatcctgtctcctgcaataatccatcttatctctagggtacaaagccaccttcctcaactgatgggaccatgccctgtccccttccattgcttggggctcctcactctggcctcctggctcccctgacttctccaccctcatgaggatcaaccagcttatacaatgtgtgacaagtagcagatgtgtccccttcctccacccaccacccccttctacctgcaaggtgtcacacaggccttctgaccaggacacttcttctggtcactaaccttcccccccctccccatatccccttcytgytcaattccacctctctatactcctggatggttactctcagatctgggtgtcccctccccatgtctccctctggttttgctctcctcccattaggggctgggttgatgggtaaggaggaaggaacgcttaggccagggctgactgtgcccatcctttggcagtgctgacggcatgtacgaggtgtccttctattccaatgccgtggtctcctatgatggcagcatcttctggctgccgcctgccatctacaagagcgcatgcaagattgaagtaaagcacttcccatttgaccagcagaactgcaccatgaagttccgttcgtggacctacgaccgcacagagatcgacttggtgctgaagagtgaggtggccagcctggacgacttcacacctagtggtgagtgggacatcgtggcgctgccgggccggcgcaacgagaaccccgacgactctacgtacgtggacatcacgtatgacttcatcattcgccgcaagccgctcttctacaccatcaacctcatcatcccctgtgtgctcatcacctcgctagccatccttgtcttctacctgccatccgactgtggcgagaagatgacgttgtgcatctcagtgctgctggcgctcacggtcttcctgctgctcatctccaagatcvtgcctcccacctccctcgacgtgccgctcgtcggcaagtacctcatgttcaccatggtgcttgtcaccttctccatcgtcaccagcgtgtgcgtgctcaacgtgcaccaccgctcgcccaccacgcacaccatggcgccctgggtgaaggtcgtcttcctggagaagctgcccgcgctgctcttcatgcagcagccacgccatcattgcgcccgtcagcgcctgcgcctgcggcgacgccagcgtgagcgcgagggcgctggagccctcttcttccgcgaagccccaggggccgactcctgcacgtgcttcgtcaaccgcgcgtcggtgcaggggttggccggggccttcggggctgagcctgcaccagtggcgggccccgggcgctcaggggagccgtgtggctgtggcctccgggaggcggtggacggcgtgcgcttcatcgcagaccacatgcggagcgaggacgatgaccagagcgtgagtgccgcagkctgggaccccgggcgtgagatatggggtctgccagggcccgggtatctggaaagcagcggcgttctatagacatgcagaggtagtaggagtgtaggggaggaaaatgtgagtcaggcctgtgttgcgggcctgggtgctggctagggcccttctgggttggcttccgggagattgtgcggcctaaattggagtcggtggaagatgaccttgctgcttcctgagggctagcacccagggcaaaatgcctgagctggggcatcgttatatgggcagggaggcctgaaacacgaggaggccctttagggttggcagccakcctgtggccgtgaccysgagagtccctccccaccccccgctgcttgcatgcccacatccaagttgttaacctgcagctcttagcacaagtgatgagtcttttgtgcmmcacacaggcaggagggggcaacattgaggacagtaggagtggtgtgtattgggggaggggtggcgttggtggcggggttaragattccaggagcctgcttgtggtggagagcatggagtcctaaatcaatatccctgctcttctgagtcccaggggatggcctcctgaaatatttatggakatgggggtgggtgaaggggaaggctccttggccccttcctcaggctttctgcatacccggcttttggcttcttctacagggttccctgagagcttctttgagactgagccaagagttggggggagatatgataggctgacatccccccgaccccgcactttgggtaggggccggccccaccctgtggtcagtctctggctacctggytggttccaggctgaggctcagctgttgccatggtgactggccaggtttcctctaggacagctgccattctggctgggggatgaagaagggcactgcggtgtgggcctcagagatctgtttccctggacagcaggagatgggttggagctgaagcttggaccagggagcatacactagaggagatggggtgggaaccttagagccagctgaggccaagtgggagatgctgggattcagggactcagcaggctgtggttaccgcctccacctctcctgctgcagtcatgcatgtattgtgcatttaccgagctaggtgctgaggatgtggtgacctacttggatgcttcacaggcacctcaaactcaacatgctcaaaactgagtatttggtctacatcctaaccaccaacttgctcctccaccagtttttagtacacggcatcaccattcacttaatggctcagactgaaaacccagagggatccttgatcctgtcctttctcacctccctctctgtccaattcatcagaagtcttgtcctgtcacaaccccaaagtcattctcagcttcatctgtttttcagcatctccatgctaacaccctggttctaggacatcatcagctcttgcctggcctagggcagaagagtctcctaatagtctccctgattcagctcctgtgctcctgcatccaaatagatgtctccctcacggctcatgcctttccctccttgcccaggtcactggtcactggcttatcttttatttatttatttttttgatatgtgtttcgcttttattgcccaggctggagtgcagtggtgcgacctcggctcactgcaatctccgcctccggggttcaagcgattctcctgcctcagcctcccgagtagctgggattataggttcccgccaccacgcccagctaattttttgtatttttagtagagacggggttttaccatgttggccaggctggtctcaaacccttgacctcaggtgatccacccgcctcagtctcccaaagtgctgggattacaggcatgagccactgcgcccagcctggcttatcttgtcttaagcaagccaagctctttcgtggcctcaggacctttgcacacatgggtccctctgcctgggatgccctttttctttaaaaaaaaatcattacaattattaactttcactctactatttgagagtaaattgtagacactgtgaccctttatcccaaataattcagtgtgtctctcctaagaacagggacactctcttgcataacccaggttcagtgatcgactgctggaaatttagcattgatatctgtatctcatataaattcaacatttaaattttcccgattgtcccagtgatgtcctttgtagcatcaccccccaccctcatcctaatccagggtctcaaattacatttagttgtcatgtctctagtttccttcaatctggaacagttcctcagctttgtctttcatggcataaacgtttttaaagggaccaggccggctgaatgtccctccgtgtgggtttgtctgattgtttctttaactttttcctcatgcagctggttctctctcactcatcagacctcagcttaaatctcacctcctcaaaaaggcattcccagaccacattctaaatgatatctcctccttttatctcaatcctttgtttgccagtgtggaatttttaaatttgtgcttatttttgctccacctccctcagtagactgtaaaccactggctgcgtttctgttgctcatttgcatccccagtgtgtagcatggtgccaggtatataacaggcacagttgccaagcgagtgagttcttcagctgctgactaaataaagatgctcagtggctgtctccccaccccctgagctggcctggctccagataaacacgtgcacaaaggcccagactcaggctggagtagagcagctctgaggagatgctggccgtttgtgcaagccttgtgactggctctcaaacccacagacagcattatctttttgaccgatttgttcacatctgggacctggtctcaccctctggggacgtagtgtggttggatggggctcagtgtgtgatcataaaaggagccaggccggctgaggcagccacttaactcactaaagcatcagccatttacttaacactcttgtgttccagatgttgagatgacaaagatgaatcagggtccttgtttaggaacttgtagcttagtagggggacaggcatgcaaattgaaacaatacagtacagtaaatatactgtgatggagacgtgtacacagtgcagagggaacccagagcagacagcagttcatgctgatctggggatcaaggcagccttcagagaaggtgatgtttgatttgggctttgaaagatatgtaggagtgcaccaggtagagaaagggagctcaggatttccagacacaaaggaaacccaaagacacagagatctgggaggacacactagggtttggtagggctatgttatggggtgggaggaggaggagataggctcatatttgtcgtgggtggtcttgattccagactggggagtttggatgggccctgaaggcagtggggccactggaggcttttactaagatcagagccatgctttaacaagatcattctgggatcactgcaggagaggagtggggtgtgtgtctgtgtggtgggacccgcttatactcgtttgtctcccatcctgcatcatgtgacctgggmctcctccgtctcctccatccaggtgagtgaggactggaagtacgtcgccatggtgrtcgaccgcctcttcctctggatctttgtctttgtctgtgtctttggcaccatcggcatgttcctgcagcctctcttccagaactacaccaccaccaccttcctccactcagaccactcagcccccagctccaagtgaggcccttcctcatctccatgctctttcacccwgccaccctctgctgcacagtagtgttgggtggaggatggacgagtgagctaccaggaagaggrgcgctgcccccacagatscatccttttgcttcatctggagtccctcctcccccacgcctccatccacacacagcagctccaacctggaggctggaccaactgctttgttttggctgctctccatctcttgtaccagcccaggcaatagtgttgaggaggggagcaaggctgctaagtggaagacagagatggcagagccatccaccctgaggagtgaygggcaaggggccaggaaggggacaggattgtctgctgcctccaagtcatgggagaagaggggtataggacaaggggtggaagggcaggagctcacaccgcaccgggctggcctgacacaatggtagctctgaagggaggggaagagagaggcctgggtrtgacctgacacctgccgctgcttgagtggacagcagctggactgggtgggccccacagtggtcagygattcctgccaagtagggtttagccgggccccatggtcacagacccctgggggaggcttccagctcagtcccacagccccttgcttctaagggatccagagacctgctccagatcctctttccccactgaagaattctgcaccctctggacttccctcttcttccttcctttctcaggctcaaggtgtggggggcaaggctgagtattaggggagcttctgagttctgaatctttgggtgacctgcttggagtctcaggtccaaatacttgaaatctgtgagaagtccaagttcatgggcttttggaactggaagaactttgtacagccatggattccaacataagccatgttgcagatgaagaaactgacccacacggtgagacaagcacaggtgggtctgactcttcctccctgccctgagatccatctgtcgagtgccctgttttttccccactttgaactgactggttactctaaggaagtgaactgaggatgttagctttaagccaacccagcctctttgtccacagcagagctgaggtgaacagctggaaccctgctacatccgtgctgctccagtctgttctgctcatggctccatccttctggctgtcactcttcctcttccccttcccaaccaaacctgagcagctttgaagcagaacttgggaaggacagggctgctgctgccagcgacacctcagaaagcatagcctcggcttcctgccccatgtgtccctggaagctgtaccctgactctgcttccagaggccagcagatggtgggttacagacgggtcagcctgccaagtgcacctgagggacctgacctgacacaagccattttgtccctagagcccagctgggactcctgcttctctaggcagggcagagggaggagacacagcacaggcacagagcatgggacagggacccccgagtctggattcaagtcctggccctgctagtaactcatgtgagccagcttgagcaagtcccttcatcttgctagagctcagcttccttgcctataaaacgtaggtggcaatgccctcttcctgaggttgctgggaggataaggcagtgcttgtgaaaaagtctagcgctgtacctggcacagagtagatgcttcatgaatgttgagtctgacaggcaactggagctggtgagaatggggtcccctgactgtcatgccagcctccctcccaggcccactcttcccccctcttccctgaggaaaccaagtctcccttatcaggaagagctgggggagctgggaggaacattacaggaacaccagagggagtctagcgggtgggcaggcttctctctgcagccccctcagcagtttcattccattcctgggctgaacccttgccctggccctgcctcccttctgggtcagcacctcctgacacaggtgtgtgctcagggaccccaggctctagtcctgtactggctgtggaagcctatcactgggacaggaagccagtggctgcaggagacaggcctcagcgcatctcgtctgtcaggatgggctcacggacaccttttcttggtagcagggagtgtctctgcactatggaaactttccctcttctagagcggattgggagttgcctgtattatgcctgaaccctccttgaactcatggtcctggggaaggcgtcttggaaccagaaacagcaacaggaaaggagcctccctctgaagggtaggatgccggcctgaggccctccctcttggctctcccagggcctgggctaccccgaggccccagcagctgctgctgtggctgtacttgcttttaatatttcccatacatggctgttgtccaagttaagtcaccaaatggtgctagaggggatggcagagagcagcttgtccagctcctctccatgacccggttaacacacgagtaaacaggcctagagcttgtctgctgtttgacctcttttaagacccggctgtgctgcatctacaaaatgaagatgacagagctagccgaggtcttcagcaaggaagaaaggggtcagtgtatatgaaagggttacctgggcagtgtcattccctccatctctgtaygcagccctttgggaaccatcacaataaggaagaggtgagggcagaggtgaaggatccactgcccaggcaaggtgctaccatgtggtgggagagtgtgaaccctcaagtgcactgggaagctttggggaaccacagtctcttccacccttgggtcgtgtgtcgtcctcttctcttgatgtcagggaagcccctatgcctccttcccgtggtggggctatctctgcagagaatcgggtgcccagcttaatgctgggcaaggactggaggaagctccagatctggaggtggcagagatactggatggaaacctggagcaagggtttgggaggggaagtraggaaacaggttgagactatctccatcagagatggcaaggccacaggtgatctgagaactatttttgtctgaaaagaaggcatgcacaggctctctgcttttgacaggtggcgttgcagtgggaggaaggcagcttcctggcggggagatagaaatactagaacagctggtaccaagttattgaaaatttaaaagcaaacaagacacagcagcccccaggtggtgtgttctactgaggaaggctacggcagaggaagggcaagaccgtttcccccaatggtcttgaaacggaagaggaaacagggagggctctttggatggtttggggacctggggctgtttgtatcccagtattagctcctgttactaagggtctgctctgcgccaggtcctcagcatgcgttgtctttattccgcgtgacaatcctatgggaaggggcctccacctacgtaacagaaatgcggctcagaaagaccaagtgacagctagtgagtagtgctgggcctgaaccccaaagtccacactcttgctatagccgctgaggcaggcagaagagctccttgggaggaaagtaaggggcattcaaagccttctctgaatcactccccaagccagagtagacctggttccagttgtcccccccttgtttccgggcagagtcaggcaggtgtcataccatccctccccgcccaaccagtgctggccagactcccattcaccgaccttgactagacagcgaacagccaccttttagtattcatcccaacaggtccaggcggtcagtgtgatagccacgcagttcctaagggactgtaggtctaggaatcattaggacactcactcagccaccctcgatgcccccatcttccccacactgcccttggcctccccgctctgcacgcctggagtatttgcactggtctagcctactccaggtcagactcattaggaactcaagattctcgtaaagaaagttgtttccaaagttgtcttgtcactctatttgggggttgggagagagcccgtgggggccagcgttggcgaatacaggaaaaagggagaatgctggagaaactggactcgtgagagcttaaagacatcacaagaatccaaagaaaaagtgagtggtgacagtctgccgaatcactgtgatttgctgctttacaaacccactcagatggaaaagaaatggccaaatgactgggcctggagtaggcagagtccagaaaaggcccccgggagtcctttgtaaagggctgggcggaggtgaggaccactctcctgaggcggggatggcgggggtttcctctcacagcccccgtgctctgggaagtcaaggctgcagtttgcataaggccagacctgcagatctgggcctacatcctggaaacagtattaaattgtgagccccctaaatgaaatgccaggtagacagcaactgaaatgagctgaagaaaatccctcttgcgctccctcagggcagccctacttcccagcccactcagggagcgtcgtgggaggacagtgttgttccctctggacacaaagtggctgggcacttgcctcaggctgaggaaactgtccacttttcaaaagacctggcactacatttctgtccatgtggaaccggagctgtctgagaacagagaggacagaggcactcaaggttcctggtacatcacagcaggcagagacaacagccttcactgtctttccacttaaaagtgttggccaggtgcagtggctcacgcctgtaatcccaccactttgggaggctgaggcaggtggatcacctgaggtcaggagtttgagactgggctggccaacatggtatacaaaacattagctggccatggtggcggtgcatgcctgtaatcccagctactcgggaggctgaggcagaatcgcttgaacccgggaggcagaggttgcagtgagccaagatcgtgccattgccctccaccttgggcaacaaaagcgaaacttcgtctcaaacaaaacaaaacaaaaaaccaacttcagcttacccagcaatgtagctcagtaggcaatgaatgacacctgtggtgttgtggtgttcaggtcctcaagaaatatgcccacaaacaacatgtcactggcccttctagcctcagttgttccttctgtgtaatggatgaggcaggtttaattggaacttagcctcactgttaggtactttagatcctctggttatgatattattaaagggtccaggatgagtcttctagaaattctgatgtaaattacaatgtgaaaaaaggtacattctctctgaaattcaagatggagagataatttggatgtcatctatgatgtaaaaagaaaatggtctgtctcctaaaactacaaccaagcctgtcctggtcctggctgcaactttactccaaatatgcacattcctggaagtcaaacagctggtagtagtggggtttggaggaggtagaaaacacccctgaaggagagctggaattatgtacctaataggtgatcctctctcaagggatgttttcctactctgggccttgaaatcttgcgtctcaagtcccgtgggacaagatatttaatagtgggctctggctgggagcagtggctcacgcctgtaatcccagcactttgggaggctgaggtggatctcacgaggtcaggagattgagaccatcctggctaacacggtgaaaccccatctctactaaaaatacaaaaaaattagccaggcgtggtgacaggcgcctgtagtcccagctactcgggaggctgaggcaggagaatggcgtgaacccgggaggcggagcttgcagtgagccgagatcgcgccactgcactccagcctgagagacagagtgatactccatctctaaatcaatcaatcaatcaatcaatcaatcaatcaatcgtgggctctgctggggaagggccctgctgggtacgtaatcaaaaggtgcctgatgaaccccaccccacccagacgcaaatttacccacaaagggaggttctttgaaatggctcctttccaaaggctgagggacagccctgtcccccacaggttcatgtcagatgccactggtgctgttatcagaaaccccagggccacaggtccctttgttcccattttcacctcccccaagaaaccaggacttaaaactttctaagaattcagattcttgttttttttttatttatgaggaatgtatattgttaagtcactgttatcaagggacacataaaagcagaatcataaaactggactgcagccatcatcacagtacccgagtctatgcttgggggtcttcctcactctgctcttggagtcacaaccaagactccaaaaaaccaacgaagtcccttcaatgtgagtaaaggaaacagcttcaagcactgacaatttttacaagtgattattcaaggaatgcacagtagccacagttcagacaaatcaactacaaaaatcattaaaaagaagagtagggagggtcactgcttattaaaaacaaaagactggacaaagaaagtgaagataacagtgggcagaagctctgcctcctctgtcctgtgtgactcagaggggcatgggggcatgggggcgcagggatgtgcgatctgacacggctcgtttccagcagatgcgtggaattcagggatgcctcgctctcttcctacaacagaaactgaatactacaggcttgctagataagatcttgggggtgagtgggggttctgatcttgtgagagcctgtgttcccagttaaagaagaggcagctggccagagctctgctggagaacctaatgcccaagatggaccagagaggccaaacaacctgaggactcagcaggtgacaaccctgtagcctgaagaggagaggggctgcgctgccttctgatgctgagaaccacagacctctctgccctggatgtgggtgccaagactgatttactgtgcccccagcagacccagagccagggagcaggcctcttccactccaggagacaggcgccacttccctaccagttccttgggatgctttggtgttctgcaaaggcatccttagtctatttttagaacttgcattttcttactttggtcaatttttggtcaaaagtacagagagcacagaataaaagcaaagatgtgaatgtctctaccagacagaggatgacctagtcagcagtttggagggaaatcatctgagggtgctggctcagcacgttcccagatgaaggtctgtcatctaaaggagagaggcaggctcagctcctgaaggtcgcagagcctcagtagtcctcctgagtgtgtctagctgactgttatcgagggacacgtaaaagcagcatcacaaaactggactgcagccatcaccacggcaccaagtctatgcttgggctcttccctgctctgctcttggagtcatgaccaacactctaaaagccaacaaagtcccttcaacatgagtaaaggaaacagtttcaagcactgacagtttttacgagtgactattcaaagaatgcacaggagccagagagccagactccacagagaggccaaaggctctgaacacacgagtcaatgttcatggaggtatagacaaaggattctacctcacagagtttgaagacaacctgccctttcacccacaactactgctttctatgtcaaccctataaagatcaggtctgcgccctgcccacgagcctacttctgaagccatctggaaaaatgaaagcacttggataaatggaaaagtatgcctgaattttaaatctgctcaattacaggttatctgtagcagttaagaatcaacatctatggcattctttaaaacactcctaatttacatgtgacttagtcaacttcccttggtgtcactgtcatgagagatattacaccgggtggaacagtgacgttaagccaacaggattttttgcccttattcttgctaagtcatgattatctgagcagagatgattttataccctctaggatttgtcccgttggctagggtgtacgcccagcattggcggggaaaatattcctaggaatgctttaagagaagaggcagctggaagcttggcaatattccaaggcatgcccgtgctccctgggaagtggtctgtgtcatcctgccgggtgaaacctctgctattgcttgagcagctcccttaacccagtctggctggttctagacttcccagctgccggagaaagtgatacacttccagggaagcagctttccttgccttgcccgccctgcagctggctaaagtgcaggatgggaggatggctgagcattatctgcaggctccaatcacacttccgtggcactgggaactgcagttttcaactcctacccttacaaatgtttcaccaaatcctttatgttcacctctttgccctctgagggggaaaaggagacattcagatcacaaggaaagaatctcagaagggaaagaggggaagtagaggggtctgcgtaatccacaaatgaaattatcagtccctgacatgatccagagttgactgaaacctaatcaagaccgcaagaggtcagtgtagcaaacacaaagggaaaggaaatggaaacaaatcaaaacaaaacttttaagaggaaatggaccgcaggtgctcagtgactatgtatgctttgggtagaaagaaaagataacttcttaggtttctgcctcttcacttgggggaaaaaaggggggcctggccagaccttgcctagcaatcccaaagaaagcaggataaatgggaacccaaagttttcagtatcaccaattatggcttaaaaagaaaaaaaaaggagaaaaaaaaatcccctgaccatgtgatgaggaatgctacgacctacctctctcacaccctagtatgacacaccctaatccatctgtcactggagcatactatactgggcagagataaaagttcttttcctcctggggtttgctaatccagttcccatagcccatatccttcaggccttttttgaagtagttcttggccgtctcgtagtcacgggcagctttcttggcctcaccataggagagtctcagtagatccctgcggtaacggaaggagcagagcttcttaaatagaagaaaaatgttctttttggagacccgggacaattcattccgtggcctagagaaacaaaagcactcattattcacctgggacctgtaagataaggagctcacagtggagacaccgtgggaggggaggcggctctcaagccctgagactgcagaggtatgatgcacccttgcaagtcagggcagaggcttggtcctcactgcgctctcctgtctccttacccatccacagtgcctctggtaccgtccaggatctccaggtcatagccatcagccagacaccagttgacgcttgtctccttagtcttcccggattgccttttggaatcatatatgctgactctgccaacctaggaatcccagaagcaacgggagaaagatggaaacctttcaggaataagattctgaagcagggactcaagactcataggagagaggaagtgtggggtcatgatctttcccctgtatttagggttctgtttggctaagactgagcaccctctagacatactaactccacctcgatt

SEQ ID NO: 96860 - DNA, 22123 bp, Homo sapiens
acccacccaggaaaggctggggcagaacccgctcgtctaatctcggagagctgcccaaaggcggcgactaaaggagcacttccgcctcgactccccggggcggttagaaccgaggatcaacggctgagagagcatcgtccctcccagacagacccttggccactcactgcagaaccccaggagggtcaccgagaagccgtgcatggccaacgacagcgcgtggtactgcatacgggggctgcggcccacgtcgcccagcaccaccgctactacatgccgggccgcccgcccccggcgccagcgcttccatcctcccagcagcagcagcggcagcagcagacacagcgccagcaggaccaagcatgaggccgccatcttggctggcccgcagcagtcacgtgaccgcgcttcctcgcgctgtgcgcagccgcagaccgagcctccgaagtgggccgagagggcgagaagtggacgcggttccctaacaggggcccggggaacccccaggagcccctcggggccaagaattagtagtagtaggacacacgcacatacaccagattccctacacaccagtgtatttccccgactaaagtaaagctgttactgtattgggatctaagaactctcttcaggattcaaagataatttcaaaatatagtgacacaagaatttggataaatttcatcctaacattgataaaggagccagatgctgacgagtacgaattgtagagttccgtctatgtaaataaaaaccagtcctcgctgttagaagttaggggctggtgggttctgcttctggatctggtgctggtaatgtgggtgtgctgcatttggggcggtacctcaagcagcagattacctgcccattttccagggtgtacatcacacttaataaaacatttaaaaggtagagagggggaaggacaaacaaggaagtaaacaccatcatgattttgcttaagtatcaatggctagaaaggaaatttccacagtgaccctccaatttcacctcccaaagtagccatagtgagagtttaatgtgtgtctctgcgatggcctgtattagtccgttttcatgctgctgataaagacatacccgagactgagcactttacataagaaagaggtttcatggacttacaggtccacatggctgggaaggcctcaccatcatggcagaaggcaaggaggagcaagtcacctcttacatagatggcagcaggcaaaaagagagcttctgcaggaaaactcctttttataaaacaatcaggtctcgtgaggcttattcactatcacgagaacggcacgggaaacacctgaccccatgattcagttacctcccactgggtcccttccacacaacacatgggaattcaagatgagatttgggtggggacacagccaaaccgtatcatgaccttttttctttgaaagcggtcccttgcagagaaacaccaagagctcactggtgatgctaccccattgcctccacttgggagctgccgcagaacctggagagccaccacccagaccgtattcaacaaacaaacaagactcctcccctgatgaggaccacaggcagcacccacgggacagggtagcccacatggatgtggctccccagtgtccctgggctcagctcagggcttggcacactttgcatctgcttttcacaattgccccatcactccctttctatggattcagaagggacagctcacgccttaagccagaccttgaaacccgagctttcagaaggaaaggaaggacgagtaagtatctgcagacagcagggatgggcatacaaacatgctggcagcggcatttatcctccagttcccagcgaggcccctgcctccaggttgcgtgtgctggggtggaggcctgtgacacatcgcctgcccaactctgtcgacgctctgtaatgggacaggtagggatctgggacctcagcctcaggactcctggctttcctgctccacctcgggcgagtcactccccatcaatttgctttcttcgtctgtgaattaagggaggggaacttcaagtctttgagagcctgtcctgctctgatgagctaagaggataaagactatggtgatgacaaaccaaaagtagatgcctccctctggtaggtgaacctccgtcggggagggagttgccgtggtgtctcctggagagaggggacggagccatccccagcaggggggcggtttcatagctgggccagcccacctgtccggctttctcacttggcatccattccacatgagatccagtctttccaacaatcaagaggatatatggataagtcactcaatctcccttggagcctcagattttgttcaagttgactgagcacccacttgaggggtgatcaaggattaacagaagtaatgacaatgacaagcttcccctagaacctctgttcccagtggtgctcccaagggggcaaaaatggctcttggggagcaaaacatccttaccctttttatgtataaagcacagataatgatacaatacacaagcatgcagtatatctgcagtattaaaattttatgaaggctgaaagcagtggctcatgcctgtaatcccagcactttgggacgctgaggcggaaggatcacttgagcccaggagttcaagaccagcctgggcaccatagtgaaaccccatctctacaaagaatacccaaaaaatggtggtggcgtgtgcctatagtcccagctactcgggagactgaggtgggaagatcacctgagcccagggaggtcgaggctgcagtgaaccatgatcataccactgcactccagcctaagtgacaaagcgagaccctgtctcaaaaaaataaacaagtaaaataaaatttcatggggcagtacataaggaaccctcatcttctgccagtgggcacgtaaatggcccagccactgtggaaaacagtcgtatggtccctcattaggttcaacatagaattatcacgtgacacagcaatggcattcccacgtatacacccaggagaatgaaaaacaggttttcgaacaaaaacttgtaaacaaacatcagtactgtccacaagaatcaaatcatggaaacaatccagaggctcatcagtggatgagtgatgaacagaatgcggtctgtccacagctcccacagcctcccacccgaggtttcccaggtgtctccttgtttgcttgtttgtttgtttgttttgagatggagtctcactctgtcgtccaggctggagtgcaggggtgccgtctcggctcactgcaacctccacctcccaggttcaagtgattctcctgcctcagcctccctagtagctgggattacagccctgcaccatcacgcctggctaagttttgtatgtttagtggagtcggggtttcaccatgttggccaggatggtctcaaactcataacctcaagtgatccgcccacctcagcctcccaaagtgctgggattacaggtgtgagccaccacgccctgctccaggtgtcttgttttcattttattttattttattttattttattttattttattttattttatatttcatttcatttcatttcattttatattttgagacagagtctcactctgttacccaggctgcagtgcagtggccccatctcggctcactgcaacctctgcctcccaggttcaagtgattctcttgcctcagcctcccaagtagctgggattagagttgcgtgccaccacgcctggctaatttttgtatttttagtaaagacagggtttcaccacgttggccatgttggtcttgaactcctgacctcaagtgatctccccgcctcagcctctcaaagtgctgggattacaggtatgagccaccatgcccggcctaggtgtctacttttggtttgtcatctccatagtcctcatcctcttaaatcatcagagcaggaggggcttccccgggagatgatattattcatccataaaaaagaataaagtactgacatgtgctacaacacagatgaaccttgaaaacatcacgctgagtgagagaagccagacacaaaaagccacgcattgtatgattccatttatatgaaatatccaccgtaggtcaaaccatagacacagaaagttgattcatggttggtaggggctggggaggagggaatagggagtttctgcaaatgggtatgggatttcttttcagggtggcaaaaacattctggagatagatagtgatggctgcacaactttgtgaatatactaaaaaccactgtgaaactgtacacatttaaaaggtgaattttatggtatgtgaataatatctcaataagcctcttactaaagatttttcaggattaaaacgtctaaaaacactccgggggtagaaaaaagaacaatgacgaaattaaaaggtggagaagccctaacctagcatctgcacatagggagcatcaaatacacactttagtggtgttcttttgattattattacagatctgtaatctgtttgctgaagcccttgggaccaagtatgtttctgaattcaaaattgttgggattttagaaagataatgtggtgcacatacatacaacagccccagcaaggtttgggacagcacccaggaaaccaacattaacatttctgcaaggaaacagatgcgcattcacactgaatgaaaccaataaggacgctaggtcctcactctctgctgtggtttgaatgtgtgccctaaagttcgtatgttggaaccttaattctcaatgcaacagtgttgagagatggaatctttcatgaggcctctgccctcatgaatggattcatgctgttattgcaaaagcgtgtacctgataaaggaatgagtttagcttctttctcttctctctctccagctctcgtgcccttctgccctccaccgtgggatgatatagcaagaagacccccaccagatgcaaccccttgaacctggacttcccagcctccagaactatgagccaaatgaatttcttttctttataaattactcagtctcaggtattctgttgtagtagcacaaaactaagacactgcccagtataccagctacatgtgactatcaagcccctgaaatatggatagtctgaattgaaatgtgcttagcctggcatggtggcttacatctggagtgccagctccttgggaggctaaagcgcgagggtcccttgagcctaggagctcgagactgcagtgaactatgaccacatcactgcactccagcctgggcaacagaatgagaccctgtctcttaaaaataaaataacaaaataaaacaattgtgttgtgaacataaactactcatcaatttcaaagacttagtatgacaaaaataaaaacaaatcatttctatattgattacagatgtaattacaatattttaaataactgggtcaaataaactagatcgttaaaattaacttcacctgcttattgctgctttcttagatgtggctactaggaaatttcgaaatgcacacatggctcatctttgtagctccaattctatttcaattggacggtgcccctttaaggaagtttgcctcagttcaaggcagacgtgccctcaaatgagtttgtttcaaatttatttaaaacaaagcctgggtgtggtggctccagcctgtaatcccagcactttgggagcccaaagaaggtggctcgcttgaggccagcggttcaagaccagcctgatcaacatagtgagaccctgtctctattaaaaaaagctacaaaaattaggcaacatggtggcacatgccgattgtcccagctattcaggaggctgaggcaagaggatctattgagcccaggaggtcaaggctacagtgagctgtgatcaaaccactgcactccagcctaggcaagagaatgagaccctatttcaaaaaacaaagaaaaaaaaattcgttttgctttcagagcttttggatttctgggttgaattgcaattgctagatcaaagatctagcctgtgagcctggagaatcagggctgagaaggacagggcgggcagccctctccccagcatccygtggacagcaggctctacgcccaggactggcctaacctccgctgcctaaccgtcatccccctgcagccacccttcccagagtcctttgcccaggccaccccaggcttcttggcagccctrccgggccacttgtcttcatgtctgccagssggaggtgggaaggaggtgggaggagggcgtgcagaggcagtctgggcttggccagagctcagggtgctgagcgtgtgaccagcagtgagcagaggccggccatggccagcctggggctgctgctcctgctcttactgacagcactgccaccgctgtggtcctcctcactgcctgggctggacactgctgaaagtaaagcyaccattgcagacctgatcctgtctgcgctggagagagccaccgtcttcctagaacagaggctgcctgaaatcaacctggatggcatggtgggggtccgagtgctggaaggtgagtgagccccaattcctctggctggacactgggaagctagctctcagctttgtcccctgccctgctctgtacgcctgggacctggcagactcctggccccagtatagcctgcctcggctataaggagagaggaggccaggggctggatcttcctggcggctgtggcccagctaactgttacgcaattttttagaagtaggaaagatttaaaggcaacatgggaagggatttgggaattatctttttctcagaatgaaatgatccatttgacagcccctcctcacaacgccacgaacaaggggagcagggagagtgccccgttaacagatatttgtgggaagacccctccccttgaatgaggtggctgtggacaaaactgaggaccctcaagatcgggttcccaccccacttcctccacttgcagccaaagtctcctgaaggttctgcaaaaacagtcaagtgtttgtttagctttgagagctataagatccccaagaagggggctggagacaggccaaggtaaacacacacatgcgcacatcatgcacacacacacaagcacacatgcacgcacgcacacacacatgcacatcacacacacaagcacgcatgcacgcatgcacacaagcatatcacacacacacacaagcacacaggtggctcccacagggctgggtgcttcctggggcgcatgtgatagcaaaagctgtagttcactaagtatctgctcaatgtgggcacaacccaggtgcattgcatggggtacttcagtgccctctccccgtcatccctgaggttacacccattattattatcctcttttagcaaagaagggagggggttctcttaatcatgactgggcagcattcactgggaaagcggccccacctaacagcctcagaccagggtccccactccttggcagctgcagtgagcccggcttctccacccacgccacatcccacatccactgccccttctcctctcaataatcttgctccataacagattccctaggaattcagtgcttaatacaaccacacccgtgaactgtgcccagaagggagcaaaggcagtgccagtgcctagaacagagcttcagaactggactgcccaggttcaaatcctggatctcccccaactggctgcatggcactgagttaactgctctcgtggagttttggtttcctcatccttcacctgcagctggtggatgggagtatcacacgatcatgcacatgtgtctcatgagattgtgtgtmtatgtcatcttaccagtggggctcagtacttgtcagccattactgtttccatctatcaaagcattgagcatccttgactagcagcaacggcttcctcacctgtgtctctctaaacaatgagctcccagtgggcagggtctacgtcccattgcagtggtccccaacctttttgacaccagggactggttttgtggaaagcaatttttccatggactgaggtggaggggagggtttcaggacaattcacgtgcattaaatttattgtgcactttattttttatttattattattattatattattattattttgagacggagtctcgctctgtcgcccaggctgcagtgcagtggtgccacctcagctcactgcaacctccacctccaggttcaagcgattctcctgctcagcctcccaaatagctgggactacaggtacccaccaccacgcccggctaatttttgtatttttggtagagatgaggttttaccatgttggccatgctggtcttgaactcctggacttaagtaatccacctgcctcggcctcgcaaagtgctgggattacaggcgtgagccaccgtgcccagcccactttctgtttattgttattatgttataatatataattatacaactcgccacaatgtagaatcagttgaagccctgagactgttttcctgcaagtagataatcccgtctgggggtgataggagacggtctcagatcatcgggcattagatcctcataaggtgtgtgcagcctagatccctcgtatgtgcaattcacaacagggttcacactcctgtgagaatcgaatgcagccactgatctgacagcaggcggagctcaggcggtagtgacagcgaatgatggggagtggctgtaaattacagatgcagcttagctcgctcacccaccactcacctcctgctgtgcggccccattcctaacaggccatagaccagtaatggactggaggttggggacccctgtcctattggactttgtagacccggtgcaatcacaggaggagacactctgacacacagggagcccctccctgtcagcactcccaagcctttacttcttccctgcgggtttgcccatggagggggctgagcagagggggcgtgccagagccggtcgccctggaggactacctcagcatccttcttaacctagcccatcctccctaacaaggttcctacctgactgcagctgccccacttcatccctcgccctctcagccctgcgtgaatgctctcactcggatgttctcactcatgtctccccaatttctggccacctctggatcttcaccattgtctcccacctcaacaaagccactgctagcccacagggtacctctgtgggaattagaaaaaggcacttccttcctgaagtcacttgacagccatctgctgggaaattgtcttactgcatatacaaacccatgatccaaatgtgtgttgcccttgtgcagtgtacaacctgctcaactgtacacagtggttctctaccctgcaacctttctctggccatccaacaagaaagtatatgagtcaaggatttgaggatttgaacctcaagtatcaaagatttgaacccaggcccgcctccagaaaccaagctctcagccaccaccttctactactctgacacccattctcattgcccagatcacccccatcctggcctcatttccagtcagctcagtaaatccttcccctctgagtgctggagaaggcagagaggctcccaggaagcattagactttggggcatttttttttcttgttccaaggcaaaaaaaggtcccgattccaaatagttgaatgaattaactctgttcccttccagagcagctaaaaagtgtccgggagaagtgggcccaggagcccctgctgcagccgctgagcctgcrcgtggggatgctgggggagaagctggaggctgccatccagagatccctccactacctcaagctgagtgatcccaagtacctaagaggtgagcacacgcagggtgtcccattccctcaggaatagcgcctatggggatattgactgaaataacccagcgtgggctctcctggggcaaggctgggctgggacagtcygtaaccaacttggacctgtctgctgagcaagccacagacgagccctggggacgtgcggtcatccttgacttcagactctgacgggctctcctacccacacagaggtgtgcagaggaagcagggtgtcttctctcaagcattcagcgcacgcacaagctggaggtcctggtcctagactagagcggagaggctgggctgtcccagaggggagagtatccaaaaggcaattcaaccctttgcacagcaaacagtagtgtcccatgtcaccaaattattttaatccacttcattaaatgtcagtagaaattcccgaagttgtccacacactatttttcaaaacagtggggtttatctttctcatgccttatgaccactgagagtctctctctcctcaccagccccgagtgaccctgcaaaaggtcccatctaataagtttggctgagttgttcctggatggcaagggcggggcacaaataaccagtccatcatgctgctccaaccctgtcccctctgctccccactcccatcagatgcatgggggtgagcggggaggtagccaggccacgcttcatgctcacacggcagtccagccgcagggaccatagcccatgctgacctttccaattttaaggtcccccaccctctcccaggcctggtccctaacactgtccccacctatgtcatcttaaagatatctatgactgggcatctgtttagttaagagctccacgttctcaccaaaccaaaaggtctaccaatatcacctccccactaattccacctccccacttgtttttttttttgggggggttttttttttttttttttttgagacagtgtctcactctgtctctctttttttttttttttttttttttttttgagacagagtctcaccctgtcgcccaggctggagtgcagtggtgcgatctcagctcactgcaacctctgcaacctgggttcaagtgattttcctgctttagcctctctcaagtagctgggactacaggcatgcgccaccacgcccggcttttttttttttttttttttcttgagatggagtcttgctctgtcacccaggctggagtgcagtggtgcaatctcggctcactgcaagctctgtctcccgggttcatgctattctcctgcctcagcctcctgagtagctgggactacaggcacctgccaccacacccagctaattttttgtatttttagtagagatgggatttcactgtgttagccagactggtcttgaactcctgacctcaagtgattcgcccgccttggcttccgaaagtgctgggattataggcgtgagccaccgctcttggccctgcctcttaaaaaaaaaaaaaaaaaaaaaaaaggctgatcatagctcactgcattctccaacttctagactcaagcaaccttcctgcctcagctgggactacaggtgcacaccaccacacctggctactttttttatttttgtggagacagagtcttgctatgttgcctaggctggtcttgaacgttgggcctcaagcgatcttccttccttagcctccccaagtgctgggatgacaggcgtgagccctgcacctgggaaactaaaccttttatttatctggggtttccatgggatgcagtgggtttagtcaaatcccgtcccatcactgttcctattgattaggggaaaaartggttttataagcaaaaggagctttcttgagtgtttcaaacccaatctgggaccaggggacagggcttagagccctgagctgcacctgccagtgggcagggctgcaggaggaggtggggacaccagggtggcccactgctcctgggtcacccccacaccccaccccatctatctgtcctctctgccagagttccagctgaccctccagcccgggttttggaagctcccacatgcctggatccacactgatgcctccttggtgtaccccacgttcgggccccaggactcattctcagaggagagaagtgacgtgtgcctggtgcagctgctgggaaccgggtgggccctgcacttrccctatttgctggaaacccaaacgcactagttctcagctggtcctgtcccgctcctccttctccaagccctagggctgaagccaggggtttgtgcagacacaggtgcagctccctgtagctgccgggtactgccctctcctactccagcagggtcccccttgctccagccgcccgctggcctcccatgccacagcaggccttccagcagccatggctgaacacaccacctccaggccccaggacaaatccccaattcctctccgcagttccaagtctccaggcccctagaggcctcttttcagactctccaaggcttcctcccacttcaaagactttgctccccccaccccacccactccaccccctgggcctcaggaagtctgcccatcctccagggctggcgccagcatcctacctccaaccccatcctatctctgaccccagcacatagcagacctcctgtgagggcctctcctggcacctcttatagccacagatgcaatttacatttgtattatgagcctgtccccatccccagtgaggatgcagctccaggaagacaggactgagcctagttgggctcctcattttatcctggtgtttggtgggcttggaacaaggccccagggcagccctaggtgcagggcccatgggcaaagtgggcagccggtgcccaggccgcatcctgtcagcatccttcagagcagtgcttaggccaggacacagctggattcacggaggggctgggccccagccaaggacctctgctttttaaaaatttttatttatttttatttttttgagacagaggctcactgtcccccaggctggagtgcagtggtgtgttctttctcggctcactgcaagctcctcctaccaggttcaagtgattctcatgcctcagcctcctgagtagctgggattacagatgtgcgccaccatgcccrgctaatttttgtatttgtgtgtgtattttttatttttactttattttattttatttttatttatttattttgagatggagtctcgctctgtctcccaggctggagtgcagtgatgcgatctcaactcactgcaacctctgcctcccggattcaagtgattctcaagtgattctcctgcctcagcctcccgagtagctgggattacaggcacgtgccaccacacccagctaatttttgtattttttgtagagacagggtttcaccatgttggccaggctggtctcgaactcctgacctcaggtgacttgcctgcctcagcctcccaaagtgctagaattataggtgtaagccaccgcgcctggctggtgcaggaggaataagcatgttgggcccagattccaagtggtctgggttcaagtacccactgttcggggctggaaaagatgtgatttggcccatggagcaayaggaagtttcagccttggtggcttcctcaaccccagaatagctctagcrtcatctttcctgggctagggcagccagatttagcaaatcaaaatgcaggactgctgtattgtctctgtcaacccccatgcccagctrggtgtctggaatctactgggagttccaacaactacaactagggggctgggaagacgcagggcagagtcagcgctccatccttaacagcttggaaccactttcccccaggacggacagcagcgagccctgcggcctctcagacctctgcaggagcctcatgaccaagcccggctgctcaggctactgcctgtcccaccaactgctcttcttcctctgggccagaatggtgagtgcccagggagcccccgccgtgccaggggaaggggaaggaaaaaggaaaaggggcagccggacgtggtggctcatgcctgtaatccaagcactttgggaggccaaggcaggcagatcacttgaggccaggagttcaaaaccagctgggccaacatggtgaaacccattctctactaaaaatacaaaaaaaaaattagctggacgtggtggcgtgcacctgtaatcccagctacaagagkaggctgaggcaggagaatcactggaacccgggaggcggaggttgcagtgagtaagattgcgccactgcactccagcccaggcaatggactaagactctgcctcaaaaaaaaagaaaaaagaaataaatgaaaaagggctcatggcagtgtagttctgtctgctacacaccaggaaaataagcagagctttggatttctacttgggacctcaggagggagaagtagggcccctatcatactcctgctgtgtaattgagccgatttgggatctggcatttgggattctgttaggccagtgaaacagatagctttgcctgctgaactggactgtagggcatcagaaaaacacaacgagagagagaaagagagaataaaagagaatcatcagaaagaactctgtaaacaaaaacaaatgaatgaggccgggcacggtggctcacacctgtaatcccagcactttgggaggctgaggtgggtggatcacttgagatcaggagttcgagaccagcctggccaacatggtaaaatcccgtctctactaaaaatacaaaaattagtcgggcatagtggcatgcacctgtaattccagctactcgggaggctgaggcaggagaatcgcttgaaccagagaggcagaggctgtagtgagctgagatcatgctactacattatatatgccactatatatatatatgccgctctctatatatatacatataaaaaaatagaaaaagaaaaatatatatatggtggcatatatatatatatacacacacaccagtatatatatttcttttctttatatatatactaccatacacactatatatatatgccactatatatataccactatatatataccactatatatatatcacgatatatataatcactatatataccactatatatatacaccactatgtatatatataccactatatatatatatacacatatatatatacatatatatatgtatatttcttttccttctttttttttttttgagatggagtctcactctgttgcccaggctggagtgcagtggcacgatctcagctcactgcaacctctgcctcccggatttaagcaattctctgcctcagcctcccaagtagctgggattacaggcacgtcccactatgcccagctaatttttgtatttttagtagagatggggtttcaccatgttggccaggctggtcttgaattccggacctcgtgatccacccgcctcggcctcccaaagtgctggggttagaggcatgagccactgtgcctggccatatatatttcttcatacagaaaggtagggttcattatcttcattcaaaaaacaatgtgattcagtgtccagaaatccttagctgaggagacactctctgtttttgttcaacagaatttaaaaattattatttctctgcaagctgtgacagcccaatatttttataaatacaataaaaaccatattacaagggaattattttgatcattagattcagcaggtggaaagtaactctgaccactgctacagaagtgtctaaagcctgctgtcaactcttgttcttctctcccagtgtggggagtcaccagcccggttcttggcccacactttgagtagcactgaagctgcccgcgggttcaggctcgttgtacrttgcattgcccccgcgatcggtcacagagcacctcctagtggcccaggcatcacattgggcacttcccagctgtgycatccccctacgagagcccctctggtgccgtttctagaggcctcgccctttcctgataaaaactcttgaggctcagaaaggttactttagcaaaccaagtggtttgctcctaagtggcagagctggatctcgaacccagcaggctgggggtgtgcatggggaagaaatcctgcgaaaaggagaaaaagacctgccctaaacacagccctaaacacagccccttgcaagaccgtctcagaactgcaagactttcccatagcagggcgtgtgtctgtcatctgtaccactgactcccttgtctttgggtgtttgtctccccagaggggrtgcacacagggaccactccaacagagccaggactatatcaacctcttctgcgccaacatgatggacttgaaccgcagagctgaggccatcggatacgcctaccctacccgggacatcttcatggaaaacagtatggccagcattctgcccccggggcaaaggaacagggtgtccccccaccaacacacacacacacacacacacacacacacacacacacacacacacacacacacacacacacggagttgccagattaagcaagtaaaaatacagagtgctcagttaaatttgaacttcagataagcaatgaatccatttttagtataagtttatcccaactatttcatgggatatacttacactcaaaaattatattcattgtttatcgaaaactcaaatgtaactgggcatcctgtattttacctgccactgtgtgacagtttcctgcccccaaaggctgccccagtgacggagctctacacagatggaccaggtgactggcagacagacccacaaagccttatggatgaggcagacagggagcgcttgggaggctgctagctggctggggtgtccaaactcctccactgatcctgactttggagcagccctgaccaaggccctcagtgggaggcgggacacaagcatgggagcccctagttggtcaggcaaaggctcaagctgcctccttccctcctctgcattgaacgcccacctcctaagcctaacccaggcagatgaaggcaggtggcaccgtggcagccctggggagtgggaggaggtgggcctggggggcaggcctgcagagggcccccgtctttacttccagtcatgttctgtggaatgggcggcttctccgacttctacaagctccggtggctggaggccattctcagctggcagaaacagcaggaaggatgcttcggggagcctggtgagctgcgctgctgccctggctaagaaggggggcagtgggggtgggggtggctctgagtttctaggccaggtgtgggaacaatgcattggtgttaaggttgccaagggatttgtaacctacaggtgcacacacacagacgtgtacacacaaggagaaacgggctcggagccttggaagccaaaatgtggcaagacaggaggccgtcttattggaaggtgttggcccctacagctgcattaacaagcccatttgtattgtactgtttttatgctgatgataaagacaaacccaagactgggtgatttataaagaaaaagaggtttaatggactcacagttgcacactgctggggaggcctcacaatcatagtggaaggcgaaagggacgtctcacatagtggcagacaagagagaatgagaagcaagcacaaagggaaaccccttataaaaccatcagatctgtgagacttattcattaccgtgagaacggtatgggggaaacggcccccatgattcaattacctcccaccaggtccctcccacagcacatggaaattatgggagctacaattcaagatgagacttgggtggggacacagccaaaccacatcagcattcattcagcaagtacgtattgagcacccactaatgtaccagacaccatctaggctctagggaaaactagaggcctgaggaaaagaaacataaatcacctaaacaaaccaagaagtgaaataattgcacattctgataagagctataaaggagacgacagggtgaggaagaagagaagtccaggaaaggctctccaggtgggtgactgggaacaactacatgggaggaggtgacgtagcagagggtggagaggcagaggactcagccacttcccagccatgtgacaatggacagctggtccctttgcaataagtcgcttcacccctctcagcctcaatttccctgtctgaaaataaatgagcatagtaatccccaccttcctgagctgcaaggagagtcaacgtaatacatttgaagccgcatagcctgtgccaggtacacggcagctcccaggaaatgctagtgtcctcattagaagcttgggatgctccacgaagcaaaagcttttgaaataagatggtgcgtttttaaaagagtttatacgatgaagattcttaggcctccagatgtatagcttcggcgggttggggatggggctgtggaacttgcatttttggctttattattattctcaatagacatgtaataattgtacatatttatagggtacagtgtgatatttccatacatgtatacaatatgtaatgagcagacgcatcacctcaaacatctgtcatttctttgtgttgggaacattccaaattcgctcttctagctatttgaaaatacacaataggctacgccttataatcccaccactttgggaggccaaggcaggcagatggcttgagctcaggaattagaaaccggcctggccaacatggcaaaactccatctataccaaaaatatcaaaaacattagccgggtgtggtggcgcacacctatggtcccggctacttgggagaatgaggtgggagaatcacttgagcccagcaggaggccgaggctgcagtgagccatgactgcaccactgcacttcagcctgggtgacaaagcgagacactgtctttaaaaaaaaaaaaaaaaccacaaattgttgttatttgcaatcaccctatagtgctatggaacggtaccacttattcctcctcctggctgtactagtgcatcccctaaccaacctctggttatctcctctcccccatccccctccccacctctagtaaccactattcaacactccacttctttttttttagagatggagtctcgctctgtcacccaggcaggagtgcagtggcactatcttggctcaatgcaacctccgcctcccaggtacaagcgattctcctgcctcagcctcccgagtagctgggactacaggtgcatgccaccacgcccagctaatttttgtatttttagtagagagggggtttcaccatgttggccatgctggtcacgaactcctgacctcaagtgatccacccacctcggcctcccaaagtgctgggattacaggcaccctgcctcaacactgcacttctatgagatcaacttttttagcttccacatacgaggaaggacatgcaacatttatctttccatgcctggcttacttcaattagtataatgtcctccaagttcatcgatgttgctatgaatgaaagaatttggttatttttatggtgaaatagtacttcattgggtctgtgtaccacattttctctgtccattcatctgctgatagaaactcaggttgctgtatcttggctactgtgaatagcgctgcaataaacatgggggtgcagatgtctcttcaacataccaatttcctttcctttggataaatatccagtagtgggattgctggatcatatgatagtcctatttttagctttttgacaaatctccatactgctttccataatgtctgtactaatttacattcccatcaactgtgtgtaagagttcccctttctcttcatctttgccagcatttgttatctgttgtcttttttttttttctttctttctttttagacagggtctcactctgtcacccaggctggagtgcagtggtgcgatctcggctcactgcaacctctgcctcctgggttcaagagattctccagcctcagcttcctgagtagctgagactacaggtgggagccaccaacacccggctaatttttgtattttttgtagagacagagtttcgccatgttgcccaagctgatccagaattcctgagctcaaagtgatccaccagccacggcctcctaaagtgctgagattagaggcgtgagccactgcgcttggccattttttgtctttttgatagtagccattttaacaggtgtgagatgctatctcattgtggtttgatttgcgtttctctgatgattagggatagtgagcgtttttcatagacctgttggccatttgtatgccttcttttgagagatgtctatgcagctcatttgccttttttcttttctttttccttctttttttttttttttttttttgagacagtctcgttctgtcacccaggatggtgtgccgtagcacagtcttgctcactgcaacctccacctctcgggttcaagcgattctcctgcctcagcctcccgagtagctgggattacagccacccaccaccatcatgcccggctaatatttgtattttcagtagagacagggtttctacatgttggccaagctggtcttgagcccctggcctcaagtgatctgcctacctcgacctcccaaagtcctgggattataggcgtcagccaccgcacctggccatattttgtttcctatagccttgaagcatattttgaagtccagtaatgtgatgcttccagctttgttctttttccttaggattgcttcactatttggggtctttggtgggtctatacaaattttaggatttttttttctatttctgtgaagaatgtcattggtattttgattcaatctgtagatcacttcggtagcatggatatttttcacaatattaattcttccaatccataaacatgggatgtcttttcattttttgtgtgttctcttcaatttctttcatcagtgtcttttacagttttccttgtagagatctttcacctccttggttaaatttattcctgggtattttggttttagctcttataaataggattacattcttgatttctttttctgctagttcattgtaggtgtatgaaatgctactgattttttgtatgtttattctgtattctgcaactttgttgaattcatttatcagttctaagagtttttttggtggagcttttagggtttcctgtctatcagatcatgtcatctgcaaacaggtacaatttgacttcctcctttttcatttggatgcccttttttgtttctcttgcttaattgctctggctaagacttctagtattatgtcaaataaaaatggtgaaattaggcactcttgtgttgttccagttcttacaggaaaagctttcaacttttcctcactcagtgtaatgttggctgtgggtctgtcatatatgacctttattatattgaggcacattccttctatacctaacgtattgagagatttatcatgaagggatgttaaatttcatcacatgcattttcctgcatctattaagatgattatatgatttttgtctttcattctattggtgtaatgtatcatatttattgatttgcatatgttgaaccatccttgcatccctccaataaagtccccttgttcatgatgaatgattttttttaaaatgcaaaacattcattacttactggaagtggtcaaagtaggaaagccatgaatggtttttaatgtgttgctgggtttggtttgctagtattttgttaaggatttttgcatctaggttcatcagggaaatcggcctatagtttttttgttgttgctttgtccttggctggttttagtattggggtaatgctgaacttgtagaatgagttgggaaaattttcctcctcttcaattttctggacgagactgaaaagaattggtatttgttctttaaatatttggtaaaattcagcagtgaagctgtcaggtcctgggctttttgttttggggagactttttattacacattcaatctcattactcataattggtctgttcaggttttctatttcttcttggttcaatttcagtatgtcgtatgtgtccagcaatttatccatttccactaggttttctttttttttttggagacagagtcttgctctgtcacccaagctggagtgcagtggcgcaatctcagctcactgcaacctccacctcccgggttcaagtgattctcctgcctcagcctcccaagtagctggaattacaggcgcccgccaccatgcctggctaatttttgtatttttagtaaagactgagtttcatcatattgaccaggctggtctcgaactcctgacctcaagtgatctgcccaccttggcctcccaaagtgctgggattacaggcatga

SEQ ID NO: 96861 - DNA, 13801 bp, Homo sapiens
aaacagaaataaacccaaatacctacagccaactgatcttcgacaaagcaaacaaaaaaaataaagtggggaagcaatccccttttcaacaaacggtgctgggataattggctaaccatatgtagaagaatgaaactggatcctcatctctcaccttatacaaaaatcaactcaagatggattaaagacttaaatctaagacctgaaactataaaaatgctagaagataacattggaaaaacccttctagatactggcttaggcaaggatttcatgaccaaggactcaaaagcaaatgcactaaaaacaaagataaatagctgggacttaattgaactaaagagtgtttgcatggcaaaaggaacaatcagcagagtaaacagacaacccacagagtgggagaaaatcttcacaatctatacatctgacaaaggactaatatccagaatctacaatgaactcaaacaaatcagcaagaataaaacaatccatcaaaattgggctaaggatatgaatagacagttctcaaaagaagaaatacaaatggccaacaaacatatgaaaaaatgcttagtcttgatttctaatttgattgtgctgtggtccatgagactgtttgttatgacttcagtacttatgcatttgctgaagagtgttttacttctgataatttcatcaattttagagtatgttccatttggcgatgagatgaaagtatgttctgttgtttttgggtggagagttctttagatatctgtcaggtccatttgatccagtgctgagttcaggtcctgaatatctttgttaattttctgtctccatgatctgtctaatattgtcagtgaagagttaaaatttctcctatagcattggagtctgtctctttaaaggtctctaagaacttgctttatgaatctgagtgctcctgcgttgggtgcatatatatttagaatagttacatcttcttgttgaattgaaccctttaaaattacgtagtaccttttttctctttttaaatctttgttggtttaaagtctgtttcgtgagaaactaggattgcaaccccttcttttttctgttttttatttgcttggtagatttttctctgttcctttattttgagcctgtttgagtcattgcatgtgaggtgaatctttcgaagacagcataccgacgggttgtggttctttattgagctcgccacactgtgtcttttaattggggcatttagcccatttacatttaaagttagtattgatatgcatggatatgatcttatcatcatgatgttagctggttattttgcagactggttaatgtcgttgctttataatgtcactgttctgtgtacttaagtgtttttgtagtggctggtaatggtccttaccatatttggtacttccttcaggagctcttgtaaggcaggtctggtggtaataaattctctcagaatttgcttgtctggaaagggttttacttctcctttgcttatgacacttagtttggccaaatataaaattctgtgttggaatttctttcccttaagaatgttgaatattggtgccaatcttctggcttgtaaggttttagctgagagatctattgttagtctgatgggcttccatttttaggtgatcagacctttctctctagctgcctttaaaattttttctttcattttgacgttggcaaatctgatggttttgtgtcttggggatgatcttctagtggaatatattactggggttctctgcattttctgaatttgtatgttgaccactctagctaggttggggaatttcgtatgggtgatatcctgaaatatgttttgcagattggttccattctctccatctctttcaggtataccaattagtcatagattcagtctctttacctaatttcatatttctctgaggttgtgttcattccttttcattctttttttctctattctcatctggatgtcttgtttcagaaggccagtattcaagctctgagattctttcctccactttatgtattctgctattaatacttgtgattgcattatgaaattactgtagcgtgttttttagctctatcaggtcagttatgtcgttctctatactggctcttttgtctatcagcttctgcaatgttttctcatgatttttagcttccttgcatcgggttacaatgtactccagtaactcagtgaactttgttccaattcgtattctgacttccacttttgtcctttcagccatctcagcataagcccagtccgaacccttcctggagagatgatgaggtcatttggaggaaagaaggtactctggctttttgagttttcagtgttcttatgctgattctttttcatctttgtgggcttatctaccctcaatctttgtgattgctgaactttggaatttttttttccttttattctatttgatgaccttgagagtttgattgtggtataaggtggattcagccaacttacttcatttctggaagattttagggggccgacattcagctcccaacacctggactttgtgctctaactctgggggacttgtattgggccctgacttttttctctggctcctcaagttttggagtctactgcacagaggggactgagatgtggcagcagcagtagagtgccagcagatgcaggggtgtctgcctccctgcgggcattaatcacagtggcagagtcaaggcagttggcagaaaatggggcaggagggggtttcctgctggtgactgtgtgcactgttgcaatggaggtggtgttggcttgaagtagggtgctgtccagcaaaggtcttggtgccttctctgtgccctgcaagcaggagtgatgattcaggatgtgggaggattccctgttctctgcgcagcattagtgcaagggcagggtgctgtcaggggtaggttttgctggctctgtgtccaacaaggctccgtctgcaatgctggttgttgggggttaggggggcatactgcactcctgcgtgctggtggggcaaataaaataaatcttgttcatgcagacacgtgccagcaaagtgatgtggggggttgctgtgggcttggggaagctgcagtttgcagaggtactatgcagactggtgtgtggccataggggctgcctcactggagctctccaccagtcaggcatgaaccactggtacagaagctatgaggtggacccccaggcacacaagactgccctgtaagcagacatggccaggctggggccttgggagaggccagcagaccaaagagtgctcaggttgggccagctccatctgatgtgcatgaccaccctgcggacatcatgtctgacagttccctcagagctaaagtctgttatggaagcaagttgaacctagagggatagccatgctctactacagatgctcctgcaccaaaccctctcggctctgcatcagctggcttgctgcctttaccactttgctcctctcctggggactccacctgagagagatgtgggtcagcaattgctcagagcaatcagcccaggatggagagtctgtactgtgggcccaaagccaggggttttctgcctggtgatgagcagtaggggatgtttgggactcatgggagatggactagcctcctgtccttggggcaattgcagcttgttggagatgtggataagatacttagggtctttgcttcttcattagtctgagggtagtaaggacagttccactgcagagacagtggcagagaggctgtcagttgcccctggaggctctgtccagggagttgccaagttgctattagcttcatatctctggtggggggtggctagaggcccaggcctggaggacctgcccagtgaggaggtatgagaggacccccatgtaagagtctggccacttttccgtagagctatggtgatatactgggggtccactccattccctagtctcctgggattttccagtacctggaggtatcaccagtgaagactgcaaaatggcaaaatggcagcctgctgctccctgtgggtgctctgtcccaggaaggcacaggtgttgctggcctgaacgcacctgtaagaggtggcagaggaccccagttgggaggtctcacccggtcaggaggaacagagtttgggagctgcttaaaaaattagtctggccacatttttgtagagcagctgtgctgtgcttggggtccacttcggctcctgagacactccaaagctcaaaggctggaacagctaagtcaccaaaacagaaatgatggtggcccgaccctctctctggtagctccatcccaaggaggtctaaaacctctgtcagccaaagaccaccggtgggggtcgctgaagacccctgttgggagagtccactcggtgaggagaaatgggatcagagacctgcttaaaaagcagtctggccacatttctgtagggcagctgtgctattctggggtactgcttccaccctcagttggcttgggctctccaaagcctgaaagctagaacaactaagtcatccaaacagctcacagggagctctctgactctccctctgagtgctctgtcccagagagttttcaaatctctgctgactggagaacactgaggggggtggctaaaggccccggttgggaggctccacccagtgatgaggaatggaatcagggacacacttaaagaagcagtctggccacatttcagtagagcagttgtgctgtgctggaggattctttccatctctggtcagcttggactcaccaaagcccgaaggccataacagctaagtcatccaaacagcaaagatccgggcctaccactcaccctgggagctccatcccatggaggcacaatactgccatctgtagctgactggaattccaggcgagtgggtcttatctggtgaggtgccttggaagtggtgcccatagaccattgctgcttgaccttctggattcagcctctttcctagggatatgtatgggagtctaacctcccactttgcccttttccagagttgcagttacttttgctgggaagcctggaaagcaagagcatctaaaacttccagatctctgtgcatgcctgagcggctgctctgccaaaactccacgtagctctgggtggcagactaaaggccctggtggagtgggttcacaaagagatctcttgatctgagggttgcaaagatccgtgggagaagcatgcattcttggggacacacattcactcaccacttccctgggagcggaggttcctttggctccctgccactcccaggtgggccatcatcctgtggtgcttttctctattctccatgggtaaagttgtttatttgattaatccccatgcatgtacctggatgattccgttgaaggtgctatatttactcaccccttccactcttctctgtgagagccacacacactagctgcttttagtcggccatcttagccacctctcttgttaattgttttctggttgttttgtagatcctttgttcctttcttcctctcttgctgtctttgtttgtgattaggtgattttctctagtggtatgctttgatttcttgtcttttatttataaattttattttaatcttcatactaaatttttaaataatttatacaccacctttacagtattagactgttctgaatttgaccttgtgctgacttttaccagtgagttttacactttcacgttttagtgttgctatttagcattttcttaaaattaagcttgaagaattctctttagcatttgttgaaaaacaggtctggtggtgatgatatccttcagcttttgtttgggaaagtatttatttctcctttattactgaagaacagcttttccagagaaagcattcttgttggcagggttttttcttcatcattttgaatatatcatcccactctctcttgttctgcaaggtttctgctatgaaatccattgtgggttacctccctgtgccaaagtgagcagtagccaacacatcagggtgtgagtcttattataaaaccgagggtgatgaagaagcagaagaagaagaggaccttgaagcaagtgaatactagaaatattcaggaagtgatagtttaattttttttggttgatgcctccagggctatgtttgaatctcagagcgaaggtgagttgactccttttgacatgagcatccagtgtatccaaagtgtgtacatgagtaagatcataagcagtgatcgagatctttatgatactgagaaagacaaaaattcagtgaattttaaaaatatttacgtcttacaggagttggaaaatccaggtgcaaaacaaattctaaagcttgaccagtttaaggggcagcagggacaaaaatgtttcgaagacctgatgggccatggatctgactactcattcagtgaagttctgtgggtctgtgccaaactgtttagtgatatccagttcaagatgagtcatagaaaatcatgctgctcaccaatgaagacaaccctcatggcaatgacagtgttaaggcctgccaggccaggaccaaagccggtgatctacgagatataggcatcttccttgacttgatgcccctgaagaaacctgggggctttgacatatccttgttctacagagatatcatcagcatggcaaaggatgaggacctcatcctttgaggaatccagttcactttgaggaatccagcaatctagaagacctgttgcagaaggttcgtgccaaggagaccaggaaatgggcactcagcaggttaaagctgaagctcaacaaagacatagtgatctctgtgggcatttacagtctcgtccagaaggctctcaagcctccttcaataaaactctatcggaaaacaaatgaaccagtgaaaaccaagtcccggaaatttaatattaataccggcagtttgcttctgcctagcgataccaagcggtctcagatctatgggagtcatcagattatactggagaaagaggaaacagaagagctaaaatggtttgatgaaccagctttgatgctcatggttttcaagcccttggtaatgctgaaggagcaccattacccgaggccctccttgttcacgtaccctgaggagtcgccggtgaatgggagttcaaccctgttcagtgctctgctcattaagtgtctggagaaggtggtcatagcattgtgcagatacacaccccgcaggaacatccccccttatttggtggctttggtgtcacaggaagaggagttggatgaccagaaaattcaggtgactactccaggtttccagctggtctttttaccctttgctgatgataaaaggaaggtgccctttactgaaaaagtcatggcaactccagagcaggtggacaacatgaaggctatcattcagaagctctgcttcacatacagaagtgacagctttgagaaccccgtgctgcagcagcacttcgggaacctggagcccttgatcttgtatttgatggaggaacaagcagtggaccttatattacccaaggttgaagaaatgaataaaagactgggctccatggtgaatgagtttaaggaacttgtctactcaccagattataatcctgaagggaaaattaccaagagaaaatgcaataatgaaggttccagaagcaaaaggcccaagcggagtattcagaagaggagctgaagacccacatcagcaagggcacattgggaaagttcactgtgccaatgatgaaagaggcctgcctggagtactggctgaagaagcaggagctgctagaagccctcaccaagcacttccaggactgaccagaggccgcgcctctggctgcccttccacactgtggccaggctgcctggccttgttctcagccagttaaaacatgtttctcctgagctaggaagagtctgcccaacagaagtcgagggactttacgtttatgaggctttctgttgtcatggtgatggtgtagccctcccactttgctgttccttactctatcgtctgaataaagagccccaactttgtactattaaaaaaaaaaataaaaaaaataatgaaaacaacattgctagctttattggaatttcctcatacatatgtttcttgtgctgtttctagaatcctttctttgtctttgatattcgatagtttgattctgtttttttcttggtgttttcttgtttggtttgaatataattggaaacttgaccttctcgtacctggatatttacatctttctacagatttggaaagttttctactattacttctttaaatacattttctggcccgttgtctctctcttctttttattttagtcctataatctgaacatttgctcttgatgttgtaagtctcataagctttcctcatttgtttttatcctttttttctcctctgattatgtatcttcaaataacctgtgttcaggttcacagattttttcttttgcttgaacagttctgctgttgacactctatcacacttttcattttgttctttttatttctggcttcagaatttgtttgatttttaaaataatttcaatctctctgttgaattgtaattttgatcatttattgttttcctgttttgttgaattgttcctctgtattttcttgaagttcactgagcttccttaaaacaattattttgatcttgttttcaggcagtttatacatcttcatttcattagggttggctattggcactttattttgttcatttggtaatatagtttccctgactttttctgatccctgtggtcctgcactggtatctgaacatttaaaaaatttggaacgttttcagtctttacagatggacatcatctgggaaagtcattcaccaatcagtgcatccagagattctgggaaggctgtatggtagggtctgtggatgggctgactgttgaagtacttggactgtctgggctgatacccgagtcagcaggcgggcagttattgtgcctgaatccacaggattggacctggagcctgaattctctgggttggtccagttgattgagtccatggtgggtgatcctggagcctgggtccatgagggcatgcctgaaacctgggttcagtgagatgggtctgaagttggagtttacagggataggccttggtcctgggcccatagggggcttgtctgtaacctggatcagcatgtggttgagacttctgcctgattctgagggagctggcctgaagcctgagtctacaggggctggtcttttgctggggcaagcctcgagcttgagtccatggcagcaggcctgggccctgggtccatggggtggtctggagcctagttttgcagtggtggcctggagtcaatctgtggaggctggcttggcacaaaggtcgacttggaatgagcctggatcctggattcactggagcctgggaccaccaggactagctgagggtctggggcctgcctggtgcttgggaagtcatggggcctgggtttgtgggggcttgtctggatcctggcatcattggtggtgatccagttcccagaatcatgaggactggcctggatcctgaagctgtggagactggcctgggaccttgttatgtgagatctggcctggaggctgtgtgtggttgctggcctagaacctcagcccacagggagcgtgctagaacccggacctatggggactaccctagagacttggtatgactgtggtggcctggaggttagatctgcaagggctgacctggatccttgggatgctggggccaaactggaacctgagtccacaggggtggttttggagcttggtttttgaaggctggcctagcactgcaatttattggaatgagcttgcaccttgggtcggctgaagcatggggacacaggagatggcctgaagagtggtgttgcagggactggcttggctctaggcaagcctagagcctctgtctgcaggtgttggcctgatgtctgaggtcaggggtgcttacgtggtgctggggtgggtctgaagctcaaagctgtgtattccaacctgactctgggctggtctggagcctgtggctgcaggggctagcctggttctgggtgggcctagagcctgtatacaaaggaactgacccggaggctaaattcacaggtgccagcctgatatctagggctgtgggggccttccatgatgctgggatagatataaactctgaaatcacaggggctggctgagtgctggggctggtctgaagccgggggctgctaaggttggcctggtagtggggcaggcctagaagttcagctcatggatactggactagagtctggggccatgaggtcctggcactgggttttactgtggtgagtcttgtgttagaatctgaggcaaagtccaatgctcacttccttctttcaagaggagggtgtctctagccatgatgtgctgcctggggttggggaagaggttataatgataatgaaaactgttgttcctattatcttgaatatgtttttcttatttctttgctgttcccagatgctgtaatctctcacctggtttccttagctcttcggaagttatttttgcatatgtgtggttgtttacactgatggttttgtggggagacaagagatcgaatgtcctttttggccatcttgccaacatctgcttccagattcatttctaaactttagaattaacaaatgcaatattctttttttcctcagagtcaaggaatgaatcataaaagactatttacaccgtctctcttgtgcatgctctcattcttcgctctgcttgactccctggctaaagtggaagatattataatcccatctttttgcttgatgtgtgctctattttcacatctgatgttggttgatgtaattggagaagaagagctgtgtgatgatttaaagtgttgatgacttgattgaaccattcttaagtaaggggaaaaaaaagagaaaaacagacacagggcactcctgaagaaaataatcattataaaggcttgcaaatttgggaattttagttttgtggttcaactcacaagtttggccatctcaccctcaagaatgagagctaacatctcttaaccacccacaagttaatgctgagaattctctcatgtaattcctgaatagctttcaaatctgttgggttttgaaaggtataattaaaacttattattctccttttctttgtgtaccagctgtcagaagaaagaaaacaagattttttttttatttaaccagtgaaagtatttgctagatttaaagacagttttttcctttatatattaagaaaaatgttcatagctctttaaataaagggatgattgatttacagctagataaaattttaaacgtttaagctgagaaaagtcaatgagaagattttcaatgatatcattttctaaaaatggctttttatgaattagcaaagcttgaaattggggtgaaaacctgtgaggtagttctcacccctttgccatcaggcctaatatatacctatgttagcatatcattattaccacttcatgtcctttttacttctccacattgtaaaactcttcttttggaatttttgattttttttcccactgattgtgagaagttagaggttttgaaatgattcagtcttactgattgatattttatttttaaatttctcctaccaaaatgacaggtttagtttccctttagaaaatgactgtcttataaacattatacatttaaaatgttgcttaattaaccaacatttattgagtatcagataattttaaaagtttcttacttgggtggggatgagtcatggataacctctgctagggcaatgcagaagggaaatgtggggttggagaccccacactgagtccctactggggcactacctagtggagctgtgagaagaggccaccatcctccagacgctagaatgatagatccgccaacagcttgcactgtgcacctggaaatgtcgcagacaatgtcaacccatgaaagcagccaggagggaggttgtacccaacaatgccacaggggcggagctgcccaaaaccatgggaacccacctcttgcatcagtgtgacctggatgtgagacatggagtcaaaagagatcattttggagctttaagatttgactgccgcactggattttggacttgcgtggggcctgtaacccctttgttttgaccaatttctccaatttggaatggctgtatttacccaatgcctgtaccacgttgtatttaggaagtaactaacttgcttttgattttgcaggctcataggcagaagggaattgccttgtgtcagaggaaactttggactgtgaacttttgagttaatgctgaaataagaatttggcggactgttgggaagacatgattgttttgaaatatgaaggcatgagatttggcaggggagcaggggcgaaatgatatggtttggttgtgtcctcaaccaaatctcatgtttaatttccatgtgttgtgggaggaacaccatgggaggtaactcaatcacaggagcaggtctttcccatgctgttcttgtgagagtgaatatgtctcacaagatctgatggttttaaaaaggggagtttccctgcacaagttctcttctcatgtctgccaccatgtgagacatgsctttcaccttctgccatgattgtgaggactccccagccatgtggaactgtaagtaagtccataaaccactttcttttgtaaatttcctggtctcagatatgtctttatcagcagcacgaaaacagactgatacaggcttgatgcctaccaatgccatatattaatgcatgctctaatatttactcttcttattaccctaccttttccccttttccccttgcccttgctgtcctgaagttgtatattccaatactattagtagcatagaactattgcctcagactttactttctgggaacccaggctacgaaagggtattcaaataaaaacaatcagacctaatttttctaaaagtgcagcaatcttacacagacttctaattttcctgtaaattagatgaacatctgtggtggtaatcaaggttgttcataactattccagaccttatcattctcagcacatggtaggattgcacttttcagtccccttgaagttaagcatggccatgtgactgtttgtagctaatgaaatgtgagcagaaccaaccggtatcttttcaaggcaaacactttaatagccagtacgtaatcttcacatttccttccctctgttacactgatgaaacagagtctctgtcggggtgggttcctgaatgactccaaaaagcagagccttcttctgacctgtgttgtacacgaagcatgagcaaaaaataaaacctttattgtctgtcttaggccacagagctttgaggtttattattcccctcactgttcttgtttactgatgatatagtatcttcctttcccaaactagaggagaccatacatcagatatagaaatttgataccttattttctatggctctatctgtttaaaaacactgctattgtgattcatggtgaattcttttcaccagctttggaaattactagaataagctactcaaaccatttccatggatgtctcaaacaaagaatactggaatattgctggcatcaatgaatattttctcaatcactctgaaataggcttctaaattactctgtattcctccacaaattattgacattaaagcctccattaaaagtaaaacccaaaattagattgttttggggcatgtcttgattttcaatgcaagaaaatttacatgataaaagcacatgt

SEQ ID NO: 96862 - DNA, 96542 bp, Homo sapiens
tcccagctactggggaggctgaggcaggagaatggcgtgaacccgggaggcagagcttgcagtgagccaagatcacgccactgcactccagccagggtgacagagtgagactccgtctcaaaaaaaaaaagtttacaaacctcaccctaaagaattcttgccttcaggtgtaactgtcttctttgtttgtttgacagaaaccatactcaggaggtctttgtctccaagaaacagcccgggaaggcagcagcatctctccaccatggttcatggcctgtagccccccacccctctctgcttcctgcagccccactgggggttcctcccaggtgctgagtgaaagcgaagaggaggaggagggggctgtgcggtggggtcggcaggcgctgagcaagcggacactgtgccagcgggactttggggacctggacttgaatttgattgaggaaaactaaaactgagaggctacttcctggggccacacagactgactctctcatggctactaacaagtgtcgagtccccaaggctgggggccgagcctgggaatgggggtgagtggagggctccgactcagggcagctggaaatcttctcgctccagcaagctcgaccatgccaagagactggccgggacaagataaacggagctggtggcgggagggacagccccagagcagacccttcctatggcggccctgagtgtgagtatccctgccaccaagagagcaatgggcagggaaggaaggggtctgccgaccccagctcggggaatttcactagcccctttgcttcaaagggcacttgtgtcttagaatttggccagggtggggggttgagtcagcctcctcagagaaactgcgtgagagtgtgtgcgtgcatgggagtgtacttgtggaaaggtgtgtttgcgtagccttagggaaggaaggcaattgctccttaacagcagagtatcatgatacccccaggatcttgagttttttacaggatgttgggtttgctcaaggagtcaagaggagggcaccaagttttccttttttctaaatagctctggaaccaggcttgtaatccatagcatcaccgactctgcaaaggatttcattttggggtacagcagggtgttttaagtgctgtgacttcagctaatgatcttttcttcagccccaccccctccccactagctcgatctagtatattggggaatgcaggtggggggtgtcaccatattttttctgagctggcctttttttctcatcagattgtccaggctatattccacctgcctcttttgccctcttgagtagagttgcacacagcacatgggcaactgaagcagggttgaggggctctatctctctctctcctctgctgatgggacccttttcccctcaccctctgcccttctaagtcatagactaggtaggaaggccctatattggtccccagcatctactgaggcagacctgcaacagaagtggcattcagtccccagcagacatgggtgagctcaccccagcactgctgttgggaaggtgactgcaggaaaccaattcttacaagatccaggcccagcctttttgacctgcttgagagggaagaaggggtgtttagcatttaatagtttgcttgtcttccactcctgccaggaagtgtttatttgcctctaattgggcctgagagaccatagggaggttggggctcactgagggattggctgaggatgtataaagcaaaggctgtgagaagcagttgggagtttggttgtcattggattgaatttacttttttgtttctcacccgcaacttgagccaggacagctggtccaagtggccacagtgatgggtttaagtaccttggtagggctggcaccagtggaaacacatactgaagctgccaccacaatagcttgtgaggttttatccagctttggttagaccctgcatgaccaaatttgacctgcccttgtttatggcaagaagggcatttttctcttcaatttccagggtttcctaggacccagttcctcatgtaagggaggaagaccaaggtctttgtgttttcttcctcatggaattgaacctgacattttctggatctcctgcatgtcaggagcatcagtgaggcttcagcctcctcgtctccactccagagaggaggtggctatgtcttcttaagcctctggccctcagaggctcctccctatctcctggctagttaccactaggctaccaggtctctaggggcctgagagaggccctctagagaatccagggaaactgtgagcccaggagttgcccatctatggtttcattcctcccctggctcttctccctcttcaggccataatttccctggtgccaatttcttttcctcctggggcatcctcatcccagggctctctgctgtagattggctgtgccagcttccaacaggttactggcaatgccagtgagtttctgtaggccctaagctgaagaagtgaggcagtgattctgcctccatcctggtttccccaaagccccagggcaccatccttaggggagaaggtctacagttatcattattttaattccattactttcagtctggaaaactaagctagtcagaactgtcatcttgcttcccaatctaagaacctgtggccctggaacacttttcaagaattggttcattttgctttacacagtagatctgttccaacagttctgtgtaaaccaaatgctatttttcaatgcatttggactgctgaccatttaaaagcagcctatgattgcttctttttgtaaagcaagcaacctccctccactttagctgttttgactatttgaattttcacatattgggcttacccagagtggagcacacctccagggcatgtggctgacactgggtcaatgtctgcatctgtgctgtgtgtgtagtgtggttggccagtaggtgagtatccctgtgtgtgtgagtgaagccactccccaggctggtgctctcctcctgtgcccagtgactgcccagtggcagctcagctgcccttcactcccacctgctgccaaagtccctgtgctaatgggattacaaatacaaaaagtggaaaaaaattttcgtaaactttgttttatattaaaagaaaaatccataagtctgtgtgtgttaaacatgaggttctgcctctgtggctgtgtttgaaaaaataaagttttattagaataatccattttcccaagcaaccttgtgtactacagtgtcttcttcccttccccacaaagacaaggaagaagcagggtagaaggccacctaactgttccagccccttcatctaagatgtgggtcaacctttcaaaaaggggcagtatttggaccctaggccctttgccggccatggcaggatgttatactgtggcccaggcttctgctaaggccttggttatttttggcagtctggtttggtctctctttccctggcagttatacttgtctcctcctgcctgctgtcactctcacttccagcaagttgaagtcaagtatgaatgcattccagctccctgagaaatggtttatggtacagtcaggaacttgtctagattggtttgtaggctttgggaagtagggagaaggcagggtgggagacagccagggatctttcttaagttttcacatgttacatcctggagagatagaggtttagtcatcagaattcagattccatagacctaggcaatttttccatcctaaaaatactgcttttggaaaataatcctagctgcaaagcttctcttttgttgtagaagacagtattttccctaatgtttcctttgggagtgttggtttgccaaaagaagctatgtggctcactctttagacctttctgttccaccctttcttctctctatgttgacattcttccaatgtgtgtgggtgaagtgtagttgcttagagatccaggcaggagcctctgtctctaaggcttagcctttctttaccagttgtggtgctaatttgccaggcagcaagaagagtcaagttgcttagcttatgtcctggtttcctgcttcaaattggtggcactcatcattgaataccaatgaagtgtgtgcaggacaggactgacttgactacctggagcaggaatctttgcaggggtgcacatacaccctagaaaaagtgagggttgtcacctgccctggaaacaaaggaagggctttggggaagtggtgggcagtggcatgtggttaaagaagcttagaattacagggttttttttctttaaaactgatgtttcatttcacctactgcttgagcaggggtaaagtttgaacatctaaaatgactttgtttccccctttttttcttttgagtttatttttgttggatttttctgctattttctgtgaggccaagtgtgattttatttttcattcctgaagtcttgttaatataggaaagaacgtaaactccatgagggcaagagttttgttttattcaatattgtgtccccaacactttgggaagttcctggcacatgaaaagtgctggtcacatttgttgaatgcatttcccttttgcctttcccatccgtgaacttaggtacatttctgtctctctgctgtgagaaactagccttggacattggggcagtagttaaatctctgtatgggagaaaatcccagcagataattttgatagaaaaattgcaaggcagatagatcttgtatggattcacccttgttcccctcctaccaactacagcttatgggccatgtgctttaagaggtggctctcagcccagaaaaacattctgagtcaggcctcaggttggctgtgggagatggaagttaaaaagaagtggagggaggaatgtttccttggtgctccacagggttggttctagaatgattttcctatatgttttatactttagtaaaagtataaagtcaatagttggttacccctctccccaagcctttgttacaagaaaagtaggtcaagggtgtagacaaggttatggacaggagatagctggggtaggcacagaagccttggagaaagaaccagctaccactatttcctgtctgtagggaaaatcaaaaagtcacttttagaacaacagtcatgggttattactataccctttatcttttgtatccattttgtgtatactcagtctctgcatccatgagaccatggaatgtgctagtccctgatattgccagctttaaatgattgaggcaatttcctgttgcttattgtgggtaacaatctagccaaaaatctcagcatctcactttctctgcaggctccttttctaatcaggagctatcagtctcccacacctgtattaaatgcattcagataagagttacagaattttctttgcccccagccccactaattccatggtaagatggagtgctactaagagaacccctttactgttggtctatttccagttcccctaagagttgaatggagaaacacgtagacttaataacattggcagactaggaaggggaagaagttaggtcggttttaggaaaaacaccaagatgttggggggcacgttggccttcagtcagtggaaagagtggcattatacatccaatggaagtaatacattggccaattggaaaggaacctaagaagtgctggcagtatagaatgggatggtgctgttatgggccattgagaaggaagacattgtgtctcatggaccaatggggagaacatttcctacaagacagcaggtaggagctcatattttcaggataggaaatcaatgggggtattggagacactaaatagctcaaaacatccactctctaggtaccttgcccctcacccccttaccccgtaaatgtctttggtatccgaggagagcaagctaaagccctctcatatatacgactccctgaaggaagattgagaccagggatgatgccatggggaagctgaaggacccgcccacttccctaccccggccggacctgcaattcccctccagaccgcagggggcactgcaggccccggggagattggggcggagcgctgcgaggggccaggagctgtcgccccgctccagagcgcggggggcgctgtgcggggcccaggctgcggctccgctcccggccacggggggcgctgcgctgcgccggtggttggtggtggctgttggggggggtgggggggaacggcggccgcgggtggtgcggagggaggccttgcgggcggatcgggcgcttggcggcggaggtggtgggaggcggcgggcgggagcgcgggtcaggccggccccggcgatggcggacgcggcggcctccccggtgggcaagcggctgctgctgctgttcgcggacactgcggcctcagcctcggcctcggctcccgcggcggcagcggcgagcggagatccggggcctgcgctgcgcactcgagcctggcgggccggcacggtgcgggccatgagcggggcggtgccccaggacctagcggtgagtggcggccgagtcgggcactcgaggccggggctgcggggcctgcgggcggcctccccgggggcctttgtgagggggcggtgggatgggggtgacccatttccgtgcccccgggtctccttagcgccccccgccggcacctccgcaccccgagcgcttgccggcatggcttccgcgtcggggtgtgcgccccggtttcccccggggggcggccagggcgtccggagctgctgcttgcagccagcaggccccgcctcctgggcgacccttttctcggcgttccccccaacacgccttcggagcaggctctcgaatcttgagctcccgggagcctcagagttcggccagtgttgccgctgccctctcgaagacgcggacctgtggtccccagcctctcccaggagacctgcgccctgttccttttctcccagagccccaagtggggcgggaatgtgggcagttatgggaggcacggaggctgcagttggagctggtcggggcttttttatctggcagttacttcctcatctgarctgggctcggcctggcggtctccagaaaggccagctctcggcactgtctcgagctctcctctcctttccttaacgcttctgggtgacaggagctgcagttgtggctgtttttgttaagtttgagatctttcttagtggccgaacggggctgctgggtagtgctttttgctcccagctcagctactcccccaaccttgggagaggttttgttttgaaactttgtgtttgggcttggccctttttgaatgccttggtgtgttttgtgattaaagttgttcagtcatacaacttaactagcattcgggatcatgatgtgttattctcgttaatgtggcggtaaaatatagtgtttgagttttggcaagccactttatttcctcattttgataggggccctagcttctctggtgagataaggctatgaaaaatggtgtgtgtgcgtgttggggcagggggtggtcttttggaatgtaatagatcagcaagcagaaagtaaattttcttgatgaacttgcttttgcagatataaacgggaacgcagtttgtgagatttggaagtaatgttgtaggcttccgatgttcatttttcttcctattgatcaacggtgttagactgtcctttttcactaatatacaagctttatggattttttttgtggatggcttaggctttgcttctgctacttgggttcatttgctttgatttttcttcatgctgtataagaaacgttactaggacatttataaggcctcagtggggcaaatttgcaaaaagatactaaaaatttaaggggatggaatgatgattaagactgggatttggatctctattcctctgcgctttctttaaaagatggctgggatgggaaaagaagtgtccatttcagattcattctaccaccttggaggcaaaacatacttaagatccactattatatgcatactttgaccgaaggcctactttgccctagctattcattgggatttttttctggttcttgcagtggtcgtctcgtttcctccatcagatgaattgctaatgagctctgcacctgaaatggctccccattcactttgtcgtttgctgtgctccctaagggcagaggattttggagctcacttccttgctggacacccactaagctaaatactgaataattttaccactgatcccacggaactgggttctcaaaccaagtaaaaagttgcagtgattcttggaaattaaagcaaagaacattacagctgtgttgaggtcttgcatagggctgtgtgaatgtagaagcaaaggcaggtttgtattttgagaatacatttatgcttgtcttacatgtatatccagggacatagatgagaaaacagccagaccaaaactcagagcctttagattttttcaccagcttgcaaaattgttcaagaattggtattttgttgaggttctattaatgacaatgaccagtgtaggatgagaatgggccgttttctttttttctcattaagagagatttcctttggaccgtaggcatgtggacctttccaatttgcaccacacacggtagtaaacacaactgtcttccaatcaaaagtgttcttcccgtactcaagggtggagtttgcaagcagctggcctgtgattgggcagattttcattcagttatgtttamgatgttttcaggcatgcttggttttgagtaatgcctagcagggcgcccccttttaaggatgagtaattgagggttggatgaatgagtttctgaagtgattgaaaacacacttcttaattttagattccacgaatacatctctttctaaatactttttgattcagatatcctataaaatacagtactgatccattaaatgaaaccttttttggaaaacagtaacaaagccaagtgctaccttaaggtgagatgtgaaaaaaaggagtcaggatcctgttgattgagagttttgttgataaggttctcataggtggacatcttcaccagcagaagccatgctgacaaattactcagatgtttagccaaggcatgaaaacagcttttcccccactttctagtggaatagtaattttatttgtgttttaaaatgggccttttatttttttagaattagtttatgggttgtatgcatttatctctggcttttctttcctaatctggtgtcctctttgtgttcctaaatcattattggctcatgtaagttgcagagaccttgggaccgtcacgtatatgggtattgtagataaaacagaccaaaaaaagaaacccatggattttcctttttttggttataaaagcaaagcttgtaatttgcaaaatgtcaaacaaaggtttacacaagaaaaaccagcaatctctttgctcatctttcttaatgctagtacaaaaaacatgaaaacattcaaccgtatacaaagagttccctctttttttagcaaatggtgtcctactgcacaatatttgcaccctgccttttttttctttcatttgacagtataccatggggatcaatacttacagattttactcatcgtttttggtaactaccttatattccatagaatggatgtaccataatttattcagttattcctcctgttaatggacattcaggttatctaaagtttttttggcagtatagacaatgctgtcattaatatacttgtatacatatttttatgtaatccaggttttatttctgtagtttagcaatccagggttgaaatggttcggttaagaagtatatgtattttttattttattacataatgccaggttattttccagtaggtgtatagcatttcctactcccaccaacagtactcagggtgcttgtttctctttacccttgccttcactggtatcatcagtctttctcatttttgccaatctgatgggtgaaaaacaatatccataattttcatgactatttgtcctttttttccatgtgtactggctttttcatttcttttatttgttacttatggatatcttttgctcatttgagaaaaataggagttgtcttaccactctctgcaagttctgtgcatggatattaactccttcacctgcgtagtgggttgtattttgtttcacttgtctcttgacttttttttttttttttttttttttgagacacagtctcgctgtgtcacccaggctggagtgcagtggctccatctcagctcactgcaacctctgcctcccgggttcaagcgattctcctgcctcagcctcccgagtagttgggactacaggcgtgtgccaccacgcccaggtaattttttgtatttttagtagagatggggtttcaccatattggccaggatggtctcgatctcctgacctcgtgatctgtgcccaccgcgacctcccaaagtgctgggattacaggcgtgagccaccgggcctggcctcttgactttttttatgggttgctttgctatacagaaaaataagaattttatgttatcagaattatcgggcctctttttgtttgttttgtttttgagacagagtcttgctctgtctcccgggctggagtgcaggggcataattacagctcactgctgggctcaagcaatcctcccagggactacaggcrtgcgccaccgggcctggctagtttttgtatttgttgtagagatggggtttcgccatgttgcccaggctggtctggaactcctgggctcaagcagttgcctgcctcagcctcccaaagtgctgagattccaaacatgagccactgtgcctggcctgacttttcttaatagtttaggattacttgactgggaaggaatccccatcttgaacctatataaatatactttaaaaaacattttttttttttttgagacagggtctcactctgtcacccaagctggagtgcaatgacacagtcacaacacactgcagcttcgacctccctgggctcaggtgatccttccgcctcagcctcccaagtagctggaaccacagatgcacactaccacgtctggcaaatgtttgtattttgtatagagataggttttgccatgttgcccaggcaggtcttgaactccagtcaagcaatctgcctgacttggcctcccaaagtgttgggattacaggcgtgagccaccatgcccagccaacatttttgtttatttttacctttagatttttggtacatctggaatttatttttttatttttatttatttattttttttgagacggagtctcactcttgcccaggctggagtgcagtggcgcgatattggctcactgcaacctctgcttcctaggttcaaccaattcttctgcctcagcctcccaagtagctgggactacaggcatgcatgagattaggtttcgccatgttggccaggctggtctggaactcctgacctcaggtgatccacccacctcggcctcccaaagtgctgggattacaggtgtgagccaccgtgcctggcatggaattatttatttatttatttatttagagacagagtttcactcttgtcgcccaggctggagtgtaatggtgtgatctcggctcactgcaacctctgcctcctgggttcaagcgattctcctgcctcagcctcgcaagtagttgggattacaggcgtccaccaccatgtaattttagtagagatggggtttcaccatgttggccaggctgatctcgaactcctgaccttaggtratctgcctgcctcggccttccaagtgctgggattacaggcctgaaccaccgcgctcggcgggaattttttttctttctttctttyttttttttttttttttgagacggagtcttgttctgttgcccaggctggagtgcagtggcgcgatctcagctcactgcaacctctctctcccrgattcaagtgattctcctgcctccagtcccagtagctgagattacaggcgtgcaccaccacacccagctaatttttttttatttattagtagagacggggtttcgccatgttggccaggctggtcttgaacccctgacttcaggtgatccacccgccttggcctcccaaactgctgggattacagtcatgagccaccgcacccagcctttttttttttgagtggttttatctgtcatccaggctggagtacagtggtgcagtcatagctcactgcagcctcaaattcctgggctcagttggtcctcctgcctcagcttcctgattagctgggactacaggtgcacaacatgattctcagctttttatttatttatttatttatttttatttttatttttttattattattatactttaagttttagggtatatgtgcacaatgtgcaggttagttacacgtgtatacatgtgccatgctggtgtgctgcacccattaactcgtcatttagcattaggtatatctcctaaagctatccctcccccctccccctaccccacaacagtcttcagagtgtgatgttccccttcctgtgtccatgtgttctcattgttcaattcccacctatgagtgagaatatgcggtgtttgtttttttgttcttgcgatagtttactgagaatgatgatttccaatttcatccatgtccctacaaaggacatgaactcatcattttttatggctgcatagtattccatggtgtatttatttattttttttttttagacacagtcttactgtgtcagccaggctggagtgcagtggtgcggtcttggctcactgcaacctccacctccagagttcaagtgattctcctggcttagtctcctgcgtagttgtgattacaggcgtgtgccaccatgcccggctaatgtttgtatttttagtagagacagggtttcgccatgttgtccaggctggtcttgaactcctgacctcagctgatctgcctatctcagcctcccaaagtgctgggattacaggtgtgagccaccgtgccccccccacctttttttttttttttttttttttaagagattgggtctcacarttttgcccaggctggtttcaaacccctggccttaagtgatccactcagctcggcctcccaaagtgcttggattacaggcatgagccactgcacttggcctggaatatttttgtaattggcaagtgagatgagggacctaatttgttttctgctgagtgaccagttgtggcaacactaatttttttaggtaaaccattcttttctttctgtaggtgtaattaaatgatgctgtacatgtagtatcacttggttttgaatgtgtatcatagttatctcatgtatccagaagttaccagagaagtgaaagcatatccgccctatttttttttatcccttaatctttcatctctctttcaaggaaagacggattctaaaatactcctttcctttgattagagataatgtaataattgtagcaatgtctaggctagtactatgtttcttctatctgagagtcttccaggaggagtgaaagtgtatctgccttctgtttttacacctccccaccgaacctttcctctgtctcagggtggggtaggtagactctaaaatacctctctattttgtttctaaataatgtaataattatagtcaggttcaggatagtactatatttaccgtatttccagtgtacaattcgctacctatggtcaaacatagaatttcagccctagttgaaatgggagtttgtggttttaaaaatgtttgtgtcctttcattacttacaattccaaaagttgaaactctgagtgataccttgatacttatgctctatttattaatgtaaatagaatatgtttttgtgattctgtgtatggttagagaactttaaataaaaatgacattgtactttttgacattaagactatatactgtttaattgtgagcccgtctaagcacactcatcatcttaactctccccttacagcatcaggtctgtttttgaaacactgagccatggttgagtttttcagacactcaagcactttgtatagttgattttttaaaaaaagattgtgtgtgtgtgtgtgtgtgtgtgtgtgtgaattttaatagttctatttctttttttttttttttttgagacggagtctcactttcacccaggctggagtgcagtggcacaktgtcggcttgctgcaacctccacctcccgggttcaagtgattctcctgcctcagcctcttgagtagctgggattacaggcaagtaactcggattacaggtgcctgccaccacacctggctaatttttgtagttttaatagagacagggttttaccatgttggccaggctggtctcgaactcctgaccgcaagtgatctgtctgccttggcctcccaaagtgctgggattacaggcgtgagccaccacgcccggccattaatttccatttgtttctaagggacttgcttcactaactccccacctgccaagggttcattcccttttttttaaatacacagcttcctgggtctcttctccaacttgtagtttatttatttagttccccttccaccagcagactcaaaatggtgggtaagaaacatggcattttccattgtgattttctttgcaacagctggggtgggttctatataggctttgcttccacaaggcctgggggatgcaacacctgttgatgcttctcagttttccactgcctttgacaggttggtggtttttaagccctttccactgtaccatccctactgcccctggtgcgaaagcatcatcttttgctcttgatctctaggtgggtaaaacctgcctgattagtagtgattcagatagtgtgacctccttcagttttctaagggctgaaactccttttttttttttccttttttcatgacttcagaggtaatcaggctctaggggactgattctctctaaccaaactctggagactgaattgtaaatccacatgcaaggttattaatttacagtgggaggtatacctatccagagatctgcatagagccccttcctgctctgctctagagaccaaattactataagaagggtccttgatgtgcaaagaattggacaagggaaattgggtgttgccaaaaggctgtttaaagcaagcagccttgattttggtgatccttcacttttctagtattttctggcttccgttgctttgttccttctttaaacttttcttttaatgctgtcatccattgaaatcctatacagagaaaagaaagcctgctcatccttcaggcccatgcatcctaggagctacaaaccctataaagcctttctgattccccagcatgttgtttttattctttgttcctttagcactttgtggataccactttttggaatatttattgtagtttttcttgttatagatatgtgtagcaagatgtatagcttgtgaagaagttcaggaaacgccaccccaaaatatgctgcattggatctcaaactgaaggcacttggggagcagcagatggagggctgtctctgaacttacttcatctacctaaagacacatcctccaaaaggaactctaggccgggcgctgtggctcacgcctgtaatcccagcactttgggaggctgaggtgggcggatcacttgaggccaggagttcgagaccagtctggccgacatgacaaaaccctgtctctactaaaaaatacaaaaattagccgggcatggtggcgcacgtaatccctgctactcgggaggctgaggcacaagaatggcttgaacctgggaggcagaggttgcagtgagccaagattgcaccactgtactccagcctgaaaaaaaaaacaaaagaaggaactctattgtcatgaatcccttccctgctaaccttatgaaccagggaagattaattcctatcacaggagatgagactggaggtctatatcacatgcagaaagacagccttagctgtcacctgttcttctgagggcccattgatttttttttcccaaaaatcattaagtcgggtgcagtggtgtgcacctatagggaggatcacttgagcccaggatatatatatacatatatgtgtatacacacacacacacacacacacacacacacacacaaaatatcttaagtgaatagtgtaygtggtttactctcccctaagttgcctataagaaatatagaaatataattatttctatggttttgttatataattatttctataattttattatataatttttctataattttatagtataattatataattatttcttttttatatactttaaattttagggtacatgtgcacaacgtgcaggtttgttacatatgtatacatgtgccatgttggtgtgctgcacccattaactcatttacattaggtatatctcctaatgctatccctcccctctccccccaataattatttctataattttatatgataattatataattatataaaacatatttctataatttctatagaaatataagaaaacttctcagtctcactgggttctgggtatttacttttccttgttgtgatgccccttacatgtaacaaatttgtattatttttctttccttaaactgctgactgtttatttcaatcacctaaccctcagaaggtagagggaaagtcttccatcctccacacttgcttatctattctactagatagtaaattcatggaggtcaggaaacacggatttttctgttttttctcttctattccctgaccactctgtctaaaaaaagtagaacattttgaagcccctattaggctgatgttcacttccgatttattacggaatttctactccgtggccccgttgtctttataatctttaaattttttcttttacatgtttttattgatacggactcactgttaattttttcatcttgatattggagtcacatttgggactccaatccaaggtacactggcccttagttttgtgatttgcatctgggttgttttcttagatttgaagcatttggtgttttctttctctgattctaaagtaatacatgcctattatacaaagtgtagaaattattctaataatttttttttcttttttgagacggagtctcgctctgtctctcagtctggagtgcagtggtgtgatctcggctcactgcatcctccgcatcccaggttcaagtgattctcctgcctcagcctcctgagtagctgggattacaggctcccgccaccacacccggataattttttgtatttttagtagagacggggtttcaccttgttagccaggatggcctcgatctcctgacctggtgatccgcctgctttggcctcccaaagtgctgggattacaggcgtgagccattgcgcctggcctcatactgcatttttaattttgagttttgctttttcatttaatgtggcagttattctrtttagtttttctttttttttttttttcragatggagtctcactcactctgtcgcctaggctagagtgcagtggcacgatctgtgctcactgcaacctccgcctcccgacttcaagtcattctccttcctcagcctcccaagtagctgggattacaggtgccacgccaccatgcctggctaatttttgtatttttagtaaagatggtgttttgccacgttgaccaggttgttctcaaactcctgaccataagtgatctgcctgcctcagtctcccagagtgctgggattacaggttgtaagccagcgcacccagcctgttattttccttttttactaaaaattattcattttatgggtgattttaattttcttggtgcttttctctattttccacaggtaattcatgtgttgcttttataacgcaaaagataataataaatgctgtgcaaggaatttgaatgtaatcttatgaacgtaattttttttggctgagtaatttaactcttctcttttcgttggctattaaagttgtttcagattttaggcttcatctataatgccatggtgagcatttttgtgaataaaaccttttcagtgtttagggttatttattaggattatggtccagagtggtatgatagacactgagtatgtacatatttaagattcttgatatatagcaattaaaaaaaaaaaagtcatgccagtttttactctgacctgagtttgcttatggaataagcatttatctggagcccatattctgctacgcatttaaagtctttatttcatataatcctaaggcaatcctttgaggtctttattgtccctatttataggcaaaggaagtgaggctcaaagaggctgaagtgacttgctccaggctacacagttaagaaatgggagaggtgggatgcaaatccatatctatcattctgcaacccctgaaagcactatatgtgctggagtttttattcaggttatttcctttgttccatgtacttcacatttaatttattcaggatgttagaaagtagaaaactttggggataattggtagaaagctatctcttgagaatcaaagaaactgtaaagagaaaattattttttatttgaaaacagagatattcaactcatgcatcttcgcccaccttgacaagatatcccacagttgtgtaacattatttttaacagagtttacattttgtttggagtataggtaggaaaattggaaaatttaggagccttggaaagttatctttgatttcctttaccatctcacaatcatcaccatatcctgttatttttatctctaatttctcaaatatactttacattcatacaggattcttttttttctttctttctttttatgagacaaagtttcgctcttgtctcccagcctggagtacgatggggtgatcactcactgcaacctctgcctccggggttcaagcgattctcctgcctcagcctcttgagtagctgggattatgggtgcctgccaccacgcctggctaatttttgtatttttagtagagatggggtttcaccctgttggccaggctggtctcaaactcctgacctcaggtgatctgcctgcctcggcctcccagagtgctgggattacggtcatgagccatggcgcatggcctatacagtattcttattggcttaggtcttttaactgggttattactgcttcataattggtctccctgcttccagtttcttccatccatatcttccaacctgaccccaaaagtaattctttcctctttaaaaaaaaaaaaattataaatacattattttagtccaggggcaggtggtttacacctgtaatcccagcactttgggaggccaaggcggctggatcacttgaggtcaagagttcaagaccagcctggccaacatggtgaaaccccgtctctactaaaaatacaaaaattagccgggcgtggtggtgcttgcctataatcccagctactcgagaggctgcggcacagaatcgtttgaacccgggaagcggagattgcagtgagcctagatcgcgtcattgtactctagcctgggtgacagagtgatactgtctcaaataaataaataaataaaatctttttaaaaaaggaaacatctactgatgaggctaaaatactgttcactctctcatcccaaccctcctactcacaatcccctcccctcaaataatctgcaacttgcttttttcccctcacataatatatctcagtcatctttccacattagtctattagatagatctcatttttaaaaactcctattatttattccatagtataagttgtattttagttattcacctaagtataaaatgctttataattttcattttgattccctatttaaactgagttttgagaacttccccccattgtctttcctttttctttccttctttctttcttttttgagacagggtctcactgttgtccaggctggagtgcagtggcgtgatcatagttcactgtagccctgacttcctgggctcaagcagtcctcctacctcagcctcccaagtagctgagacttataggtgcacaccactatgcccagctaattttttatttttgtagagacaaggtctcacctatgttacccaggatggtctcaaactcctaggctcaagtgatcctcccacctcagccttccaaagtgttggggattacaggcatcagccaccatgcctggcccccattatctttctatagtttactaggtctccccaccacctttaaaactgtcagtgctccttcaaggcttatagaggcaacataaactcagataggtctagggaggaactagacttgtgagaaacagctgggtgacagaccaaaagatatagtgggcattggcagctgctggagagtgcacacgctgcctaaagatattcaaatgcataatataaacaaacgaaagaacactcctggccaaacaacatctttgtcaacaggtttcaatttttcaaccattaatatgccagtcaaagctctttacagcttacttactagcctcctcctactactactcccagaacacttgatctgcgtttatttttctctgcctttgtacctgctggaaagtctttctttctgttttctgccagaaggatgcagcttgtcctttaagacccagtttgtatactactacctcttctgtgaaactgttctggtttcccaaggcagatgacttgtctaatctaacatagcctattcagatctttattattaccctgattacttcgcactgtaataatttctgtacctctctgttgggctcatctagggtgtgagtccctactgtcaagttgctactttatttaacttgatattcttggccctgtcaagtgcttcacttataagaggcattccatttttgttaagagtgtgaataaatgaatactgttattaattatagtaagaatggccttgagaacagccagaatccaaactgatgattacatgacaaatatgaagccccatatcacttagattactaccatctgattttgtcaaacttaggataatatattttatttttaaaaaacttatttaaatgtcactaaaatgaatataaatcacatgtagaccacaaagagaaatgaaagcaagagttttaacactaacttttcttaactaataaaatactttacttggaatccttgggtcctaatcgaagcatgtgttgtaccatttgctacttttactctgatagtagaaatttaatcagactttttaaaaaaatttcttagctgatcatggtttgtattaatcaggcttttaaaaaattatctcagtggggcatgatggctcacccctgtaatcccagcgctttgggaggccgaggcaggtggatcacgaggtcaggagttcgagaccagcctgaccaacatggtgaaaccctgtctctactaaaaatacaaaaattagctgggcgtggtggcaggcacctgtagtcccagctactcagaaggctgaggcaggagaatcacttgaacctgggaggtggaggttgcagtgagccgagatcgcaccactgcactccagcctgggcaacagagtgagactccatctcaaaaagaaaaaaaaaaaaatctcaaactgtttaactgttttagtcctcccctactaagattatcaacctcccttggtcacctctgactcaatccaatcactacccttatttttgctagtttatatcccttctttgtatcctgtggcctggccactaccattaagggtatgtgttctatgtacttagatttaaaatggttgttcttcttctttttctttctttcttttttttttttttggagacagggtctcactctgttgcccaggctggagtacaggggcatgatcgtagctcactgcagccttgaactccttggcccaagctgtcctcccatctcagcctactgagtagtggggactacagatgtaccccaccwtgcctggttttttttttctattttttttgtagagacaggatcttgctatgttgccagggctggttttgaactcttgaactgctgggctcaagtgatcctcccgcctcagcctcccacrgtgctgggattacaggtgtgggccacagcgtcccacttgaaatgattctttactttgtatgctctaactctttcatttttgtagccaggaagcgaagtacagtcctgggccagaaataagcttcactcttgggggaatatgtttacatatatccatagtccatatttacatatatctacattccatattgctctcaaaacaaattcatattatcagattggagctgtcatttgatcccagaatgtgtagtacagggttgtttcagatttaacactttattccatgtcctttgctcaagtaaggtaagagataattgcccttaaattaggtaaaatgtaactcccaaatattttagctttttctaatgtttttaggtatgcgataatagtattgaattcttgaatattaactttttaaatattcaagttcttatgtacaaagaataaaaatcattacagctttagcccagtgacttattttagtgttgttcttgtatttgtgtgttgctataacttagaatgttatgattcctatgttgatttttaaagtggttggcagtttagaactatacatcatggcacctagccatacaccatggcacctaggttaccatggaacctcaacctctggttttctgaggacacctggtagagtactgtgtcactcagggtcagatccagtctgggcattgaacattccagactgcttttcatggtttgcaaggtcttgtctgtcctccagccgttgtatcctcctgacatcagttcatctttgtgatggtagcacttctcttctctggttcaaaattgaagtcattttttaattctcccgtactcctacattcagccagtcatcaagctttgtgatagggctcttggattctcataagcacaagtcacttccttcctcatgttattacccccaactctgggtcatgtaagaacactccctactactcccccaccgtatacacacacaaaaaaccttttaatgatagttgcacgcacacacccacacctcccrttgacagctggatgaagccccaatcttttatccaagtgttcaagatcttccacatctactcctagcgtttttagcctcattggctactgcttccttccgacagtgtgttaaataggtcctgaccatcccagagcttaactggggcttttgttgtcctcagcctctatcagttcctctgcacatytgaagtgatcttatgcctctgaatacccaccataccttattttaccctatttctgtttatcctgtkacatactattgcccaaatagtgctttataatcaaccaaagtgcttagaatctgttcctttatttaattttcacaaccagtccatgaggtaagaaagatgtgtcatatcacacaagaggaaactaagatttgaggaaggaaaagtaagttgtctaagttttgcaagagagtggaactgagacactaatccaggcctcctggaacatgagctccaagctttgtacgttatgctgcctttcttggtgccggagtctgcacttaaatgtaagtttgaatatatctctctctttccagttgcttgtaagttacttgaaggcaggggctatgtcttattcccctacaacatgtatgtatgaatgagcctatttatatattaaatatagtacagttcagtgttctgtcctttttcttagtaaaaatcatgcttctctctgagccttgcatctccatctttttattaagtagaaatgaagcttacttttctcattgctaatttctttgttggagtattacagataatagagctagaactttataatgaatttaacttctgggataactttttagcaatgcagttcacaagtatttgttgcctgtgaagagattaaaccgatagctaggctactgagctatggttccatactttccaagtataaatttcctgaattttcatatcattataatttttatgttggttacttgagaacatgtatacaaacaaaaaaaaagccattgtgaattcagtaatattttccttcatattttttccactgyggtaaaatacacataaaattttattaagtttttaatggatttgaattttattaattacatcatctacatgtatttgaaaaatcatagcacatacatctgcaagacctggcattcactctacaggaaatgcctggtgcccctagtacttacagatcctcctggtaactccacagttgccagttgggagtcacatgtgtggggattctaatactgtcctgcattacttagtgttgccttaagaagtttcatgtgagtttgtttttttttttttccgagacagagttttgctcttgttgcccaggctggagtgcagtggcacgatctcagctcactgcaacctccgcctcctgggttcaagtgattcatctgcctcagcctcctgagtagctggaattataggtgcccaccatcatacccagctaatttttgtatttttagtagagacagggtttcaccatcttggccaagttggtcgtgaactcctgaccttgtgatccacccgcctcggcctcccaaagttctgggatggcaggcatgagcccccgtgcctggccgcatatgtagcttttgatgctgtgtccactcatcttcagaagtcagaatttatatagaaagtcaaagctggggccagccagggtagctcacgcctgtaatcccagcactttgtgaggctgaggcaggaagattgcttggctccaggagtttgagaccagcctgggcaacatagtgagaccctgtctstacaaataatcaaaaattacctggacatggtagtgtgtgcctgtagtctcagctacccaggaggctgagggagaattgcttgagcctaggaagtcgaggctgtagtgagccatgattgtgccacaacactcagtttgggcaacaaagtgagaccctgtctcaaaaaaaaaaaaaaaaaagtcaaatctaagcataatatttattagaaaaatgtagcttcatttaatgtaatctgctttcagagctgtataaatacagtgcctacttaagtatatttcaagaagtggagtatctgttcagggaagaagaaagcattgttgtgactacagcaartgtctgctaacagatgtgagattactgctgactgttgcacttaagaatccacatgcagctgggtgtggtggctcatacctgtaatcccaacactttgggaggtcagggtaggaggatcacttgagcccagaagttcaagactggcctgggtaacacagcaagaccctatctctaccgaaataattaattttaatttaattttaaattttaaaaaaggctgggcacggtggctcatgcctgcaatcccagactttgtgagtctgaggtgtacagatcccttgttcaggagttcaaggccagcctgggcaacatggtgaaactgcgtctctacaaaaaataagccgggcatggtggcacatgctagtagttccagctacttgggagactgaggcaggaggatcttttgagcccaggatgtggaggttgcagtgagctgagatcacgccatttcactccagcttgggcgacagagtgagaccctgtctcaatcgatcaatcagtcaatagaatccacacgcaggaatgggagggcaatgtttttcagcattttatctttttgaatttttgccatatgcatacatcacctattcaaaaaataattaaaagttcacagtcatttcaatagaagtattaaaaatgtcttcctattggattatgagctttttgagaccaagaagtatgccagattcctttctgtattcctgaacctagtatagtaccttatatatggtaagccctcagctagtatgtgtagatacgaattagaaactaagagttgcaaatttcagtagggacatgactaaaaattactgaatgactgtgaatagttcatgcctccttaactctgttcctcctcttcagaatgtggctgagaccagcttcctggctctgaagatcagctattattgacacccattaaaataacttaaacacaagttagaattattcctagtcagttgttcaaaacagtggggtttatgttcatttataagtatagtgtgagatttttccaagtgtgacttccaaactgctttttatctcttgcagatctttgtagaatttgatggctgtaactggaagcaacactcctgggtaaaagttcatgctgaggaagttatygtgcttctgctggaagggtctcttgtatgggcgccccgtgaggacccagtccttctccagggcattcgagtctccattgcacaatggccagccctggtgagtggcttttactgggtgggaacatgtctgagctttactcctataatataactatgacatgttagggacagagtatgtgtaagaactacatactttgtccttaacgtacatttattctgaagttactaatgcaaaaattaggagcagtcttttctcctttgtcctccaaaatgttttatattaggtgatatttgatatgaaagaatttttttggccagacgcggtggctcacgccttgtaatcccagcactttgggaggctgaagcaggaagatcccttaagctcaggagtttgagatcaccctgggtaacatgccaaaaccccatctctacaaaaaatacaaaaattagctaggtctggtggcacatgtctgtggtcccacctacttgtggggctgaggtgggaggatggcttgagcccaggaggttgaggctacagtgagccgtgattgtgccactgcatccagcctgggggacagagtgagacccctgtctcaaaaacaaaaaaaacaacaatgaaaagaattttttcacctttagtcttttctcagagcaaggttttgaaacattatttgtaacctttaaagtttttttttcaattatggagtgaaaatagcattataaaatttattttattttttgagacagggtctggctctgtcactcaggctggaatgcagtggtgcaatcagagctcggtgcaatcagagctcaccgcaacctctgacccccaggcttaagccatcctcccacctcagcctcccaagtagctgggactacagacgcacagcacggcacccagcctaatttttgtatttttttgtagggatggttgctcatcatgttgcctaggctggtcttgaactcctggtctcaagcagtccacctgcttcagcctcccaaagtgctgggattataggcatgagccactgtgcctggctgtgtgttataaaatttaattgtgagagtatccatttgtttctgtctgtcttattagcaaagtataggtataaatggtaacttctaaaaaatcctgattttcatgtggctaaccaaattaaataaataatattcaaaacaatttttttaactgattgatggtatatgtcatcacttactaaactgtcttttctttttctttttgtcttttgttttttgtttttttcttgagacaaagtctcaccctgtcacccaggctggagtgcagtggcacgatctaggctcactgcaacctctgcttcccaggttcaagcgattctcttgcctcagcctcccatgtagctgggattacaggcatgcgccaccatgcccagctaatttttgtatttttagtagagacagggtttcaccatgttgtccaggctggtcttgaactcctaacctcaggtgagccactacgcccagccgtttcatttgtttttgttgttgttgttgttaagatggagtttcgttcttgttgctcaggctggagtgcaatggckcgatctcggctcaccaccccgcctcccaggttcaagcaattctcctgcctcagcctcccgagtaactgggattacaggcgcccaccaccactcccggcttattttttgtatttttagtagagacagggtttcactgcattagccaagatggtctcgatctcctgacctcgtgatccacccgcctcggcctcccaaagtgctgggattacaggcgtagccactgcgcccggcttctcatttgtttttaaggccactttccagttgaacttttaggagaagctcttgtataataagtgcatgtgaggtctcttcatgacttttttataggctatttatttatgaaatggtaatatgaattaaccatgcatatttatgctgttaattattttataaatttcacaaagatttcaagagttctgagatgataacagtataactctttattctgggaatttactataatttagctcccttgaagcctaataagattagcctgatccctaggcagaattaggagaatttctgattcctcttgtcctttttagccaataagagtattgagctgactttctgcattagttagcttcccatgactatttgaggggtagatgctaggttgggaatgtttccaaggacttatgctttagcttatctgtatttactgggatgaaagatataataattatttctttgaagttagagatttgtttgaattgctgtttttttattcccaagttctaatcaatttcttgtcattgtacttcacagacttttactccccttgtagataaactgggtttgggttctgtggttccagtggaatatcttctggatcgagagcttcggttcctgtcagatgccaatgggttgcatctgtttcaggtatttaacacttgctttagtcttgagcctattatttttttcgctgctaatttctttgttgatataaacataggtgtttctccttttactgggtgggaacatattagcatttcttttattacttcctccaataaatatgctgtgccttttttattttattttattttatttatttatttatttttttttgagacagagtctcgatatgtcccccaagctggagtgcagtggtgcgatctcaactcactgcaacctccgcctccccggttcactccattctcctgcctcagcctcccgagtagctgggactacaggcgcctgccacaaagcccggcttatttttttgtatttttggtagagatggggtttcaccatgttagccaggatggtcttgatctcctgacctcgtgatccgcccgcctcggcctcccaaagtgctgggattacaggcgtgagccaccacgcccagcctattttatttttttgagacagagagttttgctcttgttgcccaggctggagtgcaatggtgtgatcttggctcackgaaacctctgcctcctggattcaagcaattctcctgcctcagcctcccaagtagctgggattacaggcatgtgccaccacacccagataatttttgtattattagtagagatggggtttcaccatgttggtcaggctagtctcgaactcctgacttcaggygatccacctgccttggcctcccaaagtgctgggattacaggtgtgatcaaccacgcctggcatttttaaatttttatttatttatttattttgagaaagccaccttggctggmgtgcagtggctccatctcgcctcactgcaacgtccacctcccggtttcaagtgattcttgtgcctcagcctcccaactagcttgggatcaaaggcacatgctatcacatctggctaatctttgtagtcttagtagagacggggttttgccatgttgcccaggctggtctcaaactcctggcctcaagtgatccacctgctttgccctcccaaagtgctgggattacaggcgtgagccaccatacccaacctccctgtgcattttaaagtttttctgctcccttgcaaagtacttttggtggctgaggcttctttcttctacacagccccaccctaccttaaaaccgcccaagatttaagaacacaattctgagtcccttcagaagaggtggcttcggccaggcgcggtggctcacgcctgtaatctcagcactttgggaggccgagacgggcggatcatgaggtcaggggatcgagaccatcctggctaaaacagtgaaaccccatctctactaaaatacaaaaaaattagctgggtgtcgtggtggacgcctgtagtcccagctactcgggaggctgaggcaggagaatggcgtgaacctgggaggcagagcttgcagtgagccaggatcgtgccactgcactccagcctgggcgactgagtgagactccatctcaagaaaaaaagaaaaaaaaaaaaaaaggcagaggtggcttctccgaggtggctgtttgtgtaacttgagtccaagggggcctattcattattgacatccaggagtttggactggttccaagcagcatgaagtatcatagttacaaagaaaagggacaagttaatagttaaaacaaaccagcgtctgagttatagtttcagaatttagggaaatgtatttatttttcacttgtaagggttgctgtctgcaggaagaaaattaggagactcctgagttttactgtcttactgagacagaccagagcagttatttcctaaactgtcttctgtgagatgttaattatgatttctttgttgatatgtcttccccgctcgttaggttaatgatgatttctttgttgatatgtcttcctcgctcgttaggcctcattccctctcagcaaccttgctttattcatatttataatcctagtgctttatgagatagcacttagtaaatgttggataaatactgaaataagcaaaaagatttgcgaggaatacaatgttttatggtcagataagtatgagaaacactggcctaaataagtttctttcctgtgtgacttctcagagcctttaatagcctattgtatgtagaaagatacataatatttcctaatcctaattgatcctagcattcttaatttttgcagaacatctcatgagaatagagttctctttttttgttgttcacaagagacagggtcttgttctgtcacctaggctggaatgcaatggcgcagccatacctcactgcagcctcaaactcctgggttcaagcgatcctcctgccttggcctcccaaagtactaagattacaggcatgatcaccacgcctagcctgagactaaggttctatagatattgtttggcaaatgttgatatacagctccttaggatatgatttttctcagctgattagatgtttgctattcattttaacattcagttgttttcttcttttatctttaccagatgggaacagatagccaaaaccagattcttttggaacatgctgcactgagagaaacagttaatgctttgatcagtgaccaaaagctacaagagatattcagccgaggtaagaacggatagtcttctgtccctgaactctgattcaggtgaatgatcactgttgagtgatagtatggaatcccatgcaaccttaaacatttgtacttatctcctttttgtgggcagagtcagatgccacatgaaagataataattattatttattaaaaaataaaaataaagagtatcttcagttagctggatctctaaaatagagatctcattctctctccatcactcactcgtcttatggaggtgtctgtaacagaggtgagactgtgttattctgtctaaggtccatccatccccttaaagatgctcttagaacaaaaacaggatctcattcagaccaatgtttctggttcattctgcatttcataatatacagttttattgtgagttgagttttagttttttttatttcttaaatattgccatgtactagacagtgttaaggcattggggatatagcaattaattagaaaatctttgcttttttaacttaaaatctgcaagtttcttaagaactaaaaacttaacaccaacaaataacaccttggagtgcaaggtataaagtaatgtgttcacagactcattcacattaaaagcttgttgtttttaataatgaaaaaaattattagctttcaagttcagatacaagttttgcccaagattctacacaaaaggtaaactattggcttcatttatgtcgtacattcactccccttcctttcttgatctcatgataatcattattttcagggaaatagtttccttgtttctcttttgtcaaaataaacctaaacaggtaaaggtagaaaaactgacctattggggaaggaaggtgtcaggataaaatgatgttaaataatcaaggaaagatacggcagaagaaagaatatgaggaaaattggtagcagaaaagaaaattgagtggacaggagaggtagggagatacatatatatatagattatatatatcatgatatatatatatagatatatatagatataatgtatagaaaagttacggaagcttaattttagctctgatagagaataatctaaaattggtaatgatttagctatatagtctcaaatgtacaaggatatgtgggagagagaaactgtccttagaggatagcttaaattgcagggtaacattacctgctgataaagtaatatatttgaaactctgcgttcctaggaagacaggtgctatatttatatttgttcagcctattattagtgcagaaggctggaaacttcataaattgaactcttcacccactgttattgaaagtcagataccagaatgtaaatggtcatatataaacataacataacataacagcactttcaacttagtggcctcccacttttttcatgtacatgtagttagatacatgtcaggtatctacctacattttcatactactgtagttttttatttggaagtttcctttcccttcctataatacttgcagaactggaagattgaggcaagggggagttggagggctgggaaattctaaggaatttccaaataaatgaagaatttacaaagaccactggaagaaaccattcaggttttgtttttaaattgctcagtatggtaaatctggaattgctcatttgttcagttctataaaagaggaccaaaagtgccaaatatttacattatctaattttcctttggcttttaggaacaattatgaaatatagcttagccaaaaatactcaatactgactgatctcccttttaggtccctacagtgttcaaggtcacagggtcaaaatatatcagccagagggggaagaagggtggctctatggtgttgtgagccatcaggactccatcactcgtcttatggaggtgtctgtaactgaggtgagactctgtgttattctgtctaaggtccatccatccccttaaagaggatggtttagataggcgagcacttcattatgtgtaagatgacttgggtttcatccctggctctattacttaatagttgtataacccctagaaaggctattgaattttcttaacttcactgttctcatctataaactagaagtaaatatgtaaacccccactgaccttacaacactgttttgggtcctgagataaagtatctgaaagtgctttgaaatctgtaaaacaatatataaatgtatgacagtagtagtattatattcataaaggttagtagttggagtgcagtggtgcgatcacagctcactgcaacatttgcctctcgggctcaagcagttctcccacctcaccctctggagtagctggcactacaggcgtgtgccaccacacctagctaatttttctattttttgtagagaaggagtcttgctatgttgcctggctggtctcaaactcctgagctcaagtgatccgcccacctcagcctcccaaagtgttgggattacaggcatgaaccactgcacccggccagaatattattatattatatttatttatatgatatatatgagttatatgatatataatttatatgatatatataatttatatgctctataattatataagtcacactttagtaacaaataagatcatatagtacatatagttatataatttaccttttttacttaattgtatatagtgagcatttttgtatgtaaatgtaaagatctgtctcatcctttaaaatagatgcgttcttttccactacatggatatatcatgactaatctaaaattgatagacatttaaatcattgccaatattttcactaatatgtcacagtgaacatccttgaacattttttacattatttattggaataaatttatatgtataattgctaggtcaaagaatatgcacaataaatttgaaattttctatcaaattgccccccactgagtttttattctttaatagtagaatgattcttttttaaacagagtctcactgtgttgcccaggctggtctcgaactcctggtcctcctgcctcagcctcccaaagtgctggggttacaggcatgatccaccatgcccagcctggagtgatttttttttttttttctttttgagacagagatttgcttttgttgcccaagctggagtgcaatggcacgatctcggctcactgcaacctccgcctcccaggttcaagcaattctcctgcctcagcctcctgattcgctgagattacagacacgccaccacacccagctaattttttgtatttttagtagaaacagggtttcaccatgttggccaggctggtcttgaactgctgacctcaggtgatccacccaccttggcctcccaaaatgctgagattacagatgtgaaccaccgcacccagccctagagtgattcttttaatgattattggttctgaaggttttttgtttcatactatacagaataggacagttttagagatacaggattcagaattaacatcgctaaaagacacagttggacatgaattcacttctttcattcattcacttaaatatttgaatgcttaccatattctagacctgttgtagcagtaaatgagacagtagagatctctgctctcatggagctttcattctagtaggtgagttgaatcaataaagagataattacattgattaggaaattatataattatgtctttatggacaaggcattaaatatctttttcccctcctactgtagagtggtgaratcaagtcggtagatcccagactaatccatgtgatgctgatggataattcaacgcctcaaagcgaggtacagtaatggactgcattcctgagcagactcatgagcttgcattatcttgctgtgtgtagatcccttatatatgtgttttccatggatgccttttgagttgttcagctttagccactgtacatttttttgctctctccacagtctgtctaattaaggggggatattctcaagaaagagacctagtttgagcaaacccttttaagcatgactatgttccctagttcttctaaagtgcaaggctggtttcttcctatattctgtcaggacaggtatatttgaaagatatagtagtcagttaaaagtgcaataagcagtagtaatactcgtgatctaccaagtaacaagaagtgaaggataaactacgtccactttttttttttttccattcggtggcagtgagctccaacggagtctgaaattctgtattcccaagtagaatcaattcaagctggtacctagttcagtgctcagcccccagtgcattggttactccataattgttatgaaccagcccaactcttggtttattcagaattaatatagccccaaaaaagatacattaaagctctctgggccaggtgcagtggctcacgcctgtaatcccagcactttgggaggccgaggcaggcggatcacctgaggtcaggaattcaagaccagcctgaccaacgtggtgaaacgctgtctctacaaaaatacaaaaaaaaaaatagccaggcctgatggtgggtgcctgtaatcccagctactcgggaggccgaggtgggagaatcgctagaacctgggacgtggaggttgcaatgagctgagatcgcaccattgcactccagcctgggtgatagagcaagactccgtctcaaaaaaaaaagtaaataaataaaaatctctgcctgaaccaatcgagtaattctgtgtgaatttccttcagttgaccagctgtccacatattcctcacagtatcttggcacctctgtaatattgctgtcgttgccactcctgctaagtatatagtctttcctcatctttatccagtcattcttgacttcctaaaacaagatcagaataggaaaagaaaaaaaattttttttttttgaggcagggtctcgctatcttgcccagtctggtctcaaactctcacctaagcctcccaaagtgctgggatgacaggcatgagccactgcacctggccagggttaaatttaagaactgtttactacatgtaatattaccacaaacagggtaagtctcttgactgtgtttgcatgccaaaaacacctgctactttgatcgtgtattggtccccttttttgttcctttccttatttcattccttcattaagcatatattgtatgccaggtactgttcagctggccaaatagaactggggagtactggtctcaatgytgtaggctgcttactcacgtatgagtagctcactgtaagtaggacttacatataagttgtttagggactggtagtatgttgctgtgagccaggctctgcaagttggctggatgacttataggtgggatgtttgtttttgtttttttctttttttttttgagatggagtyttgctctgtcacccatgctggagtgcagtggggtgatcttggctcactgcaacctccgcctcccgggttcaagtgattcttctgtctcagcctcctgagtagctgggactacaggcgcacaccaccatgcccagctaatttttgtatttttagtagagacagggtttcaccatattgaccaggctggtgtcaaactcctgacctcgtgatccgcccaccttggcctcccaaagttctgggtttacaggcgcgaacgaaccaccacgcctggtgatctttggtttttagcagcagatgttggttcttccttttttgktattaacatgatattactgttttctttgctagcagagtccaattattttttatagttctgccaagttttatagtaaccctttttagagatccatgatcacctcatctcctttaagtatgggtgaatgaacaagaaagaacagagttcactgattgtgatctgcaacagtgaaaactgggtggtgatagagattgagaaagaatttaaaagcttttaaaaatcaaaagaggccgaggcaggtggatcacctgaggtcagagtttgagaacagcctggccaacatgatgaaaccctgtctctactaaaaaacacaaaaattagctgggcgtagtggcgggcacctgtaatcccagctacttgggaggctgaggcaagaaaatcgcttgaacacaggaggcggaggttgcagtgagctgagattgtgctattgcactccagcctgggtggcaagagcaaaactccgtctcaaaaaaaaagaagaaaaaaatcaaggccaggcgcggtggctcacgcctgtaatcccaacactttgggaggccgaggcggctggatcacgaggtcaggagatcgagaccatggtgaagccccatctctactaaaaatacaaaaaaaattagccgggcgcggtggcgggcacctgtagtcccagctactctggaggctgaggtaggagaatggcgtgaacctgggaggtggagcttgcagtgagccgagatcgtgccactgcactccagcctgggtgacagagcaagactccgacttaaaaaaaaaaaaaaaagtcaaaagaaaacaacacttagcaaacagataaagttcttgaatgaaaggtttagaggctgggcgtggtggctcatacctgtaatcccagcactttgggaggccgaggtgggcagatcacctgaggtccggagttcgagaccagcctggccaacatggcgaaacctcatctctactaaaaaaatacaaaaattaggccaggtgcagtggctcacacttgtaattccagcactttgggaggctgaggtgggtagattacctgaggtcaggagttcaagaccaacctggccagcatggtgaaaccctgtctctactaaaaatacaaaaaattagctgggcatggtggcaggcgcctgtagtcccagctacttgggaggctgaggcaggagattcgcttgagcctaggaggcggaggttgtcatgagctgaaatcacaccatcgcactccagcctgcacgacaagagcgaaactcttgtctcaaaaaaaaaaaaaaaaaaaaaaaattagccggatgtggtggcacacacctgtagtcccagctcctggggaggctgaggcaagacagtcacttgaacccgttaggtggaggttgcagtgagccaagattgtgccactgcactccagcctgggcaacagagcaagactccatctcaggaaaaaaaaaaaaaaggaaagaaaggtttagaaacttagataatattaccaaaagtataggcaaacaaaagttaatcttgagctttgcataacagttttttgttttgttttgttttgttttttgataaggagtttccctcttgtcgcccaggctggagtgcagtggcgcaatctcggctcactgcaaccttcccctcccgggttcaagtgattctcctgcatcagcctccccaatagctgggattacagaaatgcaccaccatgcctggctgattttgtatttttagtagagacagggtttcaccatgttgcccaggctggtctcaaactcctgacctcaggtagatccacccacctcagcctcccaaagtgttgggattacaggcatgagccaacacgccaggcctcctgggttcaagcgattcccttgcctcagcctcccaagttgctgggactacaggcatacgccaccacacccagctaattttttatattttagtagagatggggtttcaccatgttggccaggatggtctcaatctcctgaccttgtgatctgcccgccttggcctcccaaactgctgggattacaggcgtgagccactgtgcccagcccaggttcacttttcctttggtcacagactcacaaacgttggtttagtgacttctggttagagaagatgtcctatttcagtacttaaaatgcaagtttctttcaagcaaggaggtaaatatgtaataaagtgagttatttcatcaaggggtaaatgagctcccaccctagctttagcactctattttgtaaaagaaactcaacaaattgttaaaaccctcaaagaagtccatttaaggcagtgtaatgttttatttaagagaaagtttgccaagtgagttaacctctagtaactattatcttgaatgtgtgtgtataaattgagtcacacaaagattagagcttttaacaaaggggatgttttagaactggcattggaacttggcagtctatgcctgctttgtctgcttctagagatgggaaagagctaatggtgtgtggtattcacaggatgaaagtttccttgtaatcttttttgaattttgttttgtaggggggtacgttaaaagcagtaaaatcttccaaaggaaagaagaagagagaaagcatagaggggaaagatggccggaggaggaaaagtgcttcggactctgggtgtgaccctgcatcaaagaaattaaaaggagacaggggtgaagtagacagtaatgggagcgatggaggtgaggcaagccgagggccctggaaaggagggaatgccagtggagagccagggctggatcagagagccaagcagccaccgtctacatttgtcccccagataaaccgcaacattcgctttgccacttacaccaaagaaaacggcaggactctggtggtgcaggatgagcctgtaggtggggacacacctgcatctttcactccatattctacagccacaggtcagacacctttggccccagaggtgggtggagccgaaaacaaagaggcaggaaaaacactggaacaagttggccagggcatagtggcttccgcagctgtggtcactaccgccagctccaccccaaacacagtgaggatctcagacactggccttgcagcagggactgtgccagaaaaacagaaaggcagccggtcgcaggcctcgggagaggtgagttacttcaggggcagatttgcaagatttgggtttactctttcgccctcctttattgctaacattaaaaaacattcaagtgccccagggaaggagtatttctgagatgtgcttaaattatactctgtggaaggcctttactgctcactgggcaaatgtgtatagtttaataactttatcagctcttaaaaggcaccagaacagttgggtgaatcaaaaactgatgatacaacctaatttaaagacatgttaaartagatmtggtggggaatgttttaaattctattatctatttagttcacgtagtgatcaagcctctgctaggcctataagaggtgaggttaatgaattacagtattggtaatagtgaatactataattaaggctatgtgtgcaagctaccattaccctgttttcaattcatcattttctatgatattttcccttgaggctgagttaatttccatcatttgatatggccatggaaggttttttctccctatcttcayctttttaagccttacctgaaaatttgatggatttcatcacaacagtatctgatttcctttgttctttatctgatatgcatatattgttgctaaaatggaacctctgttaaatgtaagttaacatcaagttgtctccctaatccaaaatatcaaaatcagtataatatattctttttgactaattttggtcaccaaaatatgatttatggtgctagtcatcttttttttccccaaacagctattaactcaagctaaaatatgaaatacagagatgaaatgcttaatgatttttaaaaattatatataggaaactactgtgtgctgagtactgtatattatatataaggaattgaaactcctatttgaaggagctcacatcctaaaacggaatcatttcagaaaaaacaatgccagacaaaacatgacaaacgtgacttctttccctccccaacaagtgcagattgttaatccctagtgtgcagggatagggagggagaggaaatgtccacacagacgaggagaaggcctgtaaatgcaaatttcacactgttgatggtttgtcctgttggttgaccagcattcccaagataaccaggtgaggatcttatatggatttccagtgtaaatcatcatagtgtctgaattatttaaaaacaactccatgttggccaggcacagtagctcacacctgtaatcccagcactttgggaggccaaggcgggcggatcacaaggtcaggagatcaagaccatcctggctwacacrgtgaaaccccatctctactaaaaatacaaaaaattagccgggcgtggcggcgkgcacctgtagtcccagctactcgggaggctgaggcaggaggatggcgtgaacctgggaggtggagcttgcagtgagccgagattgtgccactgcactccagcctgggcgacagagcaagactatgtctcaaaaaaacaaaacaaaacaaaaacaactccatgtcaaaggcagtgtgaatgtaaatggagcttacaaaatagaccaggttttacatgctataaaagagatccattgaatgctgctactcttagagtagcaaagctgaatatatgaaattcagattgaaagagtattttcttttaaacaggttgagggaatttctgtgactatgacagtcatgttgctgtgtttctgtttggttcttcttctaggatatgatttaaaagtatagaaatgagccaggcatagtacagctcatgcctgtaatcctagcactttgggaggccgaggcgggcggatcacgaggtcaggagatcgagaccatcctggctaacacggtgaaaccccgtctctactaaaaatacaaaaaattagctgggcgtggtggcaagcgcctgtagtctcagctactcgggaggctgaggcaggagaatggcgtgaacccgggaggcagagcttgcagtgagccaagagagccaagattgtgccactgcactccagcctgggcaacagagcgagactccgtctttaaaaaaaaaaaacaaaaaaaaaaaggctgggcttggtggcatgtgtctgtaatcctagctacccaggaggctgaggcaggagaatcacttgaacctgggaggcggagattgcagtgagccaagattgcgccactgcactccagcttgggtgacagagcgagactccgtctcaaaaaataaataaataaatgtgtagaaatgaatgttttcattacaatggctgatctaaaataaagacagagccaacaggaaacttcttgccctaaaaactggcttgacatgagtttctcatcacctttttataagaaaaggatttggaatttaatcatttgaaggaaaatgaaagactatccaaattatttttcattcatgtgtgtatttatttttaaagggtaactttaggagtgaaacatgagctacccatgctagttccttgcagtcatgcaggtatcaaggctcctggccaaatcctgcctgtgaagcaacagcagcacctcagggctgtgtctgttctttttctctattgtagggagtaagttgaagtcaatacttactggttagtaggaagataaaagaaaaaagaaaaggagttttattttttaactctaaaataccctgaagtagtctctgtagcagagacagaggcaagcctaggtggcctgcttgattcgtacgtctctatgctactcctcaaggaaatcctgaatgttaactcctcttgtgtatttaaagaatagtttaattaaaactctctcccctctttataagagaatagcccttttgtttatcgggaatcactttttttttaattgtagtaaaatacacataatgtaaaacttacgactttaaaatgtacaattctgtggcatttagtacatttacagtgttgcgaaactatgaagactatctagatccagaaatttcatcaccccaaaaggaaaactccatatccattaagtggtgatggaataatttttatttccagtgttttagagtgaatattaaggtatatcatcctctactacttgaaagtaatctatggttagcaagtcaagtactaggatctgggttttattaaattaataaatataagtttgggctcatacctacctatgggtctcttctctctctctctctctctctgtgtgtgtgtgtgtgtgtgtgtgtgtgtgtgkccctttctcttgtctgtatctgggtacattaatatataggaaagtccttccttttttttgtttttgtgagggaatcttgctctgttgccaggctggagtgcagtggcacgatctgggctcactgcaacctccgcctcctgggttcaagcaattctcctgcctcagccttccgagtagctgggactacaggcacgtgccaccatgcccggctcattttttgtatttttagtagagacagggtttcaccgtgttggccaggatggtcttgacctccagacctcgtgatccgcccatgtcagcctcccaaagtactgggattacaggcatgagccaccgcgccaggccccattcttctttatacagtcattcacaagcagaagttaacattttgaaggtaaaagaaggaaaggggagtgttctgttatttcattcttcagttatgctgaaggctttttttgggatattgtcagtatatacatttatcctctttggattcttattagattctaattataacaaaggtcttggtaaatagcttgctttctttaatttagcatctttacgtctaacgttaattgaagtagatattcaacttgtaggttgacttgaacccataaatagatgccgaaatccaaaagggtccatgttgtggactttcagattaataaggaaaacacttttctttaacgtgcagtaggcttgtcctaggattaaagccactttttgtaaaatgggcaattttacagtagcctaaataaatcaaaactttaacaatagctcccaaggtcattgagatatattaatattacaggggtcactgtaaaagctgatgtctattcaggaacccttttctccagttccttagaggagctcttcacttccaaatagataccaaaaagcctacaaggccttctagcactgtgacgaccaattggataacaaccaagggaaytgcaggatgaatgacatcctgctatctctggttcaccttgctaaagatgccctcagtgtagtctgtggcagatttcttccccactgctggtgaactccagttacaagagcagatccatggaattgtaaaagagaaaagttgatggacccccaagaaatgttgatctggtgatagtgaggtccaagaaagagatcattagattgtcatgagaagccagcatcactaattcaggctatcttcctttcagaattcaagaaattctattctggcctcttctggatttggagcacctctccctagttcatcgcaacctttgacttttggaagtggaaggagccagtccaatggtgttctagccacagagaacaaacctttgggcttctcttttggctgtagctctgcacaagaggcacagaaagacactgatctctccaaaaacttgttttttcaatgcatgtcccaaactttacctaccagtaactacttcactactgtttcagagagtttggctgatgattcttctagtcgggactcattcaaacaaagccttgagagcctgagctcaggcctgtgtaaaggcagatccgttcttggaacagacactaagccaggctctaaggctggcagctctgtggaccggaaagtgcctgcagagtccatgcccaccctcactccagccttcccacggagcctcctaaatgcccgtaccccagakaatcatgaaaatctatttttacagccccccaaattgtcccgagaagagccttctaatcctttcctggcatttgtggagaaagttgaacacagccctttcagtagttttgcatctcaggcatcaggtagctcctcttctgctaccactgtcacctccaaggtggcacccagctggcccgagtctcactcctctgcagattcggcatctttagcaaagaagaaacccctcttcattacaactgactcctccaagctagtatctggtgttctgggctcagctcttaccagtgggggcccaagcctctctgccatggggaatggccgctccagctcgcccaccagcagcctcactcagcccattgagatgccaactctctcctctagccccacagaggagaggccaactgtggggcctgggcagcaggacaatcccctcctcaaaacctttagtaacgtctttggcaggcactcaggcggctttctgtcctccccggcagatttttcacaggagaacaaagctccttttgaagctgtgaaaaggttctcactggatgaacgaagcttggcttgcagacaagactcggactccagcaccaacagtgacctgtcagatttgagtgactctgaggagcagctgcaggctaagacaggcctgaagggaattccagagcacctgatggggaagctgggccccaatggggagcgcagtgctgagctgttgctgggcaaaagcaaagggaagcaggcccccaagggccggcctcggactgcccccctgaaaggtgatcctgctggggctayatttgggctttgctctggcactgggctcaaatgcctgtcgtgttcttgtgcagcagaggcactcactttgatggagagttctgtaatctcatagaattacagagccaagaggacctggcagaggcccctcgtcaggcctggttcagggcaggattgcatctaaaccggcactgtaggaggagtatctgtcccaaataatgataatcccccaaaggaggactcttgatcttccttggcggtcagttatttttggtcaggaactatttctttgcatttgtctcatccctttttacttcactttggcccatcctctttacttcagaggggttactgggaactggtatccattcccacatagcagacatttgtagacttgatgaagcagagagaatcacccctcagtttgctcctctctgaaacctacataaggattttaacagctctatcaaaatccattaacttgtgtggtgtgaggttatggtccagaagcgggtaaaacaaagtctyatggtaaaagcagctgttctcaataggaattgctatgttgtgggagctcaagaggtcctgatgaacagaatagccatatcgtgagagactagaggcaggtgatggctacattctggcttcttatgtttttcacatccatattcaaagttgttttgccatagtggggcacttcccacaagttctgcatggttcttagctcccaatggaagcttctttgctccttgctttcccttcctgtcaaggatggacataatgggtacatgcccaagcagggaaaggagtagcaacccaggtcagracaaatgtctgtccccaaaagaatcatgctattggttcctgtttacacctcatgacaaacttttcttctctcccccttgccacagttggccagtcagtgctgaaagatgtaagcaaagtgaagaagctgaagcaatctggagagcccttcctgcaggatgggtcatgcatcaatgtggcacctcatctgcacaagtgtcgtgaatgccgcctggagcggtaccggaagtttaaggaacaggagcaagatgattctactgtagcctgccgtttctttcacttccggaggtacccaaactcctgttttcctcctttgctagttttcattagtgacacataacttccactctttctctgagtctataaacatgtttcatcatcttggtctttgctttcctcaactcctttgctctcagcgtctgtgaagaggctctggcatagtagtcacttagttgtttggattgtaaaatgacatgtgattttgtccttggagaattaaaattgagcagtgttagctgcagctctgtgctattccctgagtaattcctaacttgggttggttctatttgaaaccactattataagcagaaggactgcatttcatattatggatctacctgactgcttattcctcctcagtgctagagtaacttgagtcatgttaaaaagacggggaggtaagatttggagataatgtgaagcatctttgaaatagatataactgatggaaatgtgggaatatcgtctgcttttaccaaacaatatctctttagttacttttcttctgcttgataaacttagaaggggagtttcttctgagtgacctttcaagaatctttaatttttaaagtaaatccaaatggtttaccaatatggtgtggattcacttagcaaatgtttattgagcatttaatgtgtgccaacccttgttctggccattgaatattcagcagtgaacaacaaaaaaatcaaatttcagccctcagaaggtttggggaggcagacagtaaataaggaaaaaaggccaagcatgattacatgcctttaactccagcactttgggaggccgaagcagaaggatcacttgagaccagcatgggcaacatagtgagacctagtctctacagaaaattttaaaaattagccgagtgtggtggcacacacctgtaattccagctactcaggaggctgaggtgggaggatcacttgagcccaggaggtcaaagctgcattgagccttgatcgtaccactgcactccagccttagaagcaaagcgaggctctctctraaagaaaaagaaaaaataataagtgatatgtcagctgataataactatgagaaaaataaggaaagaggattgaagtgtgaggatgctagagaggctacagttttaaacaggatgatctgasaaagtgagagttgaggaacagcctgcaggaggtgaaagaatacaccacactgtgacaggtattccagacaggtgcaagcatcccaaagctggagtatttctggtgtgtccataaagttaggttgctaaaatagaataaacaaagaaggaaaaggagttgaggtgaatgagttaatgatgggtccacattttaaagggctattccaaaggccttggtttttactctgatgagaagtcattggaggccttgagctgatgcgtgacactgattaatgttttaaaaggccactttggccacctttttgagaataagctatgtagaggcaagggcagaagcagagaagttaggaggctgttggaattatccaagtgagaaatgatggggcttggaccacggagatagtgatggacatgatgagaagtagttgaagatagagtagacataattttctgatgaattagatgtgaagtatgaaagaaaggacttaaggatgattctatgtctggttctagatatgtcttttggcctaaaaacaggaagaatgagattgccatttactgataaagagattctttagggaaaagcaggtttggggaggaaaagggggagtkttaacttggccgtgttaaatttgagatgcttgttagattttcaaaggaaaatactgagaaggcagctggggatacagctctagagttaagggaaggggtcctacctggagatataaatttggatatcaccaggtatttaaagctgtcagtctaagtgagatcagagcatagataaagaagaatagcagtccagggaccaaactctggtactctccaatgtttagaggtgagaaagatggaagcaactagtaaaggagactgagaaagaacagctagtgaagtagcaggaaaactaggcagtgaggtatcccagaagacaactaaagaaagtatttccaggaaggaataatgaactgtgtcaaatgttgctgacttgaatgggggcggtagctcacgcttgtaatcccaggatcttgggaggctaaggttgaaggatcacttgaggccagcagtttgagaccaccctgaacgatgtagtgagaccctgtctctacaaaaaataatagtaataataataatttttttttttgagacggagtcttgccctgttgcccaggctggagtgcaatggcgtggtcttggctcactgcaacctccatctcctgggttcaagcgattctcctgcctcagtctcctgagtagctgggattataggtgcgcgccaccatgctcggctaattttttgtatttttggtagagacagggtttcaccacattggccaggctggtcttgaactcctaacctgaggtgatccgcttgcctcagcctcccaaagtgcagggcttatgggtgtgagccactgcaccctgcacaaatcaatttttaataaaaaagtaaaaatgttgctgacaggtcatgttacatatggactagaagtgactgatttagcaaggtagaattaccttatcaaaatagttttgctagattggtaggggaattgcctgattgtagggaagaaaataaaagggaaaggaacctatggcaatgagtatagacaactcttctttttttttagatggagtcttgctgcccaggctggagtgcagtggcgcaatcttggctcactgcaatctccgcctcccgggttcacgccattctcctgcctcagcctcccgagtagctgggactacaggtgcccgccaccacacccagctaattttttatatttttagtagagacagggtttcaccgtgttagccaggatggtcttgatctcctgacctcgtgatccgcccgcctcagcctcccaaagtgctgggattacaggcgtgagccactgcgcccggccaagtatagacaactctttagaggaactttgctcaagcagataaatggagggagggtatggcttgagaggatttttgtggtagaaattggagcaaatttatgtgctggcagcagtgatctgatacagaagaaaatagatgatgttgaaaagagaggagagatttagtggagaaatgcctttgggttggggaaaagtgataggatgtagtaggagatactggcctttgctggttcagagcagcgggaactcatggaatacgtgggccaagttgcagggaagtgtggtagtgtcgtggtgggagcttgtggaggttgttttctggctcctcttttctcagtggaatagaaaacaaggtcctcacrggggaagtaatattggaggtatgaatagaaggaaggtatgaaaataggcatctagaagagggaatgtaccaagaaactgtattgtgactgtcaggcaatattaaggactcacttgatgtaggtagacatgaatttaaagtgttaaaaggccaggcacagtggcttatgcctataatccctacactttggaaggccgaggtgggcggatcgcttaagcccaggtgtttgaaattggcctgggcaacatggcaagaccctgtctctacaaacagttttaaaaaatgaaaaattaggccaggcgcagtggctcrcgcctgtaatcccagcactttgggaggccgaggcaggtggatcacaaggtcgggagatcgagaccatcctggcttaacatggtaaaaccccgtctctactaaaaatacaaaaacaaaatcagctgggcgtggtggcaggcgcctgtagttccagctactggggaggctgaggcgggagaatggcatgaaccccggaggaggcgtttgcagtgagccaagatcgcaccactgcactccatcctgggtggcagagcgagactctgtctcaaaaaaaaactaaaaaataaaaaattatttggatgtggtggcatgtccctgtagtcccagctacttgagaagctgaggtggcaggattgtttgagcccaggaggtcaaggctgcagtgagctgtgatggcaccactgtgctccagcctgggtaacagaacgcaactttgtctccaaaaaataaataaataaattgttacaatgaaagtggctctgtgttagccgggagtggtgtggttcatgcctgtaatcccagcactttggaagaccgaggcaggcggatctcttgaggtcagtagttcaagaccagcctgggcagtagttcaagaccagcctgggcaacatggcgaaaccctgtctctactaaaaatacaaaaattagctgggcattgtggcgtgcrcctatagtcccagctactcaagaggctgaggcaggagaattaattgaacgcaggaggtggaggttgcagtgagccgagatcatgccacggcactccagcctgggtgacagagcaagactctgtcttaaaaaaaaaaaaaaaattggaaagtwggtctgtgtttttatctggtcacattcagcagtatgggtgcaggtgtagaacaggtgaatggaaaaactaagaggaactctgggacagctttttaaagaatctagacctactaaatgttatgttaacaagctttactattagcagagaatgcatactgttttggtcgactggtgaaaattcttagtctgattcctgttgtctcattttacttctgtttaggtcccaggagtttaggtgtgtgttagtttgcgttgctcctgcgatttaccatgtatttgatcatgtctcaggttgatcttcactcgaaaaggggtrctccgtgtggaggggtttttaagcccccagcaaagtgaccctgatgccatgaacctgtggattccctcttcctccctagcagaagggatagatctagagacctcaaaatacatcctggccaatgttggggaccagttctgccagctcgtaatgtctgagaaggaggccatgatgatggtggagccacaccgtaagtcaccttctcacttgtcttccaggtgctcctagtgaaaaacttttattttctttcacttaacgggaagattggggacagtggcagatggcattttctgtgaatgaattaagaccgataagacttctctttgtagcaacctgtcgttgagaccttaactatatccagcagacctcattctttcagtctttggcaattaacaaaccaaatactccttctctgcttgcctttgtttttgtagcacagcagccataacatccatttaaattcccatttgggtttgcctcactctgaatattttcagtttgctttgaaccaatttgtattaataagctctgtggtttgtaaatagatggtgtgctactaggtgccatgtttcatacctagaacccacattattcatacmtttcaaatatttccatgtctgtaagatactatgccctattttccagactaagaaaaattatactgtgaaattatatcctaaatttctttttttttttttttttttgagacggagtctcgctctgtcgcccaggctggagtgcagtggcacaatctcggctcactgcaacctccacctcccaggttcacaccattctcctgcctcaccctcctgagtagctgggactacaggcgcccaccaccaagcccggctaattttttgtgtttttagtagggacagcgtttcgccgtgttagccaggatggtctcgatctcctgacctcgtgatctgcccgcctcagccttccaaagtgctggggttacatgtgtgagccaccgcgcccggccctgtatcctaaatttcaagggaggaatcctcttatttttaaactcccccagttaaaaatttttcaattccggctgggcacagtggctcatgcctgtaatcccagcactttgggaggcagaggcaggcagatcacgaggtcaggagttcaagaccagcctggccaatatggtgaaaccccatctctactaaaaatacaaaaattagctgggcttggtggcgggtgcctgtaatcccagctactcgggaggctgaggcaggtgaatggtatgaacccgggaggcggagcttgcagtgagccaagatcgcgccactgcactccagcctggatgacaaagcgagaccccatctcaaaaaaatatatatatatatttttttacaattccttaagtgacaacatgtggcagtaattcctttttgacaataggttatatcctggtattaccatgagcccttgaaataccattatattataaataagttatatagtctctttgttcagaaatactagaaattattgtattttgtttctcctacaattatagaaacacagactttatgaatctttgagttttattgctgaacaaaatagcttgagtagggatcagtgggtctggggtcttttgttattggtcaggatgatcaatgccaattctgtttcctctttccaccagagaaagtggcatggaagcgagctgtgcgtggtgtacgggagatgtgtgatgtgtgtgaaacaactctcttcaacatccactgggtttgtcgcaaatgtggatttggggtctgccttgactgttaccggctcaggaaaagccggccacgcagtggtaagtaaacattgtcctgtgtagctcgaaaggtaacgtggaggtatgtccawgatgttgtgggatttgaaaattgaggcaggaatgggcttatgcctctctttagctgcttggcttcattcaactttgttgtattttaagaccttaaaatggcaaatatttagcctaggaaggctgaaacaagacaagaaggattattcttaatttttccttggttttttttttgtttttgttttttttaaggcagattctcgctctgttgcccaggttggagcgcagcggcacaatcatggcttactgcacccttgacctaggctcaagtgatcctcctcgacctctcagagtgctgggaatcataggcatgagccaccgtacctgtgtttttttttaaataacatctttattgagatgtaattcacatgccataaaattcaccccttttaatgtgtacaaggcttagcgtggtggctcatgcctgtaattccaggactttgagaggaagataggaggatcacttgaggccgggggtttgagaccagtctgggtaacacagcaagaccccatctctacaaaataaaataaaattagctagctagatatggtggcacatgcttgtagtcacagctactcaggaggctgaggcaggaggatcacctgagctcagagtttgaggttatagtgagctatgaycataccactgcactccagcctggacaacagagtgagacctgtctaaaaatcaattaattaaagtaaatctacaaggttgtacarccattatctaattccattttcatcaccccacaccccacctgacaacccatacctgttatcagtcactgccgattcctcctcagcccttggcatccactagtccacttttttctcttttttttttttgagactaatgctaktttaacaagtagtctgctttttgtctctgtagatttgcctattctggacatgtcataaaaatagaatcagccaggcgccatggctcacgcctgtaatcccagcactttgggaggccaaggcgggcagatcacaaggtcaggagttcgagaccagcctggccaatatggtgaaaccctgtctctactaaaaatacaaaaattagccgggcatggtggcgcatgcctgtaatcccagctactcaagaggctgaggcaggagaatcgcttgaacccgggagacggaggttgcagtgagctgagatcacgccactgtactccaacctgggcaacagagcaagacttcatctcaaaaaaaaaaaaaaaaccaaaacatacactattgtgtctagtctagtgcatagctaagtaacttgctaaacagtttgattcttccaaggcttgctttacactttgttatgccttctgtgactagcccttttcacttagtgtaatgttttaaagtttcatctgtgttttagcacatgtgaaccattcattcctttgcattgccaaataatactccttttttggatatacttcattttgtttattcaccagttgatggacttttgggttgcctccgcatttggctattatgaatagtgctactgtgaacatttgtgtacagtttttttgtgtgaacgtatggttgcatttctcttgagtatatatatacatgtaggagtggaattggctagggcatatgacaattctacttttaaccttttgaggaactgccagactatattctaaagtagctgcactatgttacaatcccaccagtaatgtatgagggaattttccacattcttgccaacacttgtcctttgtcttttttgttatagccatcacagtggctgtgacgtagtatctgattgtgtcgttttgatttgctttcccctggtgactaacgatgttgagtatctttccatgtgcttttttttaacttttcttttttctttcttttttttttgttgttgtttttaagaaagggtctcgctttgtcactcaggctggagtgcagtggcatcatcatggctcattgcagcctcaaccgcctgggcccaagcagttctcccacctaagcctcctgcatagctgggactgcaggcatgtgctaccgtgcccagctaattttttttggtagagatggagtctcgctacattgcccagtctggttgctaattcccaggctcaagtgatcctcctgccttggcctcccaaactgctggaattataggtgtgaatcactgtgcccagccatttgtttattttcttaggaaaaatgtctattcaaattatttgctgcctttggttcttcctttatcttattacgtgccagaaaccctccttgccccttgactttttcattcttccctcttcggaggtataatataaccattgtacagtggtttagagtttaggctactgtgatgtggcacctatttctacctcttattgtaccaactattgtatcttgggctagttacttaatcctgcagagcctcagttttcttgtctgtaaaacaaagatatcagtacttccctcacaactttgttgttttgaatgagatgttgtatgtaacatggttagaataggacctgacacccaccaggtattccataaatgttagctgctagagtattctgcacctgcccatgaaagattaactgtcacaggaattgccctcctgccataaacaatgagaaaactagataaaatatatgaaaccacagtttttgacattgaacaacaggcaacatgggactgttatctctaagagaagggaaaaaaccaaggtgatccctacagttgccctggcttactgcttaggcacagtttctaggctacagcaagggaaagagaaccaaaactgaaactggcaaccttactgactagagacagagatgacagtctgagaagagtaaggcaaagtgctgaaaaggctggaactctctacagagacagccccttggttttttgtatatatagtaatctgtgcatgaatgagatgaagttcctcaaagcccaagatggaaccttcagaaagcaattgactgaataattcacaaaattcatgatttgtattcccaccagccagtgtgaagagtagtgggactaatttagtctcagaataaaaactattctggagcttccataacaaagtataaagcaagccttggaagaagcaaactgattagcaagttacataattgtgcaccacactaacaccaaataccctttaaaggaatatttaaaggagcacccttcaaacaaaacccactacccagaaaagtcacaaccttgcatttaatcagtaattatcgagtgtgcaaaaataccaacttacatgaccagtaagctgaggagggataatcaatcaataggwaaaaaccccagaatgacggtgataatagaatagaaaagaaccagcctggcacagtggctcatgcctgtaatctcagcactttgggaggcccaggcaggtggactgcctgaggtcaggagtttgagaccagcctggccaacatgttgaaaccccgtctgcatgaaaaatagaaaaaattagccaggcatggtggcgggtgcctgtaatcccagctactcgggaagctgaggcaggagaatcacttgaacccgggaggcagagcttgcagtgagccaagatcgtgccattgcactccagcctgggcaacaagagcgaaactctgtctcaaaaaaaaaaaaaaagaatagaaaagaaccttaagccaggtatgatggctcacacctgcaatcccagcactttgggaggctgaggcaggaggatcacttaagccgaggagttcaattccagcctaggcaatatagcaagaccccatctcaaccaaaaaaaaaaaaaagaactttaatgtagctactatacatcttataaatatgattaaggatttaaagaaatacatgatgtgatgaggagagaaaaagaagatatataaaagcccaaatgaaaacttccagagatgaaaaatatctcaggtatttacaccagatgagattaacagcagattagataatgtagaagaaaaaaaaaagactaaacttgcagacattgacaaaagaagctatctaaaacaaagcagagaaaaatgacctacatttattaattgaaaaatgccttgtagagctgcaggaaatatcaggtagtctaccaaacatacaagtagagtttcagaaaaagtgggagagcagaggcagaaaaaatatttaaataaaaccaaaaaatttccagatttggtgaaaattatgtaaacacaaaattaacaaactccaaacagtagaaacattaagaaaaccacaccaaagcacattttgtgtagagtaacaaagataagaatgacaggctggccgggcgccatggctcatgcctgtaatcccagcactttgggaggccaaggtgggcgggatcacctgaggtcgggagttcgagaccaacctggccaacatggtgaaatcctgtctctactaaaaatacaaaattagccgggtgtggtggcacatgcctgtggtcccagctacttgggaggctgaggcaggagaatcacttgaacctgggaagccaaggttgtggtgagccgaggtcatgccattgcacttcagcctgggcagcaagagcaaaactccatctaaaaaaaaaaaaacaaaagaatgacagccaatttatgagaagtcctgtaggccagaagacaacagaaaacaatggaatgaacttttttgttttgttttgttttttcttttttttcttgagatggagtctgactgtctcccaggctgaagtgcaggggtgtgatctctgctcactacaacctcatcttcccgagttcaagctattctcctgcctcagccccttcaagtagctgggattacaggcatgtgccaccatgccctgctaatttttgtggggttttttatatttttagtagagacagtgtttcgccatgttaattaatcaggctggtctcaaactcctgacctcaggtgatctgcccatctcagcctcccaaagtgctgggattacaggcgtgagccaccgtgcccagcctacaaatttttttttttttttgagacagagtgtcgtactgtcgaccaggctggagtgcggtggtgcgatcttggctcactgcaacctctgtctcccaggttcaagtgattctcctgcctcagcctcccaagtagctgggattacaggttcctgccaccacgcctggctaatttttgtacttttagtagagatggggtttcactgtgttggcaggctggtcttgaactcctgatctcgtgatccacccgccccagcctcccaaagtgctgggattacaggcatgagccaccatgccccgccacaaatattttttaaaagtagccaggcatggtgacacatgcctgtggtcgcagctacttgggaggttgaggtgggaggatcacttgagctgagaggttgaggccgcagggagccatcatcrcttcactgcactctagcataggcaacagagtaagactctgtcttacaaaagaaaaaaaaaacgagtgaccattctagcagcttttctcaaaccaagaaaagctgatagaatgcaccaccagcagatccacacgataataaagttaaaggtagttattcaggcagaagaaaatgaaatggaaatcagaacttacacaaagtaatgaagaacatcctacatggtatatatgagtaaatataaaagatctctttttctcgtttataatctttttaaaagttaattgtttaaaagcaaaaatagtaacaatatattttggggtttatactatatgtaaaattcaaatatataatagcagcacagaggaaaagagggaaaactggaagtatagttttgtaaggatcttacactttatgtaaagtgagattaatatttgaagatagactttgataagttgaagattaatactgaaaatgctacagcaaccacttaaaaacaaagaaatatagctagtaagtccaaaatgggaaacaaaatcaaatcacaaaaaatatgtaagtagttcaaaagaaggcaggaaaaatgaaaccaaaaagaaatgggactggctaggtttggtggctcacacttgcaatcccaacactttgagaagtcaagatggggattacttgaggccaggagttcaagaccagcctgggcaacatagcaagactcccatctctacaaaaaatttaaaaattagctgggcgtggtggcacacacctgtggtcccacctactcagaggctgatgggagaggatcacctgagcccagaagggtgaggctgtagtgagccatgattgcaccactgcattccagcctgggtgacatagtgcaaccctgtctcaaaaaaagaaaagttaaggtcaggcacagtggctcacgcctgtaatcccagcactttgggaggctgaggcaggtggatcacctgaggtcaggagttcgagaccagcctggccaacacggtgaaaccctgtctctactaaaaatacaaacaaaattagctgagcatggtggcaggcacctgtagacctagctactcaggaggctgaggcaggagaatcacttaggtggaggttgcagtgagctgaggtcgcgacattgcactctagcctaggcaacaagagtgaaactctgtctcaataaaaaaaaagaaaagttaaacaattaactttttaaaagagtataaatgagaaaaagatattttatatgtgctaatcttctgcctacatgatgaaaaagagaaggtacagtttaccaatgagagaatgagagatgtaggcacagtggcgtgtgcctatactctcatctatttgagaatcttaggtgggaggatcacttgaatccaggagtttgagaccagcaggggaacatagtgagaccctatctctttaataataaaaaaaaagaatgtgaggacctcaatgcagatcttttagacattaaaaggataagtaaaattatgaacattattatgccaataattttttttttttttttttttttgagacagcgtctatctctgtcgcccgggctggagtgcagtggcacgatctcagcccactgcaacctccatctcccgggttcaagcgattctcctgccccagcctcccaagtggctgggattataggtgtgtgccaccaaacctagctaatttctgtatttttagtagagacggggttttggcatgttggtcaggcaggtttcgaactcctgacctcaggtgacctgcctgcctcagcctcccaaagtgctgggattacaggtgtgagccaccacgcccagcctatgccaataacttttacagcttagatataatggacaaattccatgaaaaacacaaaccatcaaaattccctcgagaacaaatagagaacctaaataactttacattaagaacttggtcttttcctcttggaagccccctctctctcactagagagagagctgatttcctttctttatctttctctcttttgcctgttaaacctccactcctaaattcctcatgtgtgtccgtgtccaaaattttcctggcacgagatgatgaacctcaggtatttaccccagacaacgtagctgcttcatactggggacctcgtcccagatatcaaggtacagcattcatcaaaacgcaacatctggtggaggcaaaccagtgttacaacccatcggaatggctaacagcaatcaaactccaaatggtgctgcagacagaaccacacatggacgtgcctttcttccgaggactcttagatcggccccaggaggagccctacctgctgttccccacacaacacctcttttcagcaggaagtagccagaaagagtcctcgtccaacagcccctaatagtagttagggttaccactccagagcggggaatgatacaggtgttaagaagaaattacttaggtggatactgagggtacagaagtccttggtaaggttttccatttaatgaaaagcagccccaaattattttctttctaacaaagagcagcctgtaaaattcagttgcagacatagatgttagcagttatgaaatcatgttcaagatgggagcttcatcttcccttcgctttgtcaaccatatgtacagtaaggagcagacaagatggcaccagccaaggggaaagttcatttgcataataacattagggtggggtagccagccttcccctaaagctatgtaaacatcatacctgattgaaccaatctgtaatccctatgtaaatcagacgccgccgcctcaagcctgagtaaaatccagcacatctgccaccaactggtctgggagtcccctctctcacgagagagagctgttttactttctctttctttcttttttttttctttttttcctattaaacctttgctcctacactccttaaaaaaaaaaaaaagaaagaaattgaatttgtagtttcaaaaatctttcaacaaagaaaacttaaggtctagatggtggccttactagtaaattatagcaaacatttaaggaggaaataataccaattatacacacagtctttcagaaaatgggaggaagcacttaccagctcgttttatgaagccagcattatactaatatcaaaaccaaataaagacatgagaagcatagaaagttacagccccagtatccatcatgaacatagatgtaaaaatattctataaaacttaagcaagtttaagtcaagagatayataaaaagaataatacatcatgaacaaatggggttcacttgaaaatcagtgcagtccactatattagtagactaaaaaataaccacatgatctcaagatatagcagaaaaatcatttgtctaaattatcaaaaacctaggctatgcattctcatcaggtgaaaattggctcttgcttgggagggagaatctaaaatgttaacaattttttgtgccctttcagggggccataatacataaacagatatacagtatatctggtattaaaatttcttgggtggagagcacaatgaccacaaaacaaagtctgaaaaggctctttggagaatgataatgaaataatgtttgaaaaacacaactatgtataagtagaatatcatataatatgaaagattgacttcttcctcttaggttcaggaacaaagcaaggatgtcagcttttgtaacttctattcagtattttactggagttagtggtcagtatgaagaaataaaagggaaaaaggggaaaaggaaaacaaaagaagagacatacagattggaaagaagtaaaatgatttttattctcagacaacatgatcatctatgtagaaatccagagatctacaaaaaagctaatattataatgagttttttcaatattacatgatacaaagtcaacatacaaagatcaattatttttctgtatgatagcaatgaacaattagaaattgaaatgtaatgggaggttgaagcaggagaattccttgaacctgggaggcagaagcttcagtgagccgagcatcataaaatcatgaagtgcttagggacaaatttagccaatacctacaagacacatacactgaagactacaacatattactgagagaaattaaagaatacctaaataaatgaagagatataccatatttgtggatccaaagattgaatatgggctgcgtgtggtggctcatgtctgtaatcctagcactttgggaaactgaagtgggagaatcacttgaggccaggagtttgagaccagcctgggcaacacagcaagatcccatctctacaaaaaaattgttaaaagataaagaaaaaataacaataatgaaaaataggccgagcgccgtggctaactcacgcctgtaatcctagcgcttcgggaggccgaggcaggcagatcacctgaggtcgggagttcgagaccagcctgaccaacatggagaaaccctgtctctactaaaaatacaaaattagccaggcatggtggcacatgcctgtaatcccagcttctcgggaggctgaggcaggagaattgcttgaacccgggaggcagaggttgcagtgagctgagatcgtgccattgcactctagcctgggcaatgagcgaaactccttcttaaaagaaaaaaagaaaagaaaagaaaagaaaaatagagggttgaatactaagacgtcacttcttctaaattgatatgtaattaaatgcaattccaaatcaaagtctcagtaggccattttgtagaaattgacaaggcggttctgaaatgtatgtgaaatacagtggatctagaatacccaaaacaattttgaaatagagtcaagttgaaggacttgtactacatttcaagaattaatattaaagctacagtaattaagacactgtggtaagggaacagaaaacaatctagaagtaaacccacacatacataatcaattacgacaaaggtgccaaggtagttcagtgggggaaaggataaccctttcaacaaatggtactggaacaattgtatatccatattccaaaaaaaaaagaggaacctctggagggaccagccccacagggtcagtgggtctctccccgtgtgcggcgacaagagagtgtagaaataaagacacaagacagagatagaagaaaagacagctgggcccgggggaccactaccaccaatgcacggagaccagtagtggccccgaatgtctggctgtgctgttatttattggatacaaagcaaaaggggcagggtaaagagtgtgagtcatctccaatgataggtaaggtcacgtgggtcacatgtccactggacagggggcccttccctgcctggcagccgaggcagagagagagaggagacaaagagaaagacagcttacgccattatttctgcatatcagagacttttagtactttcactaattttctactgctatctagaaggcagagccaggtgtacaggatggaacatgaaggcggactaggagtgtgaccactgaagcacagcatcacagggagacggttaggcctccggataactgcgggcaagcctgactgatgtcaggccctccacaagaggtggaggagcagagtcttctctaaactcccccagggaaaaggagactccctttcctggtctgctaagtagcgggtgttgttccttgacacttttcgctactgctagaccacggtccacctggcaacgggcgtcttcccaaatgctggcgtcaccgctagaccaaggagccctctggtggccctgtccgggcataacagaaggctcacactcttgtcttctagtcatacctcactatgtcccctcagctcctatctctgtatggcctggtttttcctaggttatgattatagagcgaggattattataatattgggataaagaataattactaccaactaatgattaatgatattcatatataatcatatctaagatctatatctggtataactattcttgttttatatttattatactggaacagctcgtgtccttggtctcttgcctcggcgcctgggtggcttgccgcccacaaacctctgtctttacctcccaccatatacaaaatactaactctaagtggaccataggcctaaacataaaagctaaaactaaaacttctagaaagaaataaaatatttgtatccttgcactaaagaaatatttcttagatagaacacaatgcaaatgaaaaatataaaagtttattttttattcttttaattttttttttttttctgagacaaagtctcgtcctgtcacccaggctggagtgcagtggtgcaatcttagctcactgcagcttccacctcccaggatcaagcgatcctcctgcttcagcctcccgagcagccaggattacatgtgcccgccaccacccccagccaatttttttgtatttttagtagagaaaggatttcaccatttcaccatgttggccaggctggtctcgaactcctgatctcaggtgacccacctgcctcaacctcccaaagtgctgggattacaggcacaagccattgtgtccggcctaatataaaagtttaaaactttaccttttcagaagacacgtaaaagctgggcacggtggctcatgcctgtaatcccagcactttgggaggctgaggcaggtggatcacctgaggtcaggagttcgagaccagcctggccaacatgttgaaaccctgtctctactaaaaatacaaaaattagctgggcgtggtggcgggcacctgtaatcccagctgcttgggaggctgaggcaggaggatcgcttgaacccaggaagcggaggttgcagtgagccgaaattgcaccactgcactccagcctgggcaaaagagtgagaccccgtctccaaaaaaaaaagacatgtttaagaaaatgaaaatagcccaggcacagtggcttataacctgtaatcccaacagttacggaggccaaggcagtgggattgcttgagcccaggagttcaagaccagcctaggcaacacggagacctcatctctacaaaaaaaatttaaaaattagcgagacgtggtggctttcacctgtggtcccagctactcaggaggctgaggtgggagaattatttaaccctgggaggttgaggctgcagtgagccacgatcgtgccattacactccagcctgggtgacagagtgagaccctgtctccaaaaaaagagaaaatgaaaagctgctgtgcacagtggtgtaacacctataatcccagctacctgggaggctgagacagaaggatcactagagtccagcaggaggttgacaccagcctgggcaaacaagcccatttttttgttattgttgttctgttttggtttggttttgtagaaatggggtctcactgtgttgcccatcctggtctttaacttttacgctcaagcgattcttccacattggcctcccaaagtgctacaggtgtgagctaccatgccagcccaagctagttttaaaaaggtttgaacagatacgtcaccaaaaaatatagtcgatggcaggtaagtacatgggaaaaattgtaattaatttgggaaatacaaattaaaaccataatgagaaattattatgtccactagaatggctacaattcttaaaactgacagtattggccaggcatgttggctcatacctgtaatcccagcagtttgggaggccgacgcgggtggatcacaaggtcagaagattgagaccrtcctagctaacattgaacccctgtctctatgaaaaacacaaaaaattagttgggcatagtggcacgcacttgtagtctcagctactcgggaggcggaggcaggagaattgcttgaaccggggaggcagaggttgcagtgagccgagatcacaccactgcactccagcctgggcgacaaagcgagactccatctcaaaaaaaaaaaaagaaaaccggacagtatcaagtattatcaaggatgtagaagtagacctcttaaatattgctggtaggaatgcagattggtaccatcactttggaaagcaagaaggtcatttcttacaaagttataaagctaaaattaactatatgacctggcatcgcactgctaggtatttacaagagaaataaaaacatttccacagaaagacctatacatgaatgtttatagctgctttatttatttttttgtttttttgtttttgagacagggtctctttctgttgcccaggctggagygcagtggagcgatctctgctcactgcagcctccgcctcccaggctcaaacaatcctcctacctcagccacccaagtaactgggaccacaagcatacatcaccatgcttggctaatttttaatttttttaccatgttgcccaggctggtctcaagctcctgggctcaagttcctgagcccacctcagcctcccaaagtgttggtattacaggtgtaagccactgcacccagccgtgtagcagctttatttataatagccaaaaattggaaacagtccaaatgttcaccagctgatgaatagataaacaagttatgatacattgctgccatggaatactactcagctatacaaaggaatgaattactaatacacacaacaatatagatgactcaaaagcattatgccaagtgaaagaaacccaacacaaagactgcatcctacatgcttccattttatatgacatttttgaaaggcaaaacttattattatttttttttgagatggagtctcgctctgtcgcccaggctggagtgcagtggcgtggtctcagctcactgcaagctccgcctcctgggttcacgccattctcctgcctcagcctccggagtagctgggaccacagacaaccgccaccacacctggctaattttttgtatttttagtagagacagggtttcaccgtgttagccaggatggtctcgatctcctgacgtcatgatccgcccgcctcggcctcccaaagtgctgggattacaggcttgagccactgcgcccagccaatagcaaaactttagtattataaagttgatcactgatggccagggcttgagggaagagaattgactacaaagagcctgagagaacttttggagatgtaatagaaaggttctatgtcatgattgtggtagttgttcattcagtttctctaaactcactgaagtaaacactttaaattgctggatttattctttataaattataccttaggttgggcacagtgactcatacctgtaatcccagcactttgggaagccaaggcaggcccaggaacttgagcccaggagttggagaccagcctgggcaacatggcgaaactccatctctacaaaaaaatacaaacattagttgggggtgatggtgcactcctgtagttccagctactttgcaggctagggtgggaggatggcttgagccagagaggcggaggttgcggtgagccatgatcaagccactagactccagcatggatgatagagccaaaccttgtctcaaaaataaataaataaataaaatatcagtaaagcaggggctttttgtttttttaagttagctgttatctccttcagccatgagaaaattggcctttggggttctgaaactccattcactgagaaggatccatttttgtgacccttataaaataagtgaaatcatttctatttcagagacagaagagatgggtgatgaagaagttttctcctggttgaagtgtgcaaagggacagtcccacgaaccagagaatctcatgcccacacaaattattcctggcacaggtaaggaaattccttttttagatttggtggaagaaatgtttttagttgagatagccatacaccataaaattttttgaaatgatttagcctcattttttcttttaagcatcatcagatttctctgagaatttggatctttattattattatcattattattattgttattgaagagacccttctgtattattgaagagacacttctgtattattattgaagagactgtctgctctgtcacccaggctggagtgcagtggtgtggtcatagcttactgcagccttgaactcctgacctccagtgatcctcccacctcggcctgccaagtagctaggactacaggcatgcaccaccacacctggcttattatttaatttaaatttttttttttttcagagacggagtcccaatatgttgcacaggctggtcttgaactcctggcctcaaatgaccctcccacctcggcctcccaaagtactgggagtataactgtgagccaccgtgctgagccaaatttggatctttagatatgtgttagtgtgcacgtggccactgcacactctgctccccatttctgatcagaggacctggtcttgtttccagatatcatttcccattcctgtggttggctggaccagaatgaaaaagccagtgcctaggctttcagaaagacttctggttttaggcttgtaaaacagctaaaatggtcaggtgtggtagctcatgcctgtaatcccagcactttgggaggccaagattggaggatcagttgaagccaggagttcaaaaccagactggtcaacatagcaagaccccatctcatataattaaaaaataaaataaatccagctgaagataataagatatcttgaatccatgaggaagacagcttgctcagcattaggaatgaatggttatgtttgtgtcacaatcccagtttacttcagtgattcttccagaagttctgtatgcctaccttctgtacttccattaacatacatccattgaagatgatgactctgccaaactactgcctatattatcctccacttaagaaagctttgccacaggccaggcatggtggctcacacctgtaatcccagcactttgggaggttgaggcgggtgaatcacttgaggtcaggagttcgagaccagcctggccaacatggtgaaaccccacctctactaaaaatataaagttagccaggcatggtggtaagcgcctgtaatcccaactactagggaggctgaggcaggagaattgcttgaacctaggaggcagaggttgcagtgagccaagatcatgccactgcactacagcctaggcgatacggtgagactctgtctcaaaaaaaaaaaaaaaaaaaaaacataacaaaaaaccaaagaaaactttgctggagcatcccctggatcccttataccccactgcttctaagccaaagggtttcctgagtgcagtggtaggatgcctgctccctgcagctcttagtataaatatttagccatataaagtttacattgatctgttagtttttaccttttttttaaggtataacttacagtaaagtatacaattccaaatgtttacactctttgggacggagtctcaccctgttgcccaggctggagtacagtggcacaatctcagctcactgcaacctctacctcctagaatcaagcgattctcgtgcctcagcctcccaagtagctagaattacaggcacgcaccatcatgcccagctaatttttgtatttttagtagagatggggtttcaccatgttggccaggttggcctcaaactcctgacctcaaagcaattcttccgccttggcctcccacgtgctgggattagaggcgtgagccaccacacctggccaatatttatactcttgaacactagagaatctacccctagagtttctcctggaggatacygtgttaatgtttactagaagagggaaaggggtgtagcttagtgcttaaaagtaacagaactttaggggtagatatacctgggctaaagtcttagtgctcccgtttaccagctttatgtacttgagcaaatggcctaacttcttctctcagcctcagtttgatcatcaaaaattgaagtaaaagcagctacgttattgaaatgtggtaaggattgagggagataatgtaaagaacactcttagcacaatatgtggcatatatgagtattctggtgttatttttattgttacatttttttcccagctctttacaatattggagacatggtacatgctgcccggggcaagtggggaattaaagcaaactgcccttgtatcagtcgacagaacaaatctgtattgagacctgccgtcaccaatgggatgtcacaggtaaactggtgtgtgtgggtataactaagtgaagcctaaatttttttgtaccaggaaatgcccccttttcaactctgttatgccaggctactgtaggattcctgaggaatcaggagatggagaagcctttctagagagagcttaaataactttactcaaaggattttaattacccctgattggtacagtttctcttcatctttaaaccagttcatggttgactgatagcacaaagagattcttagcatcttgtcaagatacatacctcagggtctttgtatgggtaaagaatatagaaaaggttgctaagaatactgctggtcttcttgagtcttatctgagaagatacatggtccctatcactggattcatctcaggtgcagaagacagaaatatgaagattggctcactgagttgggttcagaggcagtggttttcacattgctttgtcagttttggttttggttttttttttttttttttttttcagacagagtcttgctctgttgcccatactggagtgcagtggcatgatctcggctcactgcaacctctgcctcccaggttcaagtgattctcatgcctcagcctcccaagtttctgggactacaggcatgcgccaccacacctgggtaatttttttatttgtagtagagacagggtttcaccatgttgctcaggctggtctcaaactcctgacatcaagtgatccacccaccttggactcccaagattctgagattagaggcatgagccaccgcacctggcctggttttctcttcagacacgcacaaccaactgcttacattccatggcctttctggcaacactgctacaacacrtcgttgatgataagaggcacagggattaatgctgagggatcttgagatatattttcagtagagttgactatatagagtatgtaaatagataaagcaaattatttagaaaaatcagtaagagtaataaacatttatttagcatttatctgtgtcagaactatgctaagccctttgcatatgctattttatgtaatcctaagaacagcactacgaggtcatttaaattaccaattcaccattgcagaaattgtgtcaggcatgctaactattttagattacaaacttcaagccttgttcactgatctttccacagaagctagcctggtttctggcatgttgtaggactcaataaatatatgttgaattaaataatgtatgaaatgccagtttacatgacagattattcttcccagacctatttagtatgtgaagccattactagttgtatttttttctacccaagcacagcactctaattatgttggccttctgcattttagcttcctagcataaaccctagtgcctcttctggaaacgaaactaccttctctggcggaggaggaccggcaccagtaacaactccagagccggaccatgttcccaaagccgacagcactgacatcagatctgaagagcctctgaaaacagacagttcgkcatcaaatarcaatagtgaactgaaagccatcaggcctccttgccctgacacggccccaccctcctccgccctgcactggttggcagatttagcaactcagaaggctaaagaagaaacaaaaggtgagatgcacacaaacctctgctctgcctatggtagaaatcatgagttttttccaggattctttgaactcacacattaccatccacatttatgaaacatgctacttactttctctggctaatcacatgagggactgccggggcctggcgtggtggctcacgcgtgtaatcccagcactttgggaggcaaggcgggcagatcgcgaggtcaggagatcaagaccatcctggctaacatggtgaaaccccgtctctactaaaaatacaaaaaaattagctgggcgaggtggcgggtgcctgtagtcccagctacttgggaggctgaggcaggagaatggcatgaacctggggggcacagcctgcagtgagccaagatcatgccactgcactccagcctgggtaacagcaagactctgtctcaaaaaaaaaaaaaaaaaaatatatatatatatatatacatatatatatacacacacacatatatatacacacacatacacacacacacacacacacacacacacacacacacacatatatatgagggactacctttcaacttctttctagaagtggaacttctctaaaaaggcagatgcctgggccctaccctggatctctagtcagaatttatacaaggggttttttttgtttgtttgttttgagacggagttttgctcttgttgcctggagttccggctggagtgcagtggcgcgatcttggctcactgcaacctccgtctcccaggttcaagtgattctcctgcctcagcctcccaagtagctgggattacaggcatgtgccaccacgcccagctaatttttttgtatttttaatagagacgaggtttctccatgttggtcaggctggtctcaaactcccgacctcaagtgatacacctgcctcggcctcccaaagtgctgggattataggcgtgagccaccattcccagccatatacaagacttttaacaagcttctgagatggttctgttatgcagccagggttgagagctagacttagagcagaagttttcactgggcacaagaatcatctggggaatggttaaaaatgcagattcctgtgtcccgcccagaactatgaaatcagaatctctgggggtaaagatctccatttttaacaagcactccaagtgacttcagtacaggtatcctgaagatacacttgaaacactgtcttaggaagtgagggagatgaaagatggatgacaacaaaagggagtttgaaattcagatctggtaaagaagtagtaggagagtttctccttggctgtgagacctcctataattatagcttgtaaggcttgacccaaacaaaccatacacagtttggggggtgcaagggaaaggagagaatctttcctccttcccatgtgactgatttttaggagtcagttgtgtgctgattattcctttttgtacctaatgctgttcctggttatgttcttacagaagcagggtccctgaggtcggtgctcaataaagagtctcattcaccctttgggctggactcgttcaactccactgcaaaggtctctccgctgactccaaagctttttaacagtctgttgctgggtcccactgcctccaacaacaaaaccgaagggtctagccttcgagacctccttcactccgggccgggaaaacttcctcaaacccccttggacacaggcataccctttcccccggtcttctctacatcctcagcagtaagtgtcctctgcaactgtagccttttcagcttttccatgaaagaaccatcagagatcagataattgggttagagggtacatgggtgatttgtgttctctacattgtcaagctgacaaggtctctctttaaagttttgggaatctttttaagtagtgaaccttttgtaccatgttaggaagtctgtaaaagttgagattttgaaatgtttcggtcatcagcagaaaagttaatacattgattgcttgtttttcttgataatagcaggcattaatttttttttaacctggacagtacatttgtattgtattctcttggatatctaatagatgtctcaaacctttaatgcgcctaagcctgaactcctgatcttctgaccataagcttgcttctccttagttttcccctactggttggtggcatctctgcccttgtgattgcttgcaccagaaatcttagaatcatttgggactcgcctgtcttacctttcatatctaatttgttagcaaatcctttcaaatttgatcttcaaactatattcagaatccactcatttttcatcagctctgttgcttcctctgttctgagccaacatcttgcctaagtttttgcaataaattccttacaggtccccttgtttctgccctttacagtctacagtgtattttcaacacagtagctagagaggttcttttaaaatatgtcatcccatgggaggctttttmttaagaaataaagaaaaataaaagaaaaggagaaaaataataaaatataagtcagatcatatcttaacctctgcctgaaatccttcaagggcttcctttttctctcgtaagatgagcagagtccttgtagtgcttacagatgagtagagtcacgcacctggactatgaggccatagccctatctgttcatcttsctctcacctccctgtcttcaactaccactctctgttctgttcactccgttccagccacacccaccttcttgctgttctttgaacatggcctggcatgctccctcttcagggcctttgcacttgttatttcctccacctagaatttctttcccatgtaactacctcacttgcttcatcatcagctccctcacctaaaccttcagtaaccctttcttcatacatcaccctttttaaaattccatcacactgtcagttctgcacataccgattttccctgctttgtttttttcacagcactcattaccatctgacctattacatgtttgattttctgtttcttgcctctcctaaaggcatttttgactattctataatatatccctagtgccatggtgtttgatccagtcatgtttagtaagcatttattgaatgaatgaattcataaggtacaatatctaaaagatagaaaagaggctgggcacagtggctcacacctgtaatcccagcactttgggaggctgaggcggacagatcacttgaggtcaggagttcgagactaacctgaccaacgtagcaaaatcctgactctttctaaaaaactacaaaaattagccaggcatgatggcacatgcttataatcccagctactcgggaggttgaggcaggagaatcgcctgaacctgggaggcagaagttgcagtgagccaagatcgcaccaccgcactccagcctgggtgacagagggagatccatctcaaaaaaataaataaaataaaaaaggtttcgactgaaaagtttcctttgcacccttgcctcccaaccacctgtttccctttctagaagtctccagtgtttctcgagatattatcatatgtatgtttttcccctaaatgttctacaccttgctattctgatttttagtttatatgtcctgcaaatcatttcaagcgaatacataaatacatttcttcttskgttttatgactaatggctgaaacgtgatgaactgtgggtgactgagccctctatacaatttgggttatttgtttctcttttggataagtaacttttttttttgagacagtctcactctgttgcccaagctggagtgcagtggcacgatctcagctcactgcagcctccacttcccaggttcaagcaaatctcctgccttagcctcccgagcaagtagctgggactacaggcacgtgccaccacactggrataatttttgtatttttagtagagacagggttggccaccatgttggccaggctggtctcgaactcctgacctcaggtaatccacctgccttggcctcccaaagtgctgggattaacaggcatgagccaccgtgcccagcctggataagtaaattttaaaaagcaaacaaaacaattactttgggtaccgttttatgtatacttgttcatcatacygccagttctttttctaattctcccatgatgttacataattatacatactttatagagatagggattagtaatactgtaagcataggattatccagtttataaaagcttccctaccttcagttctgtgaccttaggtatgtcactttcatctctgggcctgagctttcccatcagctgaaacaggtgagtgattctcagtgggatggtagtgaggaaaaaattggagagtaggagactgctttcagaatgtacttcctcttggacactctgctacacccttcattgaggtactccctggtagaaaaccattgccttgataagtcacttcagttacttaattgaagtattgtatcccttgggcatgctggttaggaaaaatttagaaccctcaaactgagtgacctttttacactcagttacagcatttgatgatccctacagtctacatgcatgtgtgctttgtatactgaatggctgatgccaaaggtatttcttaggtctcagatctctcgaggcaaaagggatctttctatacttttctttcctaaatgttaaggtaaaatatgaaggataaaagaatttaagatgttgacttattatcccccttccagttgtaaaagacattttaataatttttgtagaatttaatcagacaggtcagaactccttgtgaatacaattgtgagacagttttttgaatgccgttctcatggtgcctcagtcaagcttacctggtggatttgtgtctggcagggagtgaagagcaaggccagcctacccaactttcttgaccacatcattgcctcagtggtagaaaataagaaaacctcagatgcttcaaagcgggcctgcaacttgactgatacccagaaggaagtgaaggagatggtgatgggkttaaatgtgctagatccccatacttctcactcctggctttgtgatgggaggcttctgtgtctccatgaccccagcaacaaaaacaattggaagatcttccgggagtgttggaagcaaggtcaggtaagcaagaataagtcrttccaagggccaattctctgcctgcctaccacagmtacctggacaattccaggtctctctttttgccagggagatttagacatagtgaggttattgtaatagccttgctacttcgagttgtcttggatttttaaaagcaaggagatggccaggcactatagctcacgcctgtaatctcagcactttgggaggccaaggcaggcgcatcatctgaggtcaggagtttggccaacatggtgaaatcctgtctctactaaaaatacaaaaaaaattagctgggcatggtggtgggtgcctgtaatcccagctgcttgagagggtgaggcaggagaatcactttaccygggaagcagagggtgcggtgagccaagatcataccactacattccagcctgggctacagagcaagattccacctcaaaaataaataaataataaataaataaaagcaaggagattactaaaaacacactttgcatcctcttgtttctaagctgtatagttctgtgttcttaaaaaggcagttgaaatttctgttaggtggtgatctggcattgatatctttagagaaaaatccttaagtgtgattttaagatggggcagagaaggggttggaggtaggtagtacttttctaggcaaatgttttaaggccacacaagttttttgatagtgtgataacactccctagtttaaaaactttagcaggtgcttgaggaaggggagctcatggcattgtcattttcaatatgaggaagtgttctcaaagttggacttgtcagatttttgtcctttcaccttaaaacaatggtaggtattagggcaacagaagtgatttccccagggtgagaatgaagcataacaatggagtagaagcatttcctttcactttagttgacatgtggaaatccatggattatacaactaggaaagaacagtagagcttcctggagaagaggaggccctcctcaggaaaccctcctattctgtctcagccctagagctggaagtttttcctagattgctctgattgggatatttttgtttccacagccagtgctggtttcgggggtacataaaaagctcaagtctgagctctggaagccagaagcctttagccaggaatttggagaccaggatgtagacttggtgaactgcaggaactgtgctataatttccgatgtgaaagttcgggatttctgggatggtttcgagatcatatgcagtaagtagctttcatatctagttcagtgatagcagactggaaaataagcatctatacgcccagctctgcccttgaataataaattatattctggggcataatgggacttgaaaaaataaatgaataaaaaattaaaaacagacagccgggcgtggttgctcgctcctgtaatttcagtctttttggaggctgatgtgtggatcacttggggtcaggagttcaagaccagcctggccaacttagcgaaaccccacctctactaaaaatacaaaaattagctgggyatggtggtgtgtgcctataatcccagctactcaggaggctgaggcaggacagtcacttgaacccaggaggcagaggttgcagtgagccaagatggcaccactgctctccagcctcggtgatggagtgagactgtctcaaaaataaataaataaataaatccaaattatacccacttggtgggggaacattctgccctggtgccaactgtgtagcttacatggcaatcacatgactcccagagcatgcctggacttaatcatgtgattccatgggctatgcagagcactttcactctgaggaatggggatagaatccccgtaagatggaaaaataagacacacactaaagtagcaagtgaggaaaacaaagcccaccttgtccattatgggggtttacaagtctgaaataaaaggttaatctcccagggccaggcacggtggctcacacctgtaatcccagcactttgggaggccgaggcgggtggatcacaaggtaaggagatcgagaccatcctggctaacatggtgaaaccctgtctctactaaaaatacaaaaaaattagccgggcatggtggcagacacctatagtcccagctactcggcaggctgagccaggagaatggcatgaacctgggaggcggagcttgcagtgagccaagattgggccactgcactccagcctgggcaacagagcgagactccatctcaaaaaaaaaaaaaaaaaaaaagattagtctcctaggctgggcgcagtgccttacgcctgtaatcccagcactttgggaggccaaggcaggcagatcatctgaggtcaggagtttgagaccagcctggccaacatggcaaaaccccgtctctactaaaaatacaaaaattagccaggcgtggtggtggttgcctgtaatcccagctactcagggagaatcgcttgaacccgggaggccaagatcatgccactgcactgcagcccgggtgacagagcaagactctgtctcaaaaaaaaaaaaaaaaagaraaaaaagagattagtctcccaaaagttactgttgaaaatcggacaccagccaaaccagcagatgtttgtgggagtattctctgtcttccagaacgactacggtcagaagatgggcagccaatggtgctcaaactcaaggactggcctcctggggaagattttcgagacatgatgccaaccaggttagtgacctgcagtggtgtcatcttcagaagccatcacaaagtaatcacagaaaagtgaaatttgtctattggctttcttcccctataacaagctaagtcatctttcctgcacttttataggtttgaagatctgatggagaaccttcctctgccagaatataccaaacgagatggcaggctcaatctggcctctaggctacctagctactttgtaaggcctgatctgggccccaagatgtacaacgcctatggtatgagggagaggctaaaattgctcttttgggggactgttgttcttatttcaactatagaaggatatctgtggtcaatgtcaggtatagagatgattgcaggcaagtgctggagaagtgaatagtatccaaggtggtcttgaatatgtttgcttttgtcatattggttttcataacatccatgtgggcccagaccataagcttacatgtctccagtagtgaggaagtttcctgttaagaactctacccaaggagccatattctcgagtataagagacttgacagaataataatgaagaggtctgggtgccatgctacccagccagtgctttgttaaggccagggatgacctaaatcacagtgaaagctcagctttatctgaatacgccctaatgcccatatctgttttgtttttcatggagagattgttttttggaggtagatttgttccatggccagtgtcaatgagaaatcagtcttaaaacagtataaaagagatgaaagtgatttcttcataaacaaatagacttcactctcctaattttactcatttaacaacacccttgagcatgttttcagatgtagtgtcgacgtggattcttccaamtattggcccttcaccttgcatattttcctttctcctttagggttgataacagcagaagatagaagagttggtacaacaaatcttcacttagatgtgtctgatgctgttaatgtgatggtgtatgttgggattcccatcggggagggtgctcatgatgaaggtatgctttctagaatccactgytttaggatggtgaggctttgtcttgggaatacagttttgtgttttcatccttagggccagtggcttttccttttttttttctttttcttttttctgtttttttttttggggggcggggaggcagagtctcgctctgtcccccaggctagagtgcagaggtgcgatcttggctcaccgcaacctccgctgcctcccacgttcaagcgattctcctgcctcagcctcccaagtagctgggattacaggtgcctgccaccacgcccggctaatttttgtatttttagtagagacgggtttcgccatgttggccaggctggtctcaaactcctgacctcaggtgatccgtctgcctcagcctcccaaagtgctgggattacaggcgtcagccactgcacccggcttcttttttcttttcttattcccctggtggctttttcttgtttcttccaggtctgatgggaagtgggtgcccagtggatgttgctagataaagggggaggttctaatagagaagagtactactttgcgtatctttgactagagtctctttctagaaatgctacccttttccactttgtagcctcacaaagagaaatgaagaaagggcagagttctgacctgacctatcagccagatcagctgtggagtgacagatgataaagccaggaccttcataaaaatgaagcataaaagtgatattttgctgtatttatacttcctgccatctcagtgttaaaattaatacatgttcattatggaaatttcagaaaaagggatacttttttaaaagaaaataagtaactcaaaatcttaaggttcagggataatttctttttttttttttttttttttttttgagatagagtctcactatgttgcccagactggcttcagactcctgggctctggcattcctcccacctcagcctcccaagttactgggcctacaggcaaggccactgtgcctcactttacatttgcctttttttcttttctttttttgtttttttattttttctgcaacttccgcctcctgggttcaagcaattctcatgcctcagcctcccaagtagctgggattacaggcatgtgccaccatactcggctaatttttgtatttttagtagagatggggtgtcaccatgttggccaggctgggctcgaactcccaatctcaggtgatccgcccacctcagcctctcaaagtgctgggattatagacatgagccaccatgcccagcctacatttgccttggattttgcacacctgcagcattcattatggtgtaggtcattgtaatagacaagcattaaaagccaaccctcttcacttggtagtgatgctttatgctttgtaggcttaaatccagaatcctagtgtttgaaggggtcttgagaaaatatacagactccatatacttgtagcggaagataacctgcaagttaaacataagatatggcaacacagtttaagcaaaaaatatgttttaaggggaaattatacctccaaaaatgctgaatctctaataagtaaggaaggtttaatgttgttctgtgtgtagggagcttagaccagtatcaattttctgattctgccttacattattccagagatggagaagagtaaaactcaatttatttaaattggacatttcatttcactcagtggtactgaaatggctgactacattgaaagtgtcattttgctcttttcagaggtactcaagacaattgacgagggagatgccgatgaggtgacgaagcagaggattcatgatggaaaagagaagccaggtgctttatggcacatctatgcagccaaggatgcagagaagatccgggagctgctccgaaaggtacgcccytgggtgggctgtgctcccagctcacatatcaagagtctcgttgctgagacaccctatctagggtttctcatgtagagtcccttggcattaaagacytgttggccatgatacctctggtggaaaagcccaaaggcttgaatccacacctagaggatgttgactagaataaagttttgccatccccaccccatcttaggacattgctgcagcaagttggatttatgctgttaatgatttttaattttcccatctttggatttgattatggcttcaggttggagaagaacaaggccaagagaacccccctgatcatgacccaattcatgaccaaagttggtacctggaccagaccctccgtaagcgactctatgaggagtatggcgtgcaaggctgggctattgtgcagttcctaggtgatgctgttttcatacctgctggagccccacaccaggtgggttcctgcttgggggttgggctgaacagttccatgggctttcttatttctgcttttcttgctaatctaccaagagatttaagtagctggattggactgatctctcttatgctgcaacttattttatgcttttattttcttccttgtaacattaaggctcatttaaaaaattttaaacagggcggtcctggtagctcaacgcctgtaatcccagcactttgggaggccgaggcgggtggatcacctgargttgggagttcaagatcagcctgaccaacatggtgaaaccccatctctactaaaaatacaaaattaggcaggcatggtggcacatgcctataatcccagctactcaggaggctgaggcaggagaatcgcttgaacccgggaggtggaggttgcagtgagccaagatcgcaccattgcactccagcctgggcaacaagagcgaaactcagtctcaaaaaaaaaaaatttaaacaatgcaagctattaaagaaaaagtgacaagtcctagctcagctacttgtagcatactcttcttatcaatccccttatcctaccttcccaatctagtttctttcctcagagatagcctactgttaacagtttggtgtatatttttccagaacattttctgtgcaaatactgatatttttatgtatttcttttttcctttttctttttttttgtttttttggtagagacggggtttcgccatatcaccgtatcaagcccaggctggtcttgaactcctgagctcaagcgatcaacctgcctcggcctcccaaagtgctgggattacaggcatgagccactgcacctggccattgcttttatttatacatttgcacttacagcttttctgtgttgttataaaaatggaaatattatacctatttctcaagggtttttttaactatatcatggacattttccatatgttattgaatctctaatgtctgatatttctcctctgcactttgcccttctcaggttcacaatctatacagttgcataaaagtagcagaagactttgtatctccagaacatgtaaagcactgtttccgcctgactcaggaattcaggcatctctctaacactcatacaaatcatgaggataaactgcaggtaaataactcctccctctaccccactctgtcttctcattgcatactcacatacattacgcagaaagcacattctcctttctgagggtattctccgaaggtctaattgtggaggagaaatgatgcagggaagaagtttggggatatggagtccttttaggaagcatttaatttttttttaagtttttcttcttttttacaaaaattagcagggcatgatggcgcatgcctgtagtcccagctactcaggaaactgaggcaggagaattgcttgaactgggaggtggaggttgcagtgagctgagatcatgccactgcactccagcctgggcaacagagcaagactcccatctcaaaaaaaaaaaaacaaaaaacagtttttcttctttttaatagaatggggtctatgttgcccaggctgctctcaaactactgggctcaagagatcctctcacctcagcttcacaaagtactgggaatacaggtgtgagccactgcttaacctaatcatttctgttgtgacagtcctcatttctgtccgtttcagagttatagtattacaagtgttagtaactaactagactgacctccccaaacaggtggaaaaagcactatggcagtgtgttctaagcatgtttctgagaasaaatattgcgctgaagctgcttctcatagcagatttctatgcagactcaatttcttagagctctgctagggattacagttcatgtccctaagaactgtatccccttgtagagcagagctgaacaatcagattaggtttcctctgctcttgaaatggattggaattttaagggcagaatttcatcattaatacacttaggtactttagttgcataaaaagaacaaagagggctgggcgggtggatcatgaggtcaggagatcaagaccatcctggctaacatgttgataccccatctttactaaaaatacaaaaaattagctgggcgtggtggcacacacctgtagtcccagctacttgagaggctgaggcaggagaatcacttgaacctgggaggcagaggttgcagtgagctgagatcacgtcactgcactccagcctgggcgacagagcgagacaccgtctcaaagaaaaaaaagaataaggaagcagaattctctaggctttcactgtggcctcttttcttctggcatgcctgtggctcaagtgtatcttttttggttgttgatagatcagattgaagaggttttggagtgcagtggcgtgatctcggctcactgcaagctccgcctcctgggttcatgccattctcttgcctcagcctcccgagtagctgggactacagatgtccaccaccacgtccagctatttttttgtatttttagtagagacggggtttcactgtgttagccaggatggtcttgatcgcctgacctcgtgatccgcctgcctcgacctcccaaagtgctgggattacaggcgtgagccactgcgcccagcctgaagaggtttttcttaattgctggtagattcaatcaccttcaactctgagtctgatgcacttttcctttctttttttttttttttgagacagattctcagtctgtcacccatgctggagtgcagtggcatgatctcggctcactgcaacctccaccatctgggttcaagcaattctcctgcctcagcctctcgagtagctgggattacaggcacctgccactgtgcccggctaatttttgtagttttttaatagagacggggtttcaccatcttggccaggcaggtcttgaactcctgacctcatgatccacccgccctcggcctcccaaagtgctgggattacggatgtgagccactgcggctgtttttttttttttttttgagacagtctcactctgtcacccaaatgaaagtgcaatggtgtgatcttggctcaactgcatccttcgtctcctgggtttaagtgattctcctgcctcagcctcccatgtagctgggattgcaggcatgcaccaccatacccagataatttttgtattttttggtagagacgtggtttcaccattttggcaaggctggtctcgaactcccgacctcaggtgatctgcccgcctccacctcccaaagcgctggaattacaggagtgagccactgcacccagccaaccatagtttttatacaaagtataatcaacgttggtgtttgtttattgagatggagtcccgctccgttgcccacgctggagggcagtggcgtgatcttgcctcactgcagcctctgcctcctgggttcaagcgattctcctgcctcagcctcccgagtatctggggattacaggcacgtgtcatcacaccgagctaatttttgtatttttagtagagacagggtttcaccatgttggccaggctggtcttgaactcccgacctcaggtgatccacctgcctcggcttcccaaaatgctgagattacaggcgtgagtcaccgtgcccgtccaacattggtgtttacatagaatgagaatataaaggtaacatgtcaccttatccataacacctttcccgagctagggatgttgggtgtgtttctgcagtcccagccactcaggaggctgaggtgggaggattacttgagcccaggagttttgaagctctcgtgacctatgatcaccccactacactccagcctgggcaacagactctgtctctttatttaaaaacaacaggctgggcgcggtggctcacgcctgtaatcccaacactttgggaggccgaggtgggcagatcacaaggtcaggagttcgagaccagcctggccaatatggcgaaaccccgtctctactaaaaatacaaaaattagccaggcatggtggtgggcgcctgtagtcccagctacttgggaggctgaggctggagaatcgcttgaacccaggaggcggaggttgcagtgagctgagatggcgccactgcactccagcgtgggcaacagtgttagactccatctcaaaaaaaaaaaaaaaagacctttcctgactaccctgtttagaataacaactcctgctccagcactaccagtcccactttcactactttatttttcctgtagtattttcaccatctgagatatagctatagatacagatatagatatatttttttaatctgttacttaaccctactagaatgtaagctatttaagctctgtgaaggcaggaattttacattttactcactgcttttccttagcacaatgtctgacacatagtaggtattcataaatctttgttgaagcaatgcaaaaaaattaatggagaatagtaaaagarggacttggatgcccatgacccagcttaagaaattatagcacacatacatatacagcaactacatggttgaagcccccatgtacccttcccctttgcatttccccgcttttcctccccagaaataacctcagttttcttgtcagccctttaaaagaaagctgtctttattctcttcaccttaatatgcctgttcacttttttcaataacttttattgtgtgttccaatttcacaggtaatatatccaaatcagaaaacatataagcacgaagggaaraaataggccataatcctgctttcccctcttgttttaatgcatccttattagctgtagaaccttaaggaagcctcttaaccatataaggaaacaaagttctccaggtgttcactgtggccttagtttcygcagtttctcctctgtaaattgggcatgataataatagaacctacctcataggattctgtcaaggattaagcaaaggtccacataaagagctcagcagcagcgcctgcccaggacatagtaagcacataaatgatggtgatcagatggcctttcacataacttcattattcttttttgagtacacacctcatgccctatgtgatttgtaaatgactgtggggattgatacaggaacgcacagtcctttttgggagtttccccactaaaccagtaggcttacagtcaaggtagaacgtacatttgcatggggctgctgtgaactgactttgctgtacaccttctctaggtgaagaacatcatttaccatgcagtgaaagatgcggttggcaccctcaaggctcatgaatccaaactggcaaggtcctaggcatggagaaactccaagctcctctgtgaagcaggtctttcactcacaacacttaacagggaacggcagggctctttgctggagcagaggcccttcacccagagccartgtggtcagtattccaaactctccagccactctcttctacgctgcctcaacactgaaggttgacacaggaaagtcgtactgttcacacacacagtttgagactccaagccaagagtgccacatccctatcctgtggccttttggaaatccaaattgcctgaacatggcggggctttcctgcacattctcctgatttgagattcacgggcacacctttcttttcttttcctcttgtgcctagttaagtggraatgtgtttggagataggggaaatcacataactggtacaagtatggggtaattgcttaaacatgcctggtggaagtctgrtagcgtctctgcacgtgacctctgacaaagcccatcccaggagacggggtgaagctattccccacactctcctgtgaacactggagtcttgcaagacccagggagaacccactgcttttcccaggaggctccaggattaggaaatgtgtgtatttagtgaaaaataggtttgtagtgaaatagttactatttcatgaaagtagatatttttagaatttttgaaataccacagttgttttcctggattataaggaaaggcacattacatttagtcttcctttcgatataaaactctttgaagaaatatgatttttagaaatcagctacccattatagcacaaaatcagccaaagcagaatttttaaaaattggcttttttaggattctttttctccccctcccatcttagtcttaccttgagggaacagtcatatgagaaggaactttgtcacatctaagctgtggtgtsttccccatgtgtgtgtacaacactggtgactccaggaaccattttcacctattaccagtgttccctggggactcctcttaatgtttccaaatgggaaggacagttgatttccaacatgaggttttttgttttttatccagaaatattttcagcaaaactttccaactgagtggagtctgattaaggatttatttgaaaatggtgggattcattggcccataggtacattggaaaatgtatatctctccagctgtactgtagtgccctgcaggctgtttatatgttcacagttacttttttttttttttaaataaaagtcatttaatgtagaatacttttaatttcactttctgtattttaattttgttgaagggctgattgggatttccatgttcttattaaaaatctaacaaatctgtttggagtggactaaattattcgtgtaccaacccttctaaaatcaacatcagattgggagttgggttggaggtgggggattcatttccaggtcttcatgactgtgctacacccagatatttttctttgcttgttgagactgtgccatgttaggaaaaaggaaagtgccagggtgaggtcagtatggtttggggaattgggggtaaggggaaggggccacatgaattagagggtagaaagagagacatgtttccccatactttatgctttgtgaatggagtgggaaagttggggtcctcccttcctgtggcagagtctggggggaagggtcatggtgtgtggcctcagcaaagttggacagtctgtggtgggattcttaagcaggcagcctggctgcctacatgaaacgtgtggccatagatccaccttagagatggtgggagacactcatgtgggatttatcaagcagtaattaaagtgtttcattgtggggtgataacagactgcattccaattaggagatgttttctggagaggaagttgtaaagaatagcaagaggggttatcagaggctgcttttctggaacgttttgggaaacatcttccaaagtgtttgaacctggaaatataatttaccaggttagaaatagaccattgtgttgttcagggatactgagcttgaataagaccatgactctttgaaatacacagttctgaatgtgtcctttcagcccagatgggcacaggttgatgctgtggtcacccgaaggattacaactcaacataaagggtagaggaatgcagaagctctaaaatgggacaggaaaggagagcaatagggctgggggtgttggtggatggttggaggttggttgctttcctgaagatcaggaggcaggctagcctacattctggatataaatgtctttagaatcaggacattcactgccactagtgcttgctgatgggggtggaactggagccccaggaccctctcgcagcccctctgtttgaaaagaaggttgaccctttgttgtcagtaaccacattgagagcataaagctctgttccgctgcaaagcttaggagctgacaacctaaaaaagcagaccagcagcccggtggctcacaccagtgatcccagcactttgggaggctgaggcgggtggatcgcttgagctcaggagttggagatcagcctgggcaatattgcaaaaccccatcttggcaaaaaaaaacaaaaaacaaaaaaacaggaattagctggtggtgttttgggcctgtagtcccagctactcgggaggctgaggcgggaggatcattcaagcccaggaggtgtgctgagattgtgccactgcactccagcctgagcgacagagtgaggacctgtctcaaaaaaacaaaacatcatctggtcaggggagatcctctttcaacggggtgagaaggagtggggtggacaggtgcggctgtacctgtgactcaggagctcaggtggatgtcttcagggcctgtaatgaggagagtttgctagtcagcagttgggggatgtaacctgtttaaagtaggcttcctggggtcatcttagcagcatgacttggtggctttgtgactctcaacagattattgagccttaagcttctcattcccttatcttcaaaatgagggcttttatagcgcctgccttatagggtggtcaagaggattcactggcaacgcagtgaagctcttagcacaggggctggcacacagtaagcgcctggtgtgggcagggcaggaggtgggcaggggtcgatttcaggatgtaaccatggagacctccacgacaacagcctagggcttgaaacccaagaaagatgaacaagcgattcgaggaaggcagggcactgagggtcggaggcgcatgcccggccacagcaggtgccggggcgggggcgcgccgccgccgccgcggcggcctcccggcctcccctttaagagccgccaccgcccacggcccgccgctgcggcagggacctcccctttaacggcggcgctgggcgctccgctgcccccgcggcggctgctgcagcggctgctgctgctactgcggctcctgctgccgccgccgccgccgctcggcctcaggcagctgcatcctcggccgggccgggtccccgccccgcgccgcgcccggccccgccatggtgtcctggatcatctctcgcctggtggtgtgagtgcggcggcggcggggggtgatgcgggctgtgatggagggcgggggtgttaaagcccgggtggacttctccgaagcttcgtgcagcagagtcacctaaaggcgctgcgtccttatttggggcccccagagacatggagatgtggcacccaggactggaggggggaatattaggggagcgtggcaggcctggcttcccagggacctcacccacattctttattaataacctcttttatttctaccgtccttgctcctgcgcccatcctagaggctgagcagcacggcttgatttaaaaggggaggcaggcgcgtcccctcccccacctagcaggtctgggctggaggagatcctcagacccgggccctgtccctctgggggaggtaacagggtgatggaagagagtggagcaaggcagggcctcatcatcattccgcagctcagagccatcaccaggccccttggtctctcccttccactcactgtcaggagactggggacgagggcatatgcccttaggccccctagggaggaagtctgggtatcgggaagcagaaatgctcggaggacaaagtgtgagaggtaactgggagaggggatgtgtgtgctcagcctgggattgtggaccccgctgggggaggacgctcggtggccttcattccaggctgccagccacactgtggagctgtgtctctggcacctccccgggccccaggagggaacacacaccattccccacgagcccagactttgtccttgaggattctgctccgcactccacttgcaccagccggtttggaagtatccctcctgtccatgtggaaacaggcgacagccacacattgtcaaggggctgagcctgacaggggctcctcgtggttctcggagctatcccctgccctaatgaggacactgcccctcggcctccaccgttggggactgacaccggcagccccaccctgctcccttcttcccattcggtacagccgggccggccaagtgcttctgtcctggtttactctagactccttctcttcccccacccatcccagggggaatggaggggcctcacgcctccatgtggccttcagggtggctgcttctctcttgcctgggcaagccccaaagggcatcggtcctcttctttcccggcctgtgtcttgtctgcattctgtacttggatcaccagcggggccctcccctgagccctgtccctgtggtgtttacatgggggaataagcctctttgcctctctcagggcctcctgcccctgtgccctctgttccctagggccccagggccacagtggtacctctgcctgccaggtagggtgccctgttaggtggtgtcaggttccctcgcagagcctggctctgagggaggtggagggtaagggcagatgggtgtgaatgggcatgaggtcaagaaggaagacaccctgtggcagtgacctgactcccagtctccatgacatatttgtgtgtaaccaaggatcatggcgcaaggaactacattggaccctctggcctctgggcctttccctgcctccggggctagagaaaaactgaacagtggagcggggagggggcatcaccctacctggctgggcatgttccatgctgctttgaccttaacccctgacctgagttcatcagtccagcggggagttctgtctctcttcccattacttacccaggggctgatgcggagctgggagggagaggccactgcccttggctgagaggcccagtaaccatgcctgcctccctaggctcatctttggcaccctgtacccagcctattcttcctacaaggccgtgaagacaaaaaacgtgaaggaatatgtgagtggatgacccttcaccccctacccaacccacatggcacagagaggggagggcactgggtcctattacagatgggggtgactttgcaccaacactgtcagccactaacaagacccaccagcaaaggagggccctgggtgtcccacacagcgcctccaacatggctggcaggcagaagtggggtccttggtgttctccccagcccaggcatgttcaacaggcagagctggggtcctgggtgtccctggcccctcagccccgtgccccagccagcgcttccctctgtccctcaggtgaaatggatgatgtactggatcgtctttgccttcttcaccacggccgagacgctcacggatatagtgctctcctggtgaggtccagcgtcccctcctgtatctcagggcccagggcctctgcctttctctacccagccagccaaacaaaagactgggcctgggggtgaagctcctcccattcctgacaatttcgtggggtccttgatatctcccctctcatgcctaacttgacctgcagaagaacagacatagtagtgccaggcgagggggctcacacctgtaatcccagcactttgggaggtctaagtgggtggatcatttgaggtcaggagtttgagaccagcctggccaacatggtgaaaccccgtctccactaaaaatacaaaaaaaaaatagctgggcatggtggcgcccctgtaatcccagctactagggaggctgaggcaagagaattgcttgaacccaggaggtagaggttgcagtgagccgagatcgcgccattgcactccagcctgggcaacagagtgagactccgtctcaaaaaaaaaacaaacaaacaaggagtaagaacaaacataatccccatgtttctttctggcggcagccagagcccctcagtggaattcaggaaacccgcttctgccatgctgcctgcgaccttaggcaggtcacagctctcgaggcctcagtttccttatttgtaaaataggcatatgattcactcctataaatgctggatacttgcatttccaaggcattttccaggctgtactagactacgtatgtatgagcactttgaggacagggaatatgtcttaatcatctgtatattcacagcaggaactcaaaaatgtttactgaatgatcagatacctcttggaagaggggactaataacacagttcatcggaactcaagaagagaattttaccaagggggagaggacaagagatcattacatttatagataagacccttgcatttgagaaaaatagttttagaagaggaaagagatggagagatgggttaaaaattgagggtaaaggccgggtgtggtggctcacgcctgtaatcccagcactttgggaggccaaggcaggcagatcacgaggtcaggagatcgagaccatcctggccaacacggtgaaaccccgtctctactaaaaatacaaaaattagctaggcatggcagggcgcagtggctcacacctgtaatcccagcactttgggaggccgaggtgggcggatcatgaagtcaggagatggagagcatcctgtccaatacggtgaaaccccatctctactaaaaaacaaaacacaaaaaattagccgggcgtggtggcgggtgtctgtagtcccagctactctggaggctgaggcaggagaacggtgtgaacccaggaggcggagcttgcagtgagtcgagatcgagccactgcactccagtctgggcaacagggtgagattctgtctcaaaaaaaaaaaaaaaaatagctaggtattatggcacctacttgtaatcccagctacttgggaggctgagacaggagaatcgcttgaacccaggaggcggaggttgccgtgagccgagatcgtgccactgcactccagcctggcaacagagcaagactcagtctcaaaaaaaaaaaaattgag

SEQ ID NO: 96863 - DNA, 152958 bp, Homo sapiens
  misc_feature (1)...(152958): n = A,T,C or G
ataaaaaccctcagcaaactggatacagcaggaacatgttcccaaataataaaggccacatgtgataaaaccacagctaacatcacactgaatggtgaaatattgaaagcctttcctctaagatctggaacaagacaaggatgcccaccttcaccactgttatctaatataatactgaaagccctggtcacagcaatcagacaagagaaagaaataaagggcatctaaattgcaaaggaaggagtcaagttatctttgtaggcaacataatcttatatttacaaaacccctaaagactccaccaaaagctgttaagaactgataaacaaattcagtaaagtgtcaggatacaaaattaacatacaaaagtcagtacagacttttttttatttagattgctttcttgatttatttttcatgttgtttgctgttagagcataacatttacaatagttacaaataatataaaataccaagcaattatcttaagtgaaagatctgtaaaagaaaactataaaacactgatgaagaaaattgaagacacaaataaaaggaaagatattctaagcttgtggaattagaagaatattgttaaaacgacaatactacccaaaacaattttcagattcaatgcaatctctatcaaaataccagtgacattcttcacagaaatagaaaaagaatcctaaaacgtatatagaaccacaaaaagactctgaatagccaaagcagtcctaggggaaaagaacaaagcttggggcatcacactatctgacttcaaaatatactacaaagctatagtaaccaaatgaccataatactggcaagaaaatagacacatggacaaatggaacagaatagagaacccagatataaatccacacatttacaaccaagtaatttttgacaaagcaatcaagaacacatcatggtaaaaggatagtctcttcaataaatggtgctgggaaaactggataaccacatgcagaagaataagactatctctcagatatttcttccttatctctttgatttttgatacaaaaatcaaatcaaaatggattagaaacttaaatgtaagatctgaaattatgaaactactagaaaaatgtatttgggaaatactccaggacattggcctggccaaaagttgttttattttgtttttttgtttttggagacagggtctcactctgttacctggctttgaatgcagtggtgtaatcacagctttctatacccttgacctcctgagctcaagcaatcctcccacctcaggctcctgagtagctgggatcacaggtgtgtgctaccacatccagctaattttatttattcatttaactttatttttaaacttttaatgttttaaacttttttctttaattttattttaatttttaaacttttaaaattctttttgcaaaagtagggtctccctatgttgcccagactggtctgaaactcctggggtcaagcaatcctctgcctcagcctcccaaagtgctgggattataggcatgaggcacaactcttggcctggccaaaaacttttctgtgtaagaccacaaaagcactgacaaccaaagcaaacgtagacaaattagattatatcaagctaaaaagcttcttcacagctgagtgaacaatcaacaaagtgaagggacaacccacagaacaggagaaaatgtctgcaaactatccatctgacaagggattagtaaccagaatatataaggagctcaaacaactcaataaaagaaaaataatcttatttaaaaatgggcaaaagaatagacatttctcaaaataaggcatactaatggccaacaggtaaattaaaaaaatgttcaacatcactaatcatcatagaaatgcaaatcaaaaccacaatgagctatcatcttaccccagtcaaaatggcttaaaaaaaattttttttattatactagagacgaggtctcactacgttgcccacgctagttttaaactcctgagcagctcaagtgatcctctcacctcagtcaccatgggcggcctaaaatggcttttattaaaaagatagagaataatggatggtggcaaggatgtggagaaaggggaaccctgctacactgttggtgggaatgtaaattagtacagtcactatggaatacagtatggaggttcctcagaaaacttaaaatacaactactgtatgatctagcaattctactactacgtatatatccaaaagggaaatcaatacattgaagagatatctgcactcacacgtttattacagcactattcacaatagctaaaatatggaatcaaccatcaatggatgaatggataaagaagatgtggtctatatacacaatggaatttagccataaaaaaagaatattgggcctggcatgttggctcacatcaaatctcaacactttgggaggccaaggcaggaggattgcttgaggcctccctatttcaagaatatatggaataaaaatttgggtttgctatgtttttatttttattataatttctaataaagttgtttttccactatccctttattgctgcttctcaggactattcataaaatgaccaaaaatacaaaaaataaaatgatagtaaatgacaatgactatttttcctgataataccaaaggttaaatcaatacgtttttccttttagtagcaacacaagacaaggggatagttgcaagaggctccagagatcatttaaattatttatgcgtaattggaacatatatttgctagtgtacactagcaagaaaagagctgtaaactggctatatgttactgcaccttaaaaatgcatgtggatgaattttcttttaagaaaactgttaaactaaagaaaaactatgtaacacacctagaatgtaatctatctggctctgacagattctcaaatgtttaatcatttaaaaaatttgggataatagttttttggaatttttttttttttgagacagggtctcactttgtcacctacactggagtgcactggcatgatcacagctcactacagcctcaaacctctggggtcaagctagcctgccacctcagcaccctgagcagctaggactacagatatgtgccattatgcctgagtgacttttctaaaatctaaaatcaattctatatgtattaaaagttatgtattgcaagcgcctaaggtccaaagtctggactagactattcactagcgatgatctgggcaattaacttctttgaatgttaatttcctcatatgtaaagtaagaataatgtctaccttgcaggatttttgtgaagagcgaataaatcaaatgaacctaaaacaatgtttgacattttgtaggcctttggcaaatgataattgctacttacaaaaggctatgatgttatttggttctttggtgtctgaccaattttaatcatgttagtgatttttttcttgggccttgttaattgcagttcccacaacttctcttcaatcatcaaccaagttaaacttatttcattcatcagttattatttactgaaaacctcctatgtcacacacaattttaaatatttattcactctctacacataattattgtcagaatacctagacagaaaaatgctagaaaacaatgaatctacagaagaagtggtttatatcttacttttatagcaccccagtcagattatcatatagcaagatcttaataaagatcttaaacagggataaagtatattttcataaactatcaccatagcaacatgttctataaaaatatattttttcaacttatttgactaagaagaaaaggatgtgaaattatagtagaagtgaaacaataaaaaggttagaaaaaaacaggaagcaaaacacgtttactaaataactatcaagaggattctactgatacctaatataccaccacactgctttatatagtatgcctttaaaatattaataaaagaatttctcacagtaacaggaagagactcaaaagctaagcaaaataaaaacgacagaaagaacatgtgtacatgccaagagtgggcactaatactgttcattggtgtaccgtactgtgtgctttttagactaaaagattttccaatgttatagtgaagcctatgaaataccaactactctaacaagtttttatcccataaaccaaacagataggagtaaaagatatgggaatacattttcaatttcattgaatagtaagaatatttctgcttgaaacattcctagcctggctctcatttctacaataggaaacaggataaaaagggtggcctacacaccctttgaaattccatttctgaaatcactgtcttattctcgaatgttagaactttttatgagatctgacatattctcaagcagctgtgaagtgcattaaggtatcaatgagtatccccatctacctcttccctcccacttttccaaaaatacagctgtctttggagacttaaatggtaaaaatcaacagataaaggagtcctagacagatatgcaaagtcaccttaaggatcaaagctgcagaataagacatggcagtatgagcataatataataataattgatattagtaaaagaactcatcaatataaatggagtgtggatggtcagaaaaagaagaaagtaaaagaaagcaagataaatattggcaatgcctacttaaatatccattgccacgatagggataacctagcttcatgctaccaaccattcagaatcgtaattaatcccccatgcaggaagaaaaaaatatgatactgggatatgggagaaggtcatcaagcctagatttgaaaccaggatataaagagctggagttacaggcacctaccaccatgctcggctaatctttgtatttttagtagagacggggttttaccttgttgcccaggctggtctcaaactcccggcctcaggtgatccacccacctcggcctcccgaagtgctgggattacaggcgtgagccaccacactcggccagcgttttcccttagactcgaaatttcgctcctatcgtcccatccttgtagtaagaaagtactctttctaaggtttaataacaaattttactcttggcaattacaaggaaatcgactatattaaaatagctaacgagaggaaattactgaagctacaaagtcaaagtctcataatcaaagttatccttgacaactgacaagagttgttagatcttctattggtctttctgctaattcaaccctagtcttaaaacaaaaatagcctcctattgcctaatcccttgtacacacaaaaccactgcacttcggtatttctaatacgagaaagtttctatatatccaacctttcctatctttgaggggcaggcatggttaacgtggttctcagtaagatattcatttacaaccaagagaaaatcccaggctatcatctcacattcttgttttactttaaaaacctttctaacgtcatttattctctgacaacctcaaaattactttctacaaagcaaactctagaaatctaaaaatgcgaagtgcgtgcttgtgagaaggtactaaggaaattcttcctttaaacgtcaaatgtgaattctaacttctaatgagtaagaccctcgagatttacagcggtggtctggtggaaagaaaacccttggcactagtagctcacaaaaccccagcccatggttgaggcggaagcggccagatgctcccgggctttcgacaagccgccctggaaagcaggcccgtcatcttcagcggaaagctctctcacgtctgggcccgcaagcccggagggttcgtcataaacacacaaggcaaggatagaagcgaggccgaggggctggtcacgcaactgtcaaacgaagcccacccaccgactgacaaggccccaaggggacaagcgatccccgcgcgggatactcacccgttacctcaggatcgcgactacaactcccaggaggctgcgcgagcgacggaccaacgcccttcccagaatgcagcacagctgcatccctaccccgccctctcctttctccgctcctcctgcttttctacccgtcgtcacccgggagagccggaggtagggttcgggaggaggatcccgaaggctcggcgtgtcgcgtcagacgccgggagggggacggggcggggagtagtgggggagaatgggaggacgaaggggaggggaaaggacaggggaggggagggtaaatagtgggccaggcaggaagatggcggcggtagcggaggtgtgagtggacgcgggactcagcggccggattttctcttcccttcttttcccttttccttccctatttgaaattggcatcgagggggctaagttcgggtggcagcgccgggcgcaacgcaggggtcacggcgacggcggcggcggctgacggctggaagggtaggcttccttcaccgctcgtcctccttcctcgctccgctcggtgtcaggcgcggcggcggcgcggcgggcggacttcgtccctcctcctgctcccccccacaccggagcgggcactcttcgcttcgccatcccccracccttcaccccgaggactgggcgcctcctccggcgcagctgagggagcgggggccggtctcctgctcggttgtcgagcctccatgtcggataatcagagctggaactcgtcgggctcggaggaggatccagagacggagtctgggccgcctgtggagcgctgcggggtcctcagtaaggtgagcaacccctggtgccaagggacccctggccagactcacctgcagcgaggcaatccgctgaggcggtggggtggggctggcgggaggcgcggaacgtgccggggtgcgaggctgagtgttgctgcagcgactagggatgaggcggggatataggggcactgtccttgttgcccgggggctcgtcgggggcagccgaggaccagggaaagggtgtataaacctgagatccagtttgggaggccagatgcgcgccgtgacttgggacttagggcggcagctgtcccgggtgtaaggaatccgggttgggcttcagcggtgtccgaacgactgggcatgggagcggttcaagtcggacctcttaaaagaggttggtctctctgaggatgccaagccgagtaggttggggggcactgcggacgcaactctttcgacagaagctggagcgactcagcttggtgttgaaatttgaggtgttgaattctgctaggttagatgtagtgagacagatgaatgtggaggactttctccctcaccctgtaccttagttcagaatagagatattgaatcggcacatgatgggtacaggaaatattcatagtaacttggaacatgtgagaatggagactgatctttagtccaggaagagcattacttaataataaaatatttttgcggtaaggggtcgagggtaaggaaaagatgttttatcttttatatattttttaaaatccctgtatcaaaattttagcaaagcagtcattataggactgcaggtggatgatctcttgatattacatagttgtggggattttttttttaagtttttgctgtaagaagattcacgtagcctttttgacttctctctcccttcctgttaaacttttttagacatggctggagctagcagttaacttggagagggggagctgggccagtccctcaacaagctggtcataagatactatgtcatgtgcagccagtggctattaagaaatcaccctgtttccagtattcatatttggcaaatcacttggacattatttgtggaattgtttcatattaggcttttataatgtctagaaagctaatgagaagggggccaggaaaggcatgagtagtcagaactaaggattgcaagtgttgacttttatttgtatagcagcaaaattatgttgtatattgatgctgtgatcattcttgaaatttcagtgcaaggttttcagtaacgagaagctcctcaggatttctttagattaaatgtatcctgtaatttaggaatctctattgaacacattgtgtagtaggtatacattttcagttggtaataggaagtgggttacttgcttctcagtgattttggtagtttcatcactgctcataagatgggaagctgactgccatattagtattgtgatgtgttaagtattttacgaaacaaattgtacttttgacctactgataattacttttttgggggttgggggagtggagtgaccgggggaaaaagtaaccagtgctctggagtaggtatactatagataaaaaaatggaagaccaatctcgatatttaaatgcatacaaatgtatttgatcacctctatggaaggtgaatagcttaaattttgactgttgctgcatatgtagaatgaataggaataaagcttttggtattcttgctcaaagctatgaaggaaattttcctgagatttaccaatttatggttatatacagttttctggaagctttttaatcaagggtattctaaattgagtatatatactcatactgagtatggtagatgtttttaaatgtaaattatatagtttgaattctttgtattcacctggtaatttaaacaaaggtcagaactcggattttgttcttttccttccattgagtaatgtaaataagtcccggtacaattcattttgtttctcccccaaaatggggtggatttggaatgggcttgggtaaatttatattagaaatataccagttcaaagggtattttccatatggtaatctgaaatacatggaaatacctatgaagcatatttcttataaatcacttaagtgtatagattccaaaaatactagatagacaataattctatctagttatagcaagtatcgtgatggatcatggtggggaaaagatgcatgccttagtaggacttgagagcacctaagcctggataaaataatctcattcaatttctgaatttcctccatccttcatggtttaccttctgtttttccacacaccaaactgtttgaaattctgtccatccttaagagtccaagccaaatactgtcctttccataaagccttttcttattttgccatcattcaagacctccttcacttgaattcccatagcattttgtttgtagcttgcttctgactcttattctaaatatatatttttttctcttgagtttgtgtctgctggcctgttggccacagtaatatttgattcccctgcagtgtctagcatattgccttatctgtatttgttaaatggggaagagtgagggaacattatgagagcagagaaaagacaaaaaacttgtcttccaggtgtcatgatacagctaatacttactgagtaaagggtcctgaagctgatacagtttgttcagtctcttataagaactaatattaagttatggatacataattgctggggcttctcctctaacattgaaagagttctattctagtgagaaatgctgaaggttaagcttcattagctatgtataactcttcctcagattcagaaaatactatgtccaggcactgttctaagtctattcttgtttaaacttaactctaagagaatttgacaaagaaaaaaagaacacaaagagaataagtaacttgaccactgtcacaaagtttagccttatgaagtgtggtaattgtaaatgaggtaggattaatccatgaagggtcttgaatgccctaaacaatttgtatgacagtcagtgggaagttgtccatgtaagttttggagctagagactcaatacgatcaatgtaagaaaagtaggcaaatatgcttagtaagtaaataagcttgtgtaaattatgaaaaaaacagaagatactagagaaaaaattattaagtctcctaaggaatacaggaactggataatttgattggaatagttgaaaatgagaagaggaggcaaatttaagggtttactatgaaggaaagatgagcagcttttggtaatgggctataaatattgagaaggaacacttaggtattgagtatcttctgtgactatgctaggcattttcattattttattcagccgtcagtcaacaggcaaagaaactgaagtttacaaaagtaacttgtcaaaactctcttcacatgagttataaaatagttgagcctattttatcctatatccactaatctgtttgtatatctaatacactaactctgagcagaagtagcagtctccccaaggaagtaggaaaataggaaggaagtatactttataggaaggtgaattcagttttattggtaactatcatttatttcaagcccgtgtctaagtggtggtacatctcaagcagttagaaataaggaaatggtgattgggagccactagaatgagttaaatgttggcttgggtgagttctcagagagtggttgtaatgatggggcttagaaaaattaagaactggctagggatggtggctcacctgtagtcccagcactttgggagaccaaggaagacagatcgcttgagcccaggagtttgagacgagccttggcaccatagcgaaacctcatttctacaaaaaattagccagatgtgggggtgcacacctgtagtctcaatcacttgggaggctgaggtgggaggattgagcccaggagattgcggtaaactgagatggtgccactgcactccatcctgggtgacagagcgagaccctgtctcaagaaaatactaaataaaagaaaatttaagaagtgaatcaatctcaaaaatgcttaattagagaacagaaaaataaaagatttctcagtggatatagagcctgagccaatgcagtatattttggcaatccatttttaattagtttttggaattggcagatagtttttgagatttttctatacttaacaccccagagcatagataaaaacatgcaaaaataagtattcctgtaaaggttacatttctgccttttccagtttattgtgatcttcactttgcagcaagactttagcaacacagaaactcttaaggtattgaagacaatccaatatgtttttgaaaagcaattttatttttgttttattactcttgagtttgaaaaatgcatgttcagaggaacttggaaaatgtattggccatttttaatattattcagttctgtagaggaaaagttaaagttgatgccagcttactaaagattattatttttattttgatatagttacagctgttataaattttcatataggaataacaacaaaagtagagtttagcaataattgactttatacttccgttgatttagaaggcttcatgcagtctttggtgtcagaatgagagactacatacataactgaacatacttctctgttgaatatgttaattatgacaaggaccaaaacaaatatcatgaaggtacttaggagaggatgaaagcatacgaagaataaacaataattttaaccaaaatctggctttcgttttattcttcaaatgttagaagaaaatgttatattttatttcttacagatttatttataatattgtaaaaattactgaaaatcattatgcaatctagaaaatctcaacttttcactttttgtaatcattttactgtttatgcttagaattaagttggacttttcacgttttggttttaaaattagattgctgtttcacaaagtttggatttctaaaatacttctattttttgttttcttctctcttcccttccccttcccactcccagtggacaaactacattcatgggtggcaggatcgttgggtagttttgaaaaataatgctctgagttactacaaatctgaagatgaaacagagtatggctgcagaggatccatctgtcttagcaaggctgtcatcacagtaagttccttttcttcttcattcaacaaatatttattgagtgtcagctacataccaggaactgttctacrtgttcaggatacatccgtggataagataaagatccttgtccttgtagaatatacattctaatacttttttccataaagtgattttactgtggtttttactacatattgttattttgcatagacatgtagtttttatctggtgggtatatcaaaccagtttaagggcttcaggaaaaaaaaatgtttgaagcctttttatttgttgaggctgggacagttactttgtaggttactgaatatttaaaaataatacatcttgtaagtaacattctaaaattttaacttaaaaatataaatgtaaattcatttttaaactttttaacattgagctaatgccatctctttgtggagttgggagaagctgttctcatgttcctcacacatgatttgctatttacagttttgatttctctaatgtggaataaaagcctgaagataacttttgaaaaactctaagtataggctccttctaactttttatgatttccccttatattttgcagttacatcacttttctccaattcaacaccctttaaaagaataactcaccttcgttgagtcattctacttagtttacattttgttgttctttttttgtttttttgttttgttttgttttgtttttgagacagtcttgctctgtcacccaggctggagtgcagttctgtggtctcagctcactgcaacctcgacctcccaggttcaagcaattcttctgcttcagcctcccaagtagctgggactatagccacgtgccatcacgcccggctaatttttgtktttttagtagaaatggggtttcactgtgttggccaggctggtctcaaactcctgacctcaagtgatccacccacctcagcctcccaaagtgctgggattacaggcatgagccaccgcgcctggcctacttagtttacatttaacttagtatatagaaacaactgttcctttttgcactcgtagtcattagacatgaataatgtttaagatatgtaagaactataacaagtaaactggcataaacaggtttgggaacaaccaactgacttgttaagcatgtaacccaactagtgagaacagaagtacctgataatacaaaaaatagcatactggttaagaatggtcagcatgccatgggccaaaaaaaaaaaaaaaaaagtgttggctaaggccagacagttaaatagaggtcagttaagggagctgttgtagttaaaatctgaaaatgggtacgttaaaacaaaaatacagagtttactaactcactcaaagagaagtcacattttgtgatagaatttatttggcttataaaagtgaaagatatatatataatacttcagatttccgttaatatctaatccttacttagcgtatgtttgttatgcatttagggaaaatcttacagtatttttacattattttttatacattatttccccccttgtatattcaaagtttgaaaacaaaagtttagaattgaatatcaagttagagaaacacagaagaaatatttggaagtgttgataatgaaactacgctctctattcttagagacaatttttaggaaatagctttaacataaaggctcagtatttattttgactggtatgtggtacattgtaatgtgtttagaaattgtatctagtttaatattttgggtgtttttcttccgagatagatcattattcatatcaatggacagaatagtggattgaaatgtaccttgcgatcttgaagtgtttttccttgatcctccactccccttcttttgcgtattattattggatgtttattagttgcaatgcttaactctttgaaaatagtataatgattgatgtaaaaatggggaggaattaaattttatctttattattctctaagtagtagtattcctagagtaccatgctagtttctgtggatttaaatatagttattctgtcttgaattatggactataataatgttgcctggcttatttggagaaaagaaaattttaaattaaacatttaatttaaatgtttaatttaaattaaacatttaatttaaatgtttaatttaaattaaacaaaaaatttaatgtttaatttaaattaaacatttaatttaaatgtttaatttaaattaaacaaaaaatttaaatgtttaatttaaattaaacaaaaaatttaaatgtttaatttaaattaaacaaaaaatttaaatgtttaatttaaattaaacatttaatttaaatgtttaatttaaattaaacaaaaaatttaaattttaacatttatatccatcttctcaggaagaaaacagtgttactttattgtaattgatttttgttatagctatatgtacatgcataactttcattgtggtacatagtaaaagacatgcgtaggaacaagaaacaatttgaattctttgaaggagagataaaagtagaagtaaaaagatgaattaggcaacaaaatctgtgtggtagtcttagatacaatgaaatggatgataggaaaaaacacaagcatttatattattgaacttgaactttccttgccctttgggttcacagactccatgttacatatttaaaggaaattaaaaatataactgaattcagtgaactcaggatgagtttacaaattagagtatgtactttagttaaataaataaatgtaatagtaatattcctcattaaattttaataggcatctcttggtattttttttccttaaatatgggctatgcctattgtcacttcatgtcagaatacaaagaatgtaaatgtttaatttctttatatggcactcttatgaaattgataatattcacgtacaaagaaatctgggcttgaagagttgatgtgactttactgtaaccattcattactatattatttgttggtggacctagcatctgaacccacatttcttgatagagcctaatccattttaagttcattcttagtttaatgattaaatcactcttaatttataaaaacaatattctttatctgtgtgataataaagtgggtgaaataatttcaaggaagaaagtatgtcttgagagaatttattccttaatgtgaaaggattgacagtaagtaggtgagaggaaaaatagtattcccttactttgtgtaaaaagagctatttgtatgtagaataagtgtttgtagaaagacagttgaattcttcagttattatagcttgatacttagaagacccagcccctgctacaaaatttgccgcatagtagatattctgaatatgttagttgtaattgtttcaattaaaagcaaatgtttatggaatatttacactgtttactttttatattctatttttaaaataaagtgcacatgataaaaaatataatttgtggcattaaaaagtttaagaagtacatgctgctttttagtcttgcacttgagggacaaccaaacttaaatttctggtcatcctttcagaaaatatgtaggactatacaaggatttgtttatatctttcataaatatttacacaaatggtatcatattaagcctattgttctgcaccttgttttaatacaacttacacattaactgttatattctgttgaatcgtgtggatatattatatttatttgcctggaccctgtttttgcacatttaaatcatgcctaatttttattacaatcattattgaaacaaatatgtactttaaaatttgtttttagttattgtcaaatactccttcaagagtaccactcctcactcctaccagtagtgaatgagtgcctctgtttctccttacccgcaagtattgaggaagttgggtttggcaaatgttaaagtatttgtcaaactgctacattaaaatggtatcttattattttaaattgcactttttatccatgaggttgagtaacttaataatttatagcccatttttatttctttttccttttccaattgcttatgcactttttttttggtttttctttcctttttggcttgtagaaactcttcatatggtaattaaccatttggcacatttgttgcaaatattttcccccacattgtcacttgtctgtttcttctttgcttgttttatagtctatattaggccctagagaaatcttagatttttacatactcttattgacatcttttattacggcttctgtatttacttgtttagataggtgtttctctctcaaagactatctctctatatgaatgtagatatattttcatctaaaatttacacttgaattttgattcctgtggaagttattttagtttaaggagtgatattgatgtttttagttttttttccacatgactaattatgtatcctggtagcattaattaaataactaacctttttccaagtggtttcaaacaccactttcatcatatattacggtcccatatttatttaaggttgtttctggactctcttctgggcatttggcttgtccttcttatcctctgyttaaaattatattgtgggtatttcatcaaccagttccttaaactgctaatgattcattggtgaagatagaagtaatttatttgcagttactaaagttaaaacaggtagagatttttggtataatatcttcagatagaattagttttcctaagttctgtagtttcatgtctcaccttaggcatctgcctttgtatacctcatatcttgttgaacttttaaaatcaccagatgagtagaattcctattattcttatcataggttggttttagggaaatttgccagttttatgttttaatatttttggaaggaaaactgaaaggtaatgaaaatgttactgttggattaaaaaacaaattaagtccaaatagtgattaggcaagttggtgaggtagggggttgctgcaagagcggaagttgaaagatcttggaaaaattaaagaaacttcatagaaccccatctctacatcaaaaaaatacacaaatcagcttggcgtggtggtacacatctgtagtctcagcttctttggaggctgaggtgggaggatcacctgcttcagcctcgcaggtggagccaaggtgatgccattgccctccaggctgggagacagagtgagaccctgtctcaaaaaaaaaaaacaaaaaaaacagacaatggagatataaaagcaagggaaggaagtgttcaaaattgaagagaaccacaaaaataaacataaattttgaaagtgccaaatagtagtcagatgtaaaaaatttttgaatgtggaattgtaaaatgagaaattacattatggaaatgaacttcagcaaattgggtatcatcaaagatgattagtgccataaatagtcattataagaactccaaattagcgagaaatccaagaagaaggccttttctcaagtgtgcagtttttctatgttgaacagtattagtgagaactaaaggaaagagaggaaggtatgcagcaaataaaagcactagataagaaactagttgttaattctcattggaggagcatttgtcagtgaatttttaaagaaatgagactcttcgatctgctaagatttatgctttgagaaactcataatttatctgtttagcagttcattagaaaagaatatattccatctttcaataacatgattcagataatgtaactcaaatagcgtgaagtagaaagtacttaaaatatttggtaagaggccttggaagaagaaaaacatgaaaaagggcacctgttgaaatctgggtttcagaatgtggaaataacttacagaaaattatataattttaattatataattatacaatgtattcatttgctagggttgccataagaaagtaccacaaactgggtgacttaaacaacagaaatgtattgtttcacagttccagaggctggaaataggatcaaggtgtgggcagggttggttccttctgttggcggtgagggagaagctgtttcatgagtttccccttacatctggtgtttgctggcaatctttggtactccatggcttgtggatgcatcactccaatctctgtctgcatgtacacatggcattctttttatgtatttgtctttttccagatttcccctatttatcaggacaccagtcatactggattaggggtccaacctactccactgttatctcattctaactaattaaatccacaatgctgctgttttcaaacaaggtaacattcagaggtactgggagataagccttgaacatataatatgattttgaggggggcacagttcaacccgtaacacaaagtatctgttaagccaagagccccagtctgattgccatctgttattttatgacgtcactgggcttaagaaaattgtatatgtggtgcattttattttgtgtaggggttgtaggaacatgactgttaaatatttataaagcaactcttaattccgaagtgcttaaaacgttgtgcatgggccgtgaagtcaaatctgggttcagaccttaactgtgtgtattagtccattctcatactgctgtgaagaaatacctgagactgggtaatttataaagaaaagagatttaattgactcacagttctgcatggctggggaggcctcaggaaacttacaatcatggcagaaggcacttcttcccagggcggcaggagagagaatgcaaaccaggcaaagggggacaagctctttataaaaccatcactcccatgattcaattacctcataacaggtccctcccacaacacatggggattatgggaactacaattcaagatgagatttgggtggggacacagccaaactgtatcattctgcccctggcccctcccaaatctcatgtcctcacatttcaaaacacagtcatgccttttcaacagtcccccaaagtcttagctcattccagtattaacccaaaagtccaaatccaaagtctcatctgagacaaggcaagtcccctccacctgtgaacctgtgaaatcaaaagcaagttagttccttcttagatacattgagggtatgggcagtgggtaaatacacctattccaaatgggagaaattggcaggcagccaaatcttaaaggtccaaaatgatctcctttgactccatgtctcacattcaggtcactcttatgcaagaggtgggctcccaccaccttgggcagctccgtccctgtggctttgcagagtacaagcccccctcctggctgctttcacaggctagcattgagtgtctacagcttttccaggtgcacagtgcaagctgtgagtggatctactattctgggatctggaggacagtggccctcttctcacagctctactaggtactgcccagtgaggattgtgggggtgggggggggcttcaaccccacatttcccttctgtactgccctagcagaggttctccatgagggctcccctcctgccgcaaactaatgcctggacatccaggtgtttccatacatcctctgaaatgtaggcggagtttcccaaacctcagttcttgacttctttgcacccactggcccaacaccgtgggaaagccgccaaggcttggggctgacaccctctgaagcaatggcctgaactgtcctcagagtggccttgaccccttttagccacagctggagctgaagcagctgagacacagggcgccaggtcccaagactgcacaaagcagcaaggccctgggcccagcccaggaaacccatttttccctcctaggcctccaggtgtttgatgggaggggctgccatgaaggtctcggacatgccctggagacattttccccattgtcttggtgataacatttagctccttgttacttatgcaaatttttgcagtaggcttgaatttctccccagaaaatacgttcttcttttctgtcacatcaacaggctgcagattttccaaacttttatgctctgcttcatcttgaatgctttgccacctagaaatttcttcctagaaatttaagaccttaaatcatgtctttcaagttcaaagttccatagatctctagggcaggggcaaaatgccgccagtctctttgctaaagcataacaagagtcacctttgctccagttcccaacaagttctgcatctccatctgaggccacctcaccctggacttcattgtccatatcattatcagcattttggtcaaagctattcaacaagtctctaggaagttccaaactttcccacattttcctgtcttcttctgaacctccaaactgttccagcctctgcctgttacccaattccagagttgcttccacattttcgggtatccttatagcagcaccccactctctacggtaccactttactgtattagtctgttctcatgctcctatgaagaaatacccgagactgggtatttctttttataaagaaaagagttttaattgactcacagttctgcttggctggggaggttcrggaaacttaaaatcatggcggaagtcacctcttaacagggcggcaggaaaaagaatgagagccaagcaaagggtgggaaagcccttataaaaccatcgcccccatgattcaattacctcccaccaggtcctttccacagcacatggggattatgggaactccaattcaaaatgagatttggatggggatgcagccaaaccatatcactgcttacagccaaaggtacctttggcagattactaaatttctctgagctttcagcttccttaactgattaaacaagggggataatgtctaagtatggaatgattatgtaattaaaagaaataacatataaaagtacttggtacaattcttggcacatagtagtagtctctcaaatttattttgtgaaatgtttatgttgggagtaaagcctacagttaaaaaattaaagaacagaagttgtcagacccttttatcaaagggggacaaagatgcagttgactcactagagccgggatacgtagcgtgtcatgtttgaacagattctcatgcaactctgttcagaaattttcttccaccaaatagttctatttaccaacctaaaaaaatagttaactctttatatgttttctgtgtattcttgatagtctttttttctttgatctatttattgtttcctacctttttttggttttccttattctatgtctttttttaaaaaaaagatatgttgtgccttttaaaaaatcacattgagatataatttacacacggtcaaattcacccttttaaagtatacagttatagttttcacaaatgcatacagtcatatagtcattaccacatgagtatataaaatatttccatcctcccagatagttctcttctgccccattgtagtcagttaccctctgtgtccccaacctctggtaaccactgttgcagcatattatatacatggaatcatgcagtatgcatctctttgtgtctggcttttaacttaccataatgcttttactactcatcatgttgttacatgtattcttaacttgttgctttttattgctgaatactgtttcactatagggatataccatattttgcttatgcattcaccagttgacggatatatatttgtttccagttttgagatacaataaataaggctgctctaaacatttgcatgcaggtctttgcataagcatattttcatttctcctgggtagatacctatgaatgggattgctaggttgtaaggtaagtatatgtttaactttataagaaactgtgaaactgttttccaaagtggcggtaccagtttaccatctcaccagcattatgtgaaaattccatttgcttggcatttttgtcagcatttggtattgtcacattttttgggttttttttttttttttaatcttaaccattctggtaggtatgtagtgatagctcattgtggtttccatttgcatttccctaatgactaatgatgttgcacatcttttcatttgcttatctgtatctcttgtgatgtttgtttaaatatcttgtgtttgttgtcttaatgttgagttatgagaattctttatatatattctggataccgtaacgtttgtcaggtacatgtttggcaaatattttctcccaatctgagagactgatttttatcactaacactaaaaatttatctacagttaagacctatttgaatgtgtattttgatgactttgctctaagttcttttttttatttatttatttttttttcagctaatttttttattatactttaagttttagggtacatgtgcacaatgtgcaggttagttacatatgtatgcatgtgccatgctggtgtgctgcacccattaactcgtcatttagcatgagttctgaacagcattattatttacttttttctatgttttgtgtatagaggcaacatttctcactgtttttacatttttattttttatattggatctgcagtggcactctgttgtttaaagtgacaaagccttaaatttaaaacttgctgacaactcgttaagtagtgcattcaccagggaagctggtattcctgttgagcttcctttgagtgagtgctgtgtaggcttggcctctgtctttttttttttgtaagtgagatagggtctcagtctgttgcccaggctggagtgcagtggcgtgatctcggcacactgaagcctctacctcctgggctgaagtaattcttctgcctcagccccccgagtagctgagactacaggcatgcgccaccatgcctggctaatttttgtgtgtttttgtagagatggggtttgaccatgttgctcaggctagtcttgaacttctagactcaagcaatttgcctgcctcagcctcccaaagttctgggattacaggcatgagccactgcacctggtcatgtctttattgaaggaagaaaattatggctgataaagaaagctgagctattctcttggtttccaatttagagaatatatattatccaacaattacgtattttaaaaatatactttccctctaatgaggattcatcacttgaaaaagattacttataaattaattatacggaaccaaaagactgagaagccatgaccagttgaatcttatctagattttaaggcagtctgtaaagtgataatgtctcaagggtgggagataggaaagggtaatgattcctgaaaacttacatataaacccagtttcataaagtaaggttgtctcctgttgtgaaagacttcaaatagtttcacttggctttttacaaggtaggaatttcatccaggtaaaggtacatctactttatcttcttatgaagaaaagaaatggggctaaaaactgtcgaaatcccaaaagacagggtggacaagagaggaaactacagaagacagcattgtagaaactggaaaacaaatggtcaagtgctaagtgagttagtaaatctgagaaacccagatcctaaactatcagttagggaagctcaaaactagatctacatcataattatataacattgtagcagttctggatacctcctggaatggagagttgggggtggagagtgtataaggaagatgagttatatgtcaatttaagaaacaatcaaatctctctatttcctccccacactggacctctatagagaaaaaaatcgtgggtgtctggtcttggagggtagaggagtagtcaccagatacaattgaaatcaaagtatcacactgaatacagaggagggattagggaagcaagcaaactagctactgagcctcacatgaccctatcccaccactattccccaacttccaaactctggccaacaaactttaatcctcaggacaggaggttgctggggtcttttctaagaatctgaccagcgtaaaagttttgacctaaagataacaatatagcttccctagcaaagtagcccaactagattatcctgtggtgaagcccatttttggtaaactcaaagtacagcctttgggtttcgagtcagaagattccctactgttaaaaatgagcagacagcaaaggactatcagtcatatgaagaaagtttccaatatgaaagagatcaagagaatcagtgcaacactaggaaacacattattcagatgtccaacaaaaagaaggaaatttgtcagtatttttaaagagagaagagtttttgaaatcatgaaaaagtaagtatactataaaaaaggaagaggttaaaaaagagctcttggaaattataaatatggtagcagtgaggaaagaaattagaagagttagaaggtagaattatagacatttctagaaagtaaagaaaaagatttttgtttttttaaaggtagtaaataggacataggtaaaattaaggaaataatccaggagttctaacatctgaacagtaggagctccaggcagagagaacagagcagaaagggattatcaatgaaataataaaagaaaaattcacagaaataaaggacaagagttttacattgaaatcatcaagcaaggtccagtataatagatttttaaaaagactcatgttaaagacacattgtgctgagccagaccactgggaagaagatcttggatgcttccagagagaaaaaacataacaacaaaggttaaggattcaaaatgactgtggacttctcaaaagcagtgctggaaactaagatgcaatggctgatgcctacattcttctgaagaataattattttcgacaatgaattatatatgcatccaaatcaccaagcgagtataaggacagactaaaagcattttaaaatatggtctcaacaaatttacctcttgttgttttaaaaaatattttagagatgcatacttacatgtctacagatgaaatgatatgtttagaatttgcttcagaataatgcctttggaagggtatgaattgatgaggatgtagattttaaaaaagaataaccatgagttaataattgttgaaggcaaatgatggtaagagggttcattattctgtttttttgcatatatgtgaaatttttcataataaaaagtaaaatacatccacagacacagacgtctgtcttctgctgaaagatatgccccatcaaaacaaggaagaattaaataagaggaaaatgcgatagaggttattgtactcaaagtgtgatctccagagcagtaacatcagtataaactgtgaacttgttagaaatgcagattctcaggcctgccccagacctaatggatcagaaaccctggatatggagtccagcattctttctttaacaaacccttcaaatgattctgatgcgtcctaaagtttgagaaccactttcctaaagcaggaaaaatagctttgctcaagtaaagaatggacatgactggtgttttgtatcatctcattttcttaactgcttgctctctggacgttgatagttgctctgacatgtaaatcaattgagttgttatacataaaaaatactgtattgtgctatttgttctaacaatctcaacaatcgatgtaaaagttcaaatttaaggaaactcttgagtatagtgattgtatcagaaatgggaagaggtatgaggggaacatatgaacatgccttataccarcctggctgcttgtctaactggcaccttgacattgtttgctgactttgtcaattgaaatttttattaatctggaatgccttttcctcctctggtatcaaaagcctgtctttcctcctgggctcaactaaaccacagcttttcaatgaaccactttagatctcattctcatctttctgtctctaccatcagatttttaaaattttatttatttattttaaacagggcctaatgctgccgtccaggctggaatgcagtgatgcaatcatggcttgctgccaccttgacctcctgggctcatgatcctcctgcctcagcctccgtagtagctgggactacaggtgcaccaccacacctggctatttttggggagtttttttgtttgtttgtttgttttttggtagagactgagtctcgctatgttgcccagactggtttcaaactcctgagctcaagcagtcctccagccttggcctctcgaacagctgggattacagtgtgagacactgcacctggccattactatcagattttttaaaatataaataaggactgagcaactatgacatgtgttgtgctggctattttatgtattatcaggaaaaaggtgaaaatgattagggagagagaaataaaggtaagaagagctacaactgtttttcatatcaaaccttgactcaaagagttcagaatgatttaactctttaaactgtgtgggcttctgagtagctgaagacagtggtaggtggtaggcttgtggtaagccgcatcccaaaatgttatctccctaaaagatacaaaataacttcacatctatatcattttgacatgaaacaacaccttgaacattacttgtagatagataatggcaaaactgcaaaataatcatgtaagaaaaaggtaacacactcaagtgcagtggtcctacatgcttttaccccattgccgcaaggggaccctgtggcaaggaaaattagaccaagatatgttccttgagaagacagaaggagcactagtgagggagagctggaagaaccaccggaaagattaaatccaccctttttttttgtattttcagtgcaaaaaactaaccagacagatcagagcaggattacaggaaaaggatttcaaagtataagtactttaaagggctagacagccatttaaatgtgatttaaagagacacacttctgaatgtctaacttctggaagacagaaaaggaaaacaaaagagttctttggaaattggatggtcaaggaaaaaatttttaaagacctgcaagaaaaaaaggaaccaaaaaatgagaaggcctacaaccctcttctctactattaaagcaaaactccactgaggtatctagactttggcaaacgacagaaagaaaaagatgccattaaacgaaggatattgaaaaaatgcccccaaatcacaaaaataaacagaaggaaagtgaaatcctttcctttagtttataaaattagggaaaaattcatacaaatcaactaaggaaaattcctctaatcccgtaaaactacttaagaagcaaaagaaaactattagtatacactccaaatagaactcaaaatatacaacacttgggtttgaagataagaagaaccaccttgagtcacaaattcaaaatcaagaacaaaaatgggtgaaaaccaggggaaaaatgcaaaaagaattgtactcaaagagatgaaagaaaatgacaatagattatcttaaatgaagaaaaaaagttaccagatactgaaaatagagtcaaatgaaaatttaggctgggcacagtggctcacgcctgtaatcccagcactttgggaggccgaggtgggcggatcatgaggtcaggagatcgagaccatcctggctaacatggtgaaatcccatctctactaaagatataaaaaattagccaggcgtggtggtgggcgcctgtagtcccagctactcgggaggctgaggcaggagaagggcatgaacccaggaggcggagcttgcagtgagccgagatcgcgccactgcactccagcctgggcgacacagcgagactctgtctcaaaaaaaaawaaataaataaaaatttcgtacaggtgttgaagaaagagtagacaacaatgaagagaatgaaagtaagataaaaaggatcagaaaaattactgaaaatggaaaacagacaaggactaattttcatattactagagtctctgaagaagaaaaaaaggttttttattatactttaagctctgggatacatgtgcagaatgtgcaggtttgttacataggtatacatgtgccatggtggtttgttgcaactgycaacctgtcatctacactaggtatttctgctaatgctatgcctccccttgtccccaacctcccgacaggccccggcgtgtgatgttcccatccctgtgctcatatgttctcattgtttacctcccacttctaagtgagaacatacggtgtttggttttctgttcctgtgttagtttgctgagaatgatggtttccacgttcatccatgtccctacaaaggacatgaactcattcttttttatggctgcatagtattccatggtgtatatgtgccacattttctttatccagtctaacattgatgggcaattgctgttgtgaatagtgctgcagtaaacatacgtatgcatgtgtctttatagaagagtgatttgtaatcctttgggtatatacccagtaatggcattgctttctagatccttgaggaattgccacactatcttccacaatggttgaactaatttacactcccaccaacagagtaaaagcgttcctatttctccacatcctctccagcatctattgtttcctgactttttaatgatctccattctaactggcgtcagatggtatctcattgtggttttgatttgcatttctctaatgaccagtgataatgagctttttttcatgtttgttggccacataaatgtcttctcttgaaaagtgtctgttcatatccatcgtccattttttgattttttttcttataaatctgtttaagttccttgtagattctgcatattggccatttgtcaaatggatagactgcaaaaatgttctcccattctgtaggttgcctgttcactctgatgatagtttcttttgctgtgcagaagctctttagtttaattagatcccatttgtcaattttggcttttgttgccattgcttttggtgttttagtcatgaagcctttgccaatgcctatgtcctcaatgatattgcctaggttttcttctagggtttttatggttttgggtcttacatttaaatcttgaatccatcttaagttaatttttgtataaggtgtaagggaggggtccagtttcagttttctgcatatggctagccagttttcccaacaccatttattaaatatggaatcctttcttcattgcttgtttttgtcaggtttgtcagagatcagatgtttgtagatgtgtgggtgttatttctgaggcctctattctgttctggtctatatatctgttttggtaccagtaccatgctgttttggttactgtagccttgtagtatagtttgaagtcaggtagcatgatgcctccagctttgttctttttgcttaggattgtcttggctatatgggctctgaaaaaaattttctttaatgaggctttatttaaaaccataatcaaggaaaaatgtctcagaatagagaaagaggctggaggtacccattgaaaaggatactgggtacttgggaaaattaacccagaatgataaactgtgaacagtaaaactgttagatcaaatataaaattcttcaaggaaaaggaacaaatcataaaagcaaaaataattggattagcaccacactttacaaaattaagaaagaaggcaacagggagcagcgtttttaaacttagaaaaaaaatgtggatcaaggattttatgtccaaccaagtagtcctttaaatatcaagtcttttgaaaagtgattttaaaataagctatgtacaactttgataaaaattaaaacttaaaatttacagtttagcaatactatatgaagtatatttgcaaataatttattagtttttaaattcacactttttagtgataaatttgcaagttctatataaaagtaaatcttttttggaagaaacaacattttcaagttactatttttgttgtttagaagacttgaattggcaagaattcatttttttaaaaaaaatattatgagtacatagtaggtattaatggggtagatgagatattttgatacaggcatacagtgtgtaataatcacatcgtggtaaatgcagcatccaccacaagcttttatcatttctttgtgttacaaacattctatttttagctatttttaaatgtacagtaaatttttgttcactctagtcactgtgttatgctatcaaatactagattcttattaattctatctaactatatttttgtacttattaaccctccacactccctccctctaatcttcccagcctctggtaaccatcattgtactttctgttttcatgagttcaattctttttatttttacctcacacaaattagtaagaacatgcaaagtttgtctttctgtgcctggcttatttcacttgacataatgtcctccagttccatccatgttatttgaaatgacaggatcgcatcctttttaatggctcaatagtagtccattgtgtatatctaccacattttctttattcgttcatctgttgtcggacacttataatggccattataaatgggatgagataatatctcattgtggttttcagttgcatttctgtcattagtgttgttgaataccttttctcatatgtgcttgcccagtgtatgttgtcttttgagtaatgtctattcagatctttcaaccattttttaagtggattactagatttcttcttatagacttctctcatctccttgtatattctggttattaatcccttgtcagatgggtagctttcaaatattttctcccattctgtaggttgtctctttgttgattatttctttatctgtagagacgccttttaacttgatgtgatctcatttgtccatttttgctctggttgcctgtgcatacgtggtatttctcaagaaatctttgaccagtacaatgttctggagtttccccagtgttttcttttagtaatttcagagtttgaggccttagatttaaatatttaatccattttgatatnnnnnnnnnnnnnnnnnnnntttaatgtatagcaagaggtaggggtctagtttcattcttctgcttatgaatatccagttttcctagcactatttattgaagcgactgtcctttccccaatgtatgttcttggcacttttctcaaaaataagttcactgtaggtgtgtggatttgtttctgagctctgttctgtttcactggtctgtatatctgtttatatgccagtaccaaactgttttggttactatagctctgtagtataatttgaagtcaggtagtgggattcctacagttgtgttctttttgcttaggatatctttggctattctgggtcttttgtggttctgtatacattttaggattgtttcttgtggtttggtgaacgatgtcattgttattttgatagggattgcatcaaatctgtagattgttttgggtagtatggacattttaacaatattgattcttccagtccatgaatatgtgatatctttccgttgttttgtgtcctcttcagtttcttgaatcgctgttttatagttttcattgtagagatctttcacttctttggttaagtttattcctaggtatcttattttatttctagctattataaatggaattacttgatttctttttcaggtttttattggcatatagacatgctgttgatttttgtgtatgtatttttgtatcctgcaactttactgaatgtatcagttctaatagttttggtggagtttttaggttgtttcwaatataaggtcattatcatttccagataagcataatttgatttctttctttccaattcatatacccttcatttctttctctttttcaattgctctagctgggactttcagtcctatgttgaatagcaatggtgaaggtgaacatctttgtctttcagatcttacaggaaaggctttcacttttgttccatttattatgatacaggccatgggtctgttgtgtatgacttttattatgttgatgtatgttttttctatgcccagttttgtgagggtttttatcatgagaggatgttgaattttatcagttttctcagcatcaatttaaatgactttatggtttttgtccttcattctgtggatataatgtaccacgtagatttgcgtatgttgaaccatccttgcatccctgggataaattccatgtggtcatgatgaataatctttttaatgtgttgttgaattcagtttgatagtattttgttgaggatttttgtatcaatgttcgccagggatattggccggcaattttctttgtttgatgtgtctttgtctgtttttggtatctgggtaatactagcctcatagaatgagtttggaagtatctcctgctctgtttttcggaatagtttgagtaggattggtttagttcttccttcggtgttcagtaacgttcaacagtgaagccactgggtctcaggcttttctttgctgagactttttattacagctttgaccttacaacttgttattggtctcttaaggttttaaatttcttcctggttcaatattggtaggttgtatctgtctaggaatgtattcatttcttctaggttttccaattcttggcatatagttgcttatagtagcctctaataatcttttgaatttctgcagtatcagttataatgtctcccttttcatctctgattttatctatttgggtcttctctctttttcttaggttgttgatcaaaggtttgtcaattttgtttatcttttcaaaaaaccaacttttcatttcattgatcttttgtatttttttgtttcaatttcatttgtctctgatgtttattatttattctgctaatttggggtttggtttgctcttttctttctttaagatgcatcattaggttgtctatttgaaggttttctacattttttatctaagtgcttattaatataaatgtccctcttagtactactttcactgtataccataggctctctttcctttctttttgttctttttttttttttttttttttttttgtatttttgtgtagacagtgtcttggtttattgctcaggctcatcttgaactcttgccttcaagcagtcctcctgcattggtctcccaaaatgttaggattactggtgtgaaacaccactcccaacctcccatgtatgtttttgtgtgttttatttccactttcatttgtttcaaaaaaattgtttaattttcttcttttttcattggcccaaactggtcattctggagcgtgttgtttagttccaagtttctcttgttattgaattgtagtattattgcattgtggtcagagaaggtacttgataatgatttcagttattttgaattttttgatttattttgtggcctaacatatggtctggccttgagagtgatccatgtgctgaggagaatgtgtcctctacaactgttgtataacatgatctgtaaatatcttttaggtccatttggtctatagtatagattaagtctgatgtttcttgattttctgtctgaaatgatctgtccagtgctgaaagtggggtgttgaagtctccagctattgtataatggtctctctctttagttctgttaatatttgctttatatatctgggtggtctagtgttgcatatatatttactattattatatccttctgaattaacccctttgtcattatgtaacgaccttcttatttcttgttggttttgtcttgaaatgttgtctaagaatagctaagcctgctattttttgctttccattggcatggaatatctttttccattcttttattttcagtctgtgtctttatagatgaygtgtatttcttgtaggcaacagatcattgggtcttgctttttttttttttaatccattcagtcactctgtcttttgattggagagtttagtccatatacattcatactgttattaataagcaaggatttactcctgccattttgttatttgttttctggttattttgtggtcttcttttttttctttctttcctgttttttttttctttttatgttcgtgtgccggtgattctctctggtggtatgttttaattttttgctttttgtctgttgcaggttttgtctgttgtctgttgtagattcgatgttaccatgaggctttcaaataacaagccattattttagactcatgataacttagcactggttayaaaaagaaacaaactaagaaacagagagaattcataaaaactctataattttatcaccccccacttttaaactttttattgtttctctttatatgttatactgtctgtgtcttcaaaagttgatgtagttatcattttttgtaggttcatcttttagtcttactactcaagatatgagtagtttacacaccacaattaaggtgttatatattctgtgattgtgtacatactattagtgatttttgtaacttcagatgatttcttattgctcgttaatgtctttttttttttccccagactgaagaacttcctttagcagctcttacaagacaggtctagtgttgaagtccctcagcttttgtttttctgtgaaagtctttatttttccatcatgtttgaaggatatttttgctggatatactattctaagataaaagtttttttcagcactttatttcatgttctataatgtttctactgagaagtcttctgctagatgtattggagctccattgtatattgtttcttttctcttgctacttttaggatctttatgcttaatcttaatgccttgatgtagacttatttggattaaatcttcttgatgttctataaccttcttatatgttcatattgatctctgtgtttgttaatttctctgttgttatcgctttgaatcaaactttctaccttcacctcactctctatttatactttaaggccagtgactcttagagttgcccttttgggggtattttgtagatcttgtaggcttgctacattctttattctttttttatctcctctgactatattttcaaatagcctgtcttcaagctcactcattgtatcttctgcataattaattatgctgttgagagacactgatgtatatttcattttatcaattggatttttcagctctagaatttccacttgatttcattaaatttgtacagtttgttaaattcagataggagtctgaatttcttctctgtttatcttcagcttcattgagctaactcaaaatagctattttgaataccgtatcttaaagggcacatttctctgtcattctgggatttatcactggtgccttacttagtttgtttggtgaggtcatgttttcctggatgttcttaatgctatggatgttcattgatttctggtcattgaaaagttaggtatttattacagtcttcgcagtgtgggcttctttgtacccattcttcttaggaaggttttccaagtgttcaatgggaactgactgttgtgatcagtccctagttgctatagcggtatctgcattaggtggcaccccaagcctagtaatgctgtgactcttgcagactcacaaatagtactgccttgctgatcttgggtataatccaagagaattctctggattaccaggcggaaactcttgtcctctaccctttcccctaaatggagtttctttgcgttgagctgcctggagctggggtaaaggtgacacaagcaccactgtggccactaccactgggactatcctgggtcagacccacagccaccacagcactgggtcttgcccaaggcccacagtgactactgtctgactactgctggtatttactcaaggcctaaaggctctccagtaggtgtcagtcagtaggtgacaaatttagccaggctatgtccttccctttagggtggcaagctaccccctgggccggggcctggagtcagaatccttaggtgtctacttggtgctctattttactggggctgaactagcacccaagccacaagtccttccactcttctcttacctttcctcatgatagagtgccttcgtgtgttaaccaccaccccaggcctgtaatgagtactgcctggatactgccaatgttcactcaaggtccaagggctctttagtcatcttgtggtgaatcctgcaaggcctgggtctctccttttagggtagcgagctcccttctggcccagggctggtctagaaatggcatccaggagccaaggcctggaatttgggaccccaagagcccatctggtgctctatcccaggaaagaagtagttttagaagctaagttaaggtcattaaaatatatttttatcaagtaattataatcaaataagttctggtaaggtcctgtaacattccggtaacattgtaaaaatatattttgggatctctgacatcccattattttgtatgctaatcctactagattgtgattcatatgagaggagagatcatatataaccacaaaattagcattttcttttattatcattgtagccaaaaatcacagtaatattgtcagtgtccgtgccttcgagagcaaaaattaaagacggggttttgttttatttagagattctcagaattgaagagttaaactaatcaagcagatacatcaagtcaatatgttatatgaaagaactggaaatgaataattaatagttataattagctttcctatatattttcctgaaaaatttgcagttaagatttacaaacagaaaacaaattgtttaagatattttacatttggggatgatatagttattcagactgactttgggagtctgttcctcttaggctgttaagcacatttttattaagtagcttttgttattttaacatcttttattgtagggtgggctgggaaggtttctctggctaaatattaccgtattttaattagtttgatgccactaaatttaaggtgcaccgtataattatatactatagtaactattcaaatttatatcatttgtaggatatatccttatttcagggatgtaaaactgtgtgtgtattggggcagtttttataatgagtgaaatggggaatttgagaagcagtctgaaggtgggaaaggaatgagtcatgccatttagaagaagtggtgaccaggtgagaaggaacagcagttgtaaaggacaaccaaagctagttaaagaaggccaatacgactggagcagagtagacacggggaaagcaaagtggtagtgaggcctggttgtggagagccttgtggatcatccataaggactttgactttaatgctgagcgagatgggaagttgctggaggtttgagcagaggagtgatttgatccgtgcaacaggatcacttgggctgctgtgttaagaatagattgtaggaggcagggatggaagcaggaaaatagaatcaggcagcctttaaaggctgttgcaggtaatccagatgagagatgctggtggctgggaccagagttaacagtggtggagattacgaaaagcacttggattctggatttcttttgaaggcaaagctgacaagatttgcagatttgctaatgaattcctatggagtgtgagagaaatgagaaatcagattattcaggtcgaagcaactgtattgttaccatttacagaaatgtggaagccttcttgaggaaggcaaatcagatgatcaattttggattatgttgagaaggctgttaggcattatcagaagataatagagagagcaactgagtaaaaaagtctggagaccagggaagagggcccagttggagttatgtgtatgcatgcacacgtatgcgtatattacgtagggcatgtatgcgtgtgagtttatcgtttgattcttgcagcattgacgattgcttcagaattccatttttcccccttgtgtttagtctgtgattttattattagaggttttcttcaaatgtctgatgagctttggctctccttaacaatgagatataaggagagattaagcaaccagcttctacaaaggactttcatgagggaaggaagaatagagttgaccgatggtgtatttttaagtatcgtttttgttttttaacttattttgaaatcatttcacatagaaaagttgcaagaataatgtaggtaactcctgtaagtacctaggttcagaatattatgtaaatgatgtagtgtttttctcagggtatcacattagagacatagatagtggtccctcatttgacagtaatttcaagaatccagcaaagggccaaggggttgtctagtttttcttctttgtagtttctgtatctccttgaaactagaaggtaaggtccatggaatatatgttaagactgtgtaaacaataagataccatctcacacctgtcagaatggctattattaaaaagtcaaaaaacaacagatgctggcaaggttgcagagaaaaggtaacacttacatactgttggtgggagcataaattagttcaaccattgtggaaagcagtatggcgattcctcacagagctaaaagcaaaactaccattcaacccagcaattccattactgaatatatacctagaggaatataaatccttctgccataaagacacatgcactcgaatgttcattgcagcactattcacaataaaaaaaagacatggagtcaacctaaatgtccatcagtgacagattagataaagaaaatgtggtacatagacaccatggaatactatgcagacataaaaaagagtgagatcacgtcttttgcaggaacgtggatggagctggagactattatccttagcatagtaatgcaggaagagtaccacatgttctcatttataagtgggaactaaatggtgggaactcattaacacagagaagggaacaatggactctggggtctacttgagggtagagggtgagaagaagaagaggagcagaatagataactattgggtactgggtttaatacctgggtgatgaaacaatctgtacagcaaacccctgtggtaagagttcacctatgtaacaaaccttcacatgtacccccaaacctaaaataaaagttaaaaaaaaagactgtaaaaatcttattccatcatcatccttttctctaatttagcaattatttatgatgcctcacccactgaatcttagtttaataatgtttgcaaagtagtgagttttttaatgctgcaagcattgcagagtttatcagctagcatattattattaaaaactcaacaaaacacagtctttttttttgtcccatttaatatcataggggacttacctgtttctgcttaatattgaatgtgttataatccattactgtacttatatattttgatgatcaaaattgtcctagatatggctaatagaagcaccttcgagctgatttcttggtcctttgacaaacgcgtgtggcttttttttttttttttttttttttttttttagtacttactttcaagctcaagattttccggattcatcttatcttacacctcccttgccccagtcctggaccatttctctgaggagccttgcttgctttggatggagaaatagtatcagatagggggtagagggtgagagtttcactactcaatataggctttgccttgatctttctgttttgaacccttttcctcagctttctttgatagtgcttactttaggggttctttcaattcaacatatccaaatagaaaacctctagtcttctgctagaagggtaatttggttatttttagggatggtgtctaagcagactaattgcttcttacttttaatcagttcttctgtttatagcttcagaggaatctagtgtttgaagttgctgattctcattctttttattctttctgtggttctttgacacaaataagattgcatcttatcttgtcctccgtcactgcacacttagatttccctagtcacctgtgacatcttaatttgctcgtttgctttcagatatctaaaatttgattgaattctctttttttgttgtgttttttcctcttttcttttcttttttttattttttttttagaggcagagtcttgctctgtcacccaggctggaatgcagcagcaggatcttggctcactgcaccctccgccctmagggttcaagcaattctcctgtctcagcctcccaagtagctgggattacaggtgctgcgycaccacacctggctaatttttctgtttttagtagagactgggttttgccatgttggtcaggctagtctcgaactcctgacttcaggtgatctgcccgcctcagcctcccaaagtgctgggattacaggcgtgagtcactgtgcccggcctcttccttctaatcttcttatttctagtttaatgcctttttttatcttttaagtggggtttgttaagtcaagatgaatgtatcaatctgccaccatatttacccacaggtcttatgtatttttaaatgaactttttttcctttaacaaaagtattatgtatcatttatggaaaatacaggtaagcaaatgaaaacaattagtaaatgaaaacaattagctctactcatatagtttagaggtagttactgttaatccttgatgtgattttttttatatatacaaacttgcttattaaaatagctggataatattctatagagtaggtatcatattaggctttttgttgttgttgtttggttgttttttttttttttttttttttacaacttattagacctttactctcattgaagtgaccttctatgaacttatatatgctatatatcattatggtcgggacatgagggtaagcaataaggcagttacaaaaccccagaaatttttagaaatcacactaagaggttttaaagactgtgccagaggagattttggtagtatcatagttcatgtctttcatgagctgggatgtagtttcatggaaacacaacagagagtagaaaacctaaccaattttaccgtattttatcttaaaaaaaaagactattactgtgttacatacagactttcaacctgccctgtcttcagcccagctgtacccttgatgttatggatcagagaaagccaagtaaggggagagccaataagcagtatcaaaatgaggccaagacatttagaaatttacttacaaagatggtttacaagagaatacagacttcagaagaaccaactctccaaataaaaatgctgtcagttttaaaggggggaaaataagattccaaagtttccatctagtctctacatagtaggaaaaacaaccgtttttcatactttgcatatgattatcatatctgcaaaggttatcatgtatcttcagataacacctttgcagaagtcaaggacatagggagtcagtagttaaaggaacagctcaaggttttgttaatttgggaatttgggggactttaaaactaagtgagatgactggatttttttttcccccatctcggagtacaaagtgtcttttccccttgacttttgaatgtgatgtgcaggcttttccatagttacgcagaacaaggcatcagttttgcctccaaggaagggcattatgcatggaaaagaaaaaccgaagtatttttcactgtctccagtgttgtttaggatagcagcagaagtattttactatccagttctgatggttttgatatatccaacaagttatcattttgattacctaactacctttgctctagtttcttattttcaagcctttaaatagaatgagaagcatgtgtgaataggtgggagttagaggttaaaattttagataaggtggcaaaggaagggattcacttgagtcaaaaccttaaggaagtaacagctaaacaatgaatatatttggaggagagtattctaggaagaggaaagagcggctctgaggttaattcaggggtatagaatttgtcgtggagagcactgaaggactttgaacagaggagtgacatgatttggttttccttttaatcattccgttatatatactaaatacatggtaatagatagtgataggtgcaaaaaaaaaaatcacaatttccatgcttttcttatatcttaacagagttgggatacagttatctgaagcccagtgttacaaattggaatcaagaaaacaacctctttaacttaccatttaattcatctacaacttaaaatgttttatgctgccagattatctaaagcttgtttcttttgtccacctttgtttgtgtttttatgttaaataaataatccctatgaattgatagagacagatgttttagagaagcttgtattgtttcaaaactaaattagtgttttttaaaacttgattttttattgaataaaaaataggttttttaaagcatataactgacatttgagtgcttttactattccaaacattgctcaaaatgttttcactatttgcacatgcaaaatgtggattatcacattctgtcctctcaaaaatccagtgaaataagttttattattacccccacattcatagataaggaattggaacttcagagagtttaaattgcctaaggttacaaaagtttatataccatctgtgacctctgataggctggaaagtaacataagcaagttctgtatatgaatatactgattccaaggaaagctaaattggtaattgttggaaaaagaaaaaaaaaaggctaatattaagcccccaagcaggaaaacaagtatctgaaagaacagacctttggcaagttttaagaaaagggaccccaggaacagtgtaattttcaaaggatatgttaatcgtggtattcaccgtgttttgcgaaaatgcctcaggagccatttggtgagagtgacaatgatcttgaggggaaaagaaaatggtagggctcttctttccttccccattcccatacattttaaaaatatgtaggtattaaagttaagatttgggaaggtggggcagcagcagacagggttctatcacttaaaacgaaaattgggaaaacattacactaaatttggtgctactggtcactaaaagtcttttcactctctttattttgatcccatgctgaaacttttatatttgatttttctgaataggattcttacaaggagcacatttaccagaaaattgaaatgtctggctatcatggcatttgttccttgctataaatcattaaattgtcagtatggtatgttcattgatacattcctaaatctcttagaagcatcgtaggttagacttgagagtctctctatgtctggggcactgacaagatgtagtttctagatttgcagaactttgtttacatgccttggactgtgggtattttcccagtatcataccatgtatgttaggtactagatatagctagttggcctcctttaacacctcagtcctcattgtgtcattagcctgcccagtggatgataatctcatgtagtctattagactccctcaaatagactacatgagattattagactcatatagtctaatagactacatgagattattagactcatatagtctaatagactacatgagattattagactccctctagtagaagaaggcataggagctttcttctactagtttcatagttttagatattttatttcagattttaattcacttacaattgaattttgcatatggtgagaagtaagcatttaatttcattgttctgcatgtggatatccagttttcctaacacgatttgttaaagagactgtctctctagtagagggagtctaatagactacatgagactatcatccactgggcaggctaaattcattattagtaaggctaaattcattattcttcagattggattagtgcctaaaatcatttatttttaactgacttccgtgatatactaagagaacagatcttctacttgattaagctgtgggttctactgtcaggtattttcattacaactttatttcaccaaactgtaactgtagcaggacgagccgcagacaaaacctctcagacaccgagttgtagaaggaagggctttattcagctgggagcattggcaagctactgcctcaaaatccgagctcctcaagtgcacaatttctgtcccttttaagggctcacaacactaaagatttcacatgaaagggtcgtgattgatttgagcaagcagggggtacgtgacaggggctgcatgcactggtggtcagagagaaacagaacagggcagggagtttcacagcgttcttctatacaatgtctggaatctatgaataacatcggtttttaagttatgagttgatttttaactactgggtttaggccaggcaggcccatgtccagttttgggcctggtgccgggctgcctgtctttggttttacttccctgttgttttttcttagaacaggtactgagtataaaataatatgagagggtctttctcttccttcataacaatgattaagattgacagccagcccttttattttaaagtaacttttttttacattttaaaaaaattaattttaaaagttgacatgtaacatgtatttattgtacacaacatgcttttttgaagtatatatacattgtgaaatggttaagtctagctaacaaatatattacctcacatagttatcatttttgcagtgagaatactgagcatccactctcagcatttttcaagaacatagtatgtaatcattaactatagtcaccacgttgtacaatttatctcttaaacttaatcctcctatctaaccataagtatgtgtcctttaaccaacatctccctaaccctcctcacctgctaaacactccagactctggtaactaccattctactctctatttccatgagatcaacttttttaagattctacatatgagggaaataatgcgttatttgtctgtctgtgccaggcttgtttcatttaatgccctccagattcattcatattgtcaaaaatgacagcattttcttcttttaaattcctgaatcagtcagatttggtggctcatgcctgtaattccagcactttgggaggtccagactggaggatcacttgaagccaggacttcaagacagcttgagcagcatagcatagcaagaccctgtccctacaaaaaatttaaaaaatgagctaggcatggtagaatgtgcctgcagtcctagctactgaggagggtggggcaggaggatcacttcaccccaagagtccaaggttgcagtgagctatgatcatgccactgctctccagcctgggcaacagagcaagaccctgtgtcttaaaaaaacaacaaaaaaatggctgcgtagtattccattgtgttcatatactatattttctttatccattcatctgttaatggacactgaggttgattccatatcttggctgttgtgaatagctataataaaagtaggaagtacagatgtctcttcaacatactgattttatttactttagrtatataccaaggagtggcattactgaattatatggtagtttttttttaatttttcgaggaacctccatggtgttttctttagtggctctactaattcacattaccaacaagtgtaggaggattcccttttctccacactcttgccaacacttaactctattttgtctttttgctaatagccatttcaacaggagataatatctcattatggttttcatttgtatttscctgatgatttatgacattgagcattttttcatatacctgttgacaatttatatgttttcttctgagaaatgtttgttcaggtgtttgtgcatttttttaattgggttattttcttgttattgagttgagttcctgatatttttcggatattaatcccttatcagakatatagtttgcagatattttctcccattctgtgggttttctcttcactttgttgattgcttcttttgctgtgcagaagctttttagtttgttgaaatctcatctattttttattttgttgcctatgcttttgaggtttcattcaaaaaattcttgccagaccaatgtcatggagcattgctcctgtgctttcttctactagtttcatagttttaggtcttatatttcagattttaattcactttcagttgaattttgcataatagtgagaagtaagcatttaatttcattcttctgcatgtggatatccagttttcctaacactatttgttaaagagactgtcctttccccattgtgtgtttttcacatctctgtcaaaaattagttggttgtaaatgcatggatttatttctggactctattctattacaatggtctgtgtgtctatttttatgctagttacctgttgatttgattcctatagttttgtgtagtatattttgaagtcaggtagtgtgatcctctccagcattgttcttcttgcttaagattcctttggctctttggggtcttttctggttccacatgagttttaggattaccttttctgtttttatgaaaaatgtcattggtatcttaagaaggattgcattgaatctgtagattgctttgggtagtgtagacattttaacaatacagtcatgtgtcacacagtgatgtttcagtcatcagcctaccaccttttctttttttttttttttttttttgagatgaagtctcactctgtcacaaggctggagtgcagtggcgcaatcttggctcactgcaacctctgcctcccaggttcaagcaattctacctcagcctcccgagtagctgggactacaggcatgcgccaccatgcccagctaatatttttattttcagtagagatggggtttcaccatgttggccaggatggtctcaatctcttgacctcatgatctgcctgcctcagcctcccaaaatgctgggattacaggcatgagccaccacgtctgcccagcataccacttctaagccagtagtcccataaggtcataatggggctgaagattatctatcacctaatgatgttgtagccatcataagaccacagcttaatgcataaccatttctatttttagatacacaaatagttacccttgtataataattgtctaaagtattcagtagagtaacatgctgtccaggtttgtagcttggaagcaataagctgtactgtatagcttaggtgagtagtaggagtagtaggctataccatctagatatgtatagctgacgaaatcaccaaaaagcatatttctcagaacacatccccattgctaagtgacacaagactgtataaattcttctaattcatgaacatgggatctcattccatttatttttgtcttctatttctttcttgaatgttttatagttttcagtgtagagatctttcacttccttggttgaatttattcctaagtattttattttctttttgtagctattctaaatgggattattttcttcttttttttccccagatagttcattgttagtgtataaaaacactagtgatttttttatgttgattttgttccctgcaagcttactgaattcatttattagttctgacggtattttggtggagtctttagggttttctatatataagggtcatgtaatctgcagacagggacaatttaatttatttcttttgtcttgcctaattgttctggctaggacttctagtactatgctgaatagaagttgcaagagtcggtattcttgtcttgttcaggatcttggagaaaaagctcaacttttccctgttcagtgtattagctgtgagttgttgcatatggcctttagtgtgttgaggtacatttcttctataactaatttgttgagtgtttttatgaaaggatgttgaattttgtccagtgctttttctgcatctattgatcatagggtttttgtccatcaattctgttaatgtgatgtaccacatttattgatttgtttgtgttgaaccattgttggatcattgcatcacttgatcatgatgtttaatttccatgtatgtgtgaattttccaaagctcctccttttattgacttctagttttataccattgtggtcagaaaagatactctatatgatttcagttttcttaaatttgttaagatttgttttgtggtctaacatatctattgtgaggaacgtcccatgtgtagttaagaagaataatatattctgcaactgaaatgttctgtgtatatgtgttaggcccatttggtccagagtatagtttaattctgatgttttcttgttaattttctctctagatgatctgtccattgctgaaagtgaggtgttgaatttccctactattattgtgtgtagtctttctctccagatctgttaatatatgctttatatatttaggtgttccagtgttggatgcatattatatttataattgtgatatcctcttgctgaattatcaatatataataacctttgtctcttttttagtttttgacttaaagtctatttcatctgatagaagtatagctattcctactgtcttttggtttctagttgcatagaatatctttttaaatctctttactttcagtatgtatatgttgaaatgagtcccttataggcaatatatagatgggtctttttaaaaatccaaccagtcactctgtgtcttttgattggagaatttaatccatttatatttaaggcatttatgtattgatagataagggcttaactgctgccacttgtttcctaattgttttctattcttactgtcattgtggctaagtgattatctctaatagtacatttgattccttgctttatatttattttttgtatttattgcaggttttttgctttgtgattaccataaggtttacaaaaaaaaatagttattttaaactgataacaacctaaaaataaactctttttactacactgtccctcagtgttttgaatttttgatgttacaatttacatcattattgcatattctttaccaaattttgaatccaggtttgcaaagttttctgttcttattctttgaataacctttctacctgtttgcctttctctactccctcttgaactctaatgactcaaaaatttgcttttaatgctatctcataaattccgtaagctttcttttattccttttcaatcttacttctttttttcctgaccatatattttcaaataacctgccttcaagttcacagatcttttgcttctttgattttgctattgatgttctttattgcatttttcattttattcattgtatttttcagctccagtatttctgtttgattttcttttaattattatttcaatccattaattttctcatcttgtcatttgctattttcctcattttgttcaatgtttctgtgtattttcttgaagttcattgagcttccttaaaatagctgtttgaattctttgtcagacttttgagacatctccatctcttttgggtttgtcattggaagtttattttgtctgtttgataaggtcatgtttccctggttgttctggatccttcctgttgtgcatctatatccgcatgttgaagaaataggtacttattggaatgtttgcagtctggctttatctggctctttatcagtaagcatgttgttagatcctgggcaggtcatctggtgtgatctctaagcccatgactgttgcaactgttacagcattaggctttctgtacccagaattaccatggtcagtataacaatagactagaatctgttgttaccacggctggcacagctctggggtgcatctgaaaatcatgaggcctacctgttactgaggtttgactgaaacctaaggctgctgtcatcatccagcagtgatgggagccagagattgagtccattttgtgagggctatagtttaccacctgtcrctgggataggtgaggagattcagttcacagataccaacctggattcagttaccatgaggggtctgcctggcactggatttttactgtggcaggcccagtattaggaaccaagggaaagtcctacacttctctttttttcctcaagcagaggagatatctctgcattctgctgagtaggattgtgggagggttgacacagatactgtaaaattatcctttctaccctcttcaatgggtattttcttattagtatgccataaacaggtattgtgaactttcacttggttttctcagctcttttgaagatgtgttaatgcatggatagttattcaaaatgatgtttccacagggggatgatcactggagagtcctctttctccatctggctctgccttcttataacattaatttgtttcattacaaaagtaatgtctatccattatcaaactcttaccaaatacaaaaatttctaaagaagaaaaccacttgtaattctaacactaagggccaaccactttttgcattttgttgaatgtttaagtttttcacttacaaaaacttgtaaaatttagaagtaattgtacattcttaaaatcttgtaaaaatagagtaaatgggttccatttattcatccagtttccatctatggtctgattttacatagctatagtaaaatatcaaaaacaggaaattaacattggtacaactcaccttaatttatattttaccagttttacatatactcatctgtgcatctgtgtagttctatgcaaatttatcacttagattcttgtaacaatcatcacagtcaaattacagaactgttttattgccccatagatttcttatgctacttttttttttttttttttcttttttttggagacagagtctcactctgttgcccaggctggagtgctatggcacaatcttggctcactgcagcctctgcctctctggttcaagcgatcctctggactcagcctcccaagtagctgggactacaggcatgcaccaccatgcccagctaatttttgtatttttggtagagatggggtttcgccatgttgaccaggctagtcttgaaccctgagctcaagctatctgcccacctcagcctcccaaagtgctaggattacaggcgtgagctaccacgtccggcttcatatgctacctctttatagttacaactttctcccttcattctactctctaatccctaaccgctggaaaccactaagctgttctgcagtcccataattttattatcttgaggattttataaaagtggaatcatacagtatatagctttttgagattggcttatttcactcagcataatttccttgagaatccactaagttgctgaatgcatcaataattggttcctttttattgctgggtagtattccatctctgtaccacagtttaggcattcaccaattgaaggacatttgggttatttccagtttggggctgttacaaataaagcttttatgaatatttttctgtatgtttttgtgtggacattagttttctgaattttatgttcagcattcaataaagaggatcacctggaaccagaaaccacattagatattttagcagaaagtgtttaatataggaaattgttcaaacagttgtgggagaagtgaaagaataaaagaaaaacattgaggtaatacagaagtgataattgcaaggaccagcttctaattcttagactacagcaacaaagagaagtggtttgggttatcagaacctgtaagtatggagggatagtcctgcagaggtgggactcagaagaaaagttgctgcctgctggtgtttgtaccattaccttaggaccctcctggaatgaggcttaataaacctctgagctgaaagggccacctagctaatgagtacttccggaactcagagaaaggatctctgaagagttgaggctcagctggagagggttgctctttatctgctcttgttatctcagaagcttaaaggaagtgctttgtgcagctgggtctcagacatctagaagggggattatagctcgtgtatcttatactcgaatatcccactaatctgtaaaggaaatgttgtggagcgacacctcatacaactaagaagtggcgcatgcgtagctggtactggcatctctgaggtatctagatgaagctggtccagggagttttaaaagaaccttttgagtggaactgactgccactgccagggctaaggacttttgctgggcagatgctgatggaaacagtgtgcagacagcaaggtgcaagttccttctatcttgttcctggcttctaatccttatctaatgtcccacattgacagaacccaataaaagggggctggcagaggagaaatatagtttgcagcatcccagttccagtagcacaaaacagtatatagaagggtggatttaagagagataataggttgttaagtggcattcttatcatcaaaatcctttttgcttttgaggaattccccactatgtgagtggaaggtctccttcaaatgatctgtaaagaccagatacttaattgcttcctctatcctacaatctcctatcttgttaactccccttagttagcatatgggcatatgaattaggcctaaactatcagaatgttgcgctgtccttctctacccccccttttccttgttttcctctccagccttactttgattctataacaggaccaatacagagaatcaagagacaggaagtttttcttctgatagtgctggcagcaggagaatgcagtttccagtagaagcagtgccagtagtggctttacagggtccagaagtggaagcagtcctgtccatacaaatggcacctgtggtgcaatcccagcaggggtttttgttgcctagtctaccctggctcctttccattttctgatctcagttctttgtatttcttagcaatatgaactgcctaataccttctaaatgaattccttttcttcttaagtgagcaagaatcaatttctgtggcttacaatatagagcactgattgattcatcttgtttgtacctaataggattcatttagctgtcttgttgagtaaagaaattctaatattttgtgtttatttgtaaaaacagaaaagagatgctagacttagacaattttaagtcttcagcctcacaagtgtttggcaggatatttggaaattatcagatatcctactgtcagggtagaatagggtcaaatctccattgtgatggtggtgctaagtgtctgtaactctaacagaaaaatcagccaaccatttttctgactggtagaacctgggaaagttacttgctttaaccagggctattagaaagcaagttgaaaacttgaaaaaggagagagctagaggaagggatctcagaattgtatatataaactcttcaagtctctggttgactcctgaaccatgcatgtgtgcacctgactgagagcagtctgaaccatgtccgtcatggcagagatgtgagagagctaaaactccattaaagaaaacctgccatcattttagctgtaggaaccaggcaaaagaacctagatagtaaggagataatcctaaattacagcgccagagaaagagaacctaaaattctgagtataaaactccgggccacttgcggtggctcatgcctctagtcccagcactttgggagatcaaggcagatgggttgtgtgagtccaggagctcgagaccagggcctgggcaacatggcaagaccttgtttctacaaaaaatacaaaaattatccaggtgtagtggcatgcatctgtggtctcagctactccagaggctgaggtgggaggatcatgtgagcccaggaggcagaggttgcagtgagccaagattgcaccactccagcctaggtcacaaagtgagacgctgtgtccaaaaaacaaacaaaaaacactgctcaagtctttaccagaccaccctgggcaacaatgcaagtttgggccctagccttctgggtgccaagaaggggaaagaggccttaaatatgaagacttttctttatctgcttgccttcacccgcatcccccatagcaccctgtaccctattctctgtaagaatgtctgatttagtctgtccagagggtggagagtagggcctctaatgttactatgcggtaggtgagtagtcaccaatgcttgggatgggcatgtggggtttcaggggtctagttgcaccttttaatgactcagtcaattctggtctcagctccatccatgccttaacctctagtgctacctgctgcctccagttcctttacttctccaatgttgtgtgcaaattggcttgattcttttgtcttcttttccctggtagatttttaattttcagttttctcaagcctgtgaaactggtccagttttcccatagaactgatgtttatggtttcttttgcataaacctagcacttgaccctcccagtcttgaaacttgagaaagttacatttgtcttatctgaattcctttctcaggaagccaaccatcaggcctcccaggtagtatcaaagaactgaaaacttaccagatcactgcatctggacaatgagatgccagaactcttacctggcataagtgcctaaccaaccacctgcttcctgttgagcaactccttttccttacccctccctaagtcttatgtttccacacatggttatatttcttccctcctctatagacccctgattttagttaatcggggagatagatttgagactgacctcccgtctcaactttagcaccctataaagccttcttccctggcaataatcattgtctcagtgattggcttgctgtgctgtgagcagcaggacctagaccaaacccctggtgttttggtaacacctgttaagtcatttaccacattccaactgtgaattttggtgataagttttttctttttcttttggacatttatgtctcttttgttcctataaggttattttggtagggagtaggtataagtgccatggatttattcaccttttgaaatttttttgtccttaacagtgagtgttgacatgagaaaatatggaacccacttttttatagatgtctttttcctgtagcatgcattcttagtggtggtgatacttggttcttcgggagggttgaaatcwtagataaaacaatggtttatggccccaaaaaattctaatggacaaaaatcttatccttagtatttaattgtggggtagagggtttggtaatgcaaaaaccttgagaaacagtgtcctatagcatttcctttattcttgaaattaattaactttacagaatatatattcgtgttaatctttctgtgtctgtttttcctgggcatagtgtgtctttctgttatgtatgttatattttcatgtttgaaaacaccagctaaagtatttgctttatctcctttgatactctacattattatatttctttcattttgtgcttttctcaaatctgtttaacatgtccatgacttttttttttttttttttttttgagacggagtcttgctctgtcgccgggctggagtacagtagcgccatcttggttcactgcaacttctacctcccgggttcaagtgattctcctgcctcagcctcctgagtagctgggactacaggcgcgcgccaccacacccagctaatttttgtatttttagtagagatggggtttcaccatgttggacaagatggtctcgatctcctgaccccgtgatccacccacctcgcctcccaaagtgctgggattacaggcgtgggccatccatgactttttaaacctggctttttgttgttgtttcccacgtttttaactctgttttttgtttttttaactctgtcagccctcttttcatcacttgtcaccttaattcttctttaaactttttagtctttttttcctttagatcgggggtcctcaaaccctgggccacagaccagtaccagtccatggcctgttaggaaccaggccgcacaccaggaggtgagtgtcaggcaagccgacattacctcctgagctctgcctcctgtcagatcagcagcagcattagattctcataggagtgcaaaccctatcgtgaactatttatgcgagggatctaggttgcacgctccttatgagaatctaatgcctgatgatcaaggtggaacagtttcatcccagaaccattccccgcaacctgtctttggaaaaactgtcttccatgaaaccgatccctggtcccaaaaagtttgtggactgctgccttagatcatatcttatatttatcacctctcaatgttttccatctaattttggcctctatcctacatttgtttctttctaataattacttctcagcaccaaaacaaggaaaatgagaccagtgaggaacttacctcaatcacaaaatttaaggaagcaagaaaaaactcaataatcaagataaatattttattgcaatattttttaaaaggactaaattactgtataatgagcaaaatatcaaaatttttaataaagacaggattgattgttactgaatgaaacaatctgttagaagtttggggcacatatgtgtgtgtaatatagtgatgtgagctttattgcataatacatcctcttaaccaaatctgtcatttcctttgccctgtagactcatcttctctcgtttttkttttttttttcactttgttgagatgtaaaacttttgtgttattcacagactttctataccacttacaattcatgcttttctcttctgtgccacctatgctycagatcatagatggtagaaatggctcccttgtctgcataagaaggtgtttgccagagaaaatggtgaattatgagctatatgttcttttatttttctaaaactttaataagtatatttaacacattacaaaatgtaaaacattttaagaaatactggctggaaatataatgggaattatcatggagtaaaagtttaaaactcctgggctacttacagcaatagactgatcatctgctttactttatttggttctttagattagcatttcccaatctttttggcaccagggaccagtttcatgaaagacaatttttccatgtagtgggtgacgggggatggctttgggatgaaactcttccacctcagatcatcaaccattagattctcataaggagcgaacaacctagatcctttgtatacacagttcgttgtagggtttgtgctcctatgaggatctaatgccgctgctgatctgacaggaggcagagctcaggtggtaatgcttgcttgcctgctgcttactgcctgctgtgcggcccagttactaacagcccatggactggcacgggtttgtgacctagagtctggggactcctgctttacatagcatatgtttcatttcctccaagaagctattctcagtaattagacttgattcttaacatgcctggatatttataattcagttaaatttatgatcattatttatgaatgttggacgttatcgcttatgtctttctgtatttataattactgaagcaggatatgcattgtttttcccttttgcttctttctagcacactctacttctcatttgtaggtttattattgtccagcacatactgattcaggaaatttaacttgaatcctttaatcagtcagaaccatgatttcttatcttaagttgtttcatagcctaaagaaaatggtagagttagtttatattgtgtttgctaaataaactgatgagataaaaggtggatgttgttaarggagggagagaataaacaataaaccctgggaggagtacaggatgtaaattgtgttaagcaaataagttcactgtcgtgttgcccagagcggattcttttccctccaaggttaagaatctttttaggagaggatattgattgactctctctactgtatctggtggaaaaagaggtggtaaatgtgatgtattcctgtcatattttaattcatttattgagattaaaaacaaggatgtaaaacattcattttttatattcttgagtcaagagcactgaatcaaaaagttgacattttcactaaatgtttacaccttaatgcggagttttctctagatagctcatgtagatcttatgtaatattcattttatttttttcctttagctggaagtgctcctggttgttactatcaaagacatgtaaaagcctagaagttaattttagatacttaaagggaaatgttaacatttttatcttgctttgttaaatttcataagatttgataaatgagatatcaagaatatttaatgaaataaaattattaatgggcatttacttttgaataatggagtaagaaaaaagtagtaaatgtctactctaaaacttattttggccttaaaaaatatatatgcttttagctcggcacaatagcttgtgcctgtaaccccagcaacatgagaggccaaggtgggaggattgtttaaggccaggagttcgagaccagcctgggcaacatagcaaggctccatctttttttttttttttttttttttttttgagacggaggactcaytctgtcacccaggctggagagcagtggcgcaatctcggctcactgaaacctcggcctcccgggtttaagcaattctctgcctcagcctcccaagtagctgggattacaggtgcccaccaccacgcccagctgatttttgtatttttagtagagacaggatttcaccatcttggccaggctggtcttgaactcctgacctcgtgacccacctgccttggccttccaaagtgctgggattacatgcatgagccaccgtgcccagccagcaagcctacatttttaaaaaattttaaaaattagcagggcatggtggtatgtgccagtagtcccagttgggaggcatgaggatcacctgaacccaggagttcaaggctggagtgaggctgtgttcatgccattgcactccaacctgggcaatagagcaagaccctcacctcaaaaataaataaaaataaaagttatccttttggtggtgttctcactagttaactcaaagcatttgatgaaaaatatcagctctgttttagaaatagatgtttgtagcatatgtgacaactcatttgtaagagtagtgagtgaaatttggcttttggtaactgtgcctttgtacattcttatcttcagacaagttatttgagcagaaaaataaaaagtaacaagtctcccaccagcacagaatgagtatgttcatgttttggctttggggtgtaacacttctaaggatataattagctttgcttttcattttctactttttctccacagcctcacgattttgatgaatgtcgatttgatattagtgtaaatgatagtgtttggtatcttcgtgctcaggatccagatcatagacagcaatggatagatgccattgaacagcacaaggtaagatccctaatgtttacctgtccatggaggactaggtaagagattgttgacaataccttaaaaaaaaagttgacatgtgacattagttactgaaacattgaacattatttggatgataaagattaaagcagttcatatgtaaatttttgaaataatttttatttttaacactttagttgtactaagggtatttgctatgataaatattactcggctgggcatggtggctcacgcctgtattcccagcactttgggaggccgaggcaggtggatcagctgaggtcaggagcaataccagcctggccagcatggtgaaatcccttttctactaaaaatacaaaaattagccgtgcttagtggtgagcacctgtaatcccacctactcaggaggctgaggcagtagaaccgcttgaatccgggaggcagaggttgcggtaagccaagattgggctactgcactccagcctgggcaacagagcaagactccatctcaaaaaaaaaaaagataaatatttttcattgttaactacatcaaaaatataccctttttcataaaacacatttcgattttttatttaggttttgcttcataataaatacctttttaatgatctaaataaaaggatttttgaaataacattggattataaaaccccaacttataaaagtttcaatgttgatttttgttataactttttgggtaaattcttagtacgaacatttgtaaatcagttattctttgtaaatgtgaggctatctaatgataaacctatagaaagtcttttttatataaatatataaggtacattcatataatttaagctagtctttgacttctgttaataaatattaagtagactaaagaaatacattaataaatctgtattattagctaattcagtaataccatgataaaacagagaacgttctaaatccaccatgtcattcttgagtatgacttaagagaagttttgcttgtttacgtacttgcctatacttgttcgtttgagtttcacaaagttgtagttgaaacacctgttttggttatttctaacaggcacaaaacacacacacacataccacacacacacacacacacatttttaacaggcacaaaacacacacacacacaccacacacacacacacacgcgcgcctatacccatacacccaagaaaaaccagtctggcttgagaaagaaaagctaacacgattgataaagaagtatgcgattgtgaaatctgaggcactgttttgggtatttttaacaagcacaaaacacacacacacgcccttacacccacacacccaannnnnnnnnnnnnnnnnnnnnnnnnnnnnnnnnnnnnnnnnnnnnnnnnnnnnnnnnnnnnnnnnnnnnnnnnnnnnttagcttttctttcttggtttattgatttaagatttctcccagcctaaataaaattgactatgttacctttcttttttttctttgttttagctttaggactatatatttaaactttagtgttaagtttttaaaacattttctaagtcttagttatcttggtaatgttacttcagaaaagtctaaatatggaaaaaaattattgtttttctattatttaaaagagaaatgagctactattcaaaaaatctcaatgctctggagccaggccatgcatgcagcctctgccatgtatgacatatgtgagcttggctgtgttaattaacctcttcttagtgtttattctcagctgccatgttggtacttctgctcaaagtagtagtaagacataaatgagataatatgcaaagttacttaccagaatgactgatgtatttccccatttatggcatataggaaaagcaagagacttggagtctcaactaaattcactaaattataccatcttgtttctggatgaagagttttacgttaggtgagagaagctaaatgtgcatataaggagaacagcctgtttcatgttatttaatcagggccagccgtctcactagtgattaaagatgttattaagtagaattaatttctatatttttaatggagatgacctttaagggcttaatcagttgatttttattacagggcaagtttttttctgttttaattaaacatattttattttgctcacttttctctgttaagtccaatgacagttcctttgcaaggttcccgttttgtgttttcttcctttagtgaagattaatgcacgaagtatatatttctcctttagtgttgatttctttacatctttgaacaatggatagatttaatctttgggtctctctcagagcagtgggacttaagctgagataacaaattttgagtgatttttagttcctgaaaaaaatactcaactgcagggttgtgatgcattgtacaagtttgccctttctttttttttttttttttttttttgagatgaggtcactttgtcacccagcatggagtgtgatctcggctcacttcagcctctgcctcctcggttcaaacgatcctctcaccttagcctcccaagtagctgggactacaggcatgcaccaccgtgcctggctaattaattttttgtatttttggtagagacacggtttcgccatgttgcccaggctgatcttgaacccctgaactcaagtgatctgcccatgccagcttcccaaaatgctgggattacaggtgtcagcctctgcagccagccaccctttcttatttttaaagatagtttatttgtagactaggagaaatcattgttaattgttgttaatattatttaatgtactaaagtaaaatatgtgatgtatgccaactgagcagcctatcagtgaatatttaagtgaattcatatttagaatatgaattctaaaagtaaattgttgagttatttaacatgtaagaaggagaaatttcaaatgttgtcattgttttttttcctcccatagaccagggctagtgagatgtttcttgattcattcttcagtatcattaaggaatattgattgtggaagctaagtttagtaattttactatttaagtatgcattatcgtcttgatcctctatataaaactgtacaggcataatgatgataatgataggagctaacacttattgaggatcaccaagtactaatcattgtattaagtgctttatgtgttttattttctccctactatcctgaaaaataaagtagtattttgcagaagaggaaacaggtttagattaaaattaagtaatttgcctgagactgtactgtcttttagtttgtgatttctgagtattcaattttgtgttaattctcttgtctgtctgttaccattagtaaacggactgtttatgaacaattcccatgagctaacctcctgcaaattgtggtgtataatctgagttctcctactatacctatgcaagataaatatgaactcatttttcttttcgcccgtggattgtcaaacaggacagtatattatattggtaactgtttcagtagcggatttcagactccagagtctggcaaatgtggatttgaatcctggcactactatgtattagactagtgcaaaagtaactgtgattttggaccatgattttttaaatcattttaactaggctcaaacacatctttattaatcaaaataggaaccattacaatcaacacatttttaccaataagaaataagtttgtttattcctgtagcataaaaatctgtgcttcgggattctacaaactcttggaaagcattttctgcatcctgctggttgtggaagcattttccctgcaaaaagttgtcaagatgcttgaagaagtggtagtcagttggcaagaggtcaggtgaatatggcggatgaggcaaaactttgtagcccagtttgttcaacttttgaaacattggttgtgcaatgtgcagtcaagacattgtgaagaagaattgggccctttctgttgaccagtgctggctgtaggcattgcatcgcatctatttgctgaacatacttttcagatgtaatggtttcaccgggattcagaaagctgtagtggttcagaccggcagcagaccaccaaacagtgaccatgacctttttttggtgcaagtttggctttgggaagtgctttggaacttcttcttggtccagccactgagctggtcgtcaccagttgctgtataaaatccacttttcgtcacatgtcacaatccgatcaagaaatggttctttattgttgtgtagaataagagaagatgacacttcaaaacttgcgatttttaaaattttcactcagctcatgaggcatccacttaattgagttttttcacctttccaatttgcttcaaatcccaaacaactgtagaatggtcgacattgagttcttcggcaacttcttgtgtagttgtaagaggatcagcttccatgattggtcttagttggtcgttgtcaacttcagatggccagccactactcttctcatcttgaaggctctcatctcctttgcaaacttcttgaaacaccaccgcactgtatgttcgttagcagttcctgggccaaatgcattgttgatgttgcaggttgtctctgctgctttatgacccattttgcactcaaataagaaaatcttttgaatttgctttatttgctttttgtctgacatcatttttgtagtctaaaatagatataaacagcaagtaataagtcattagcaaaaaacaaagcaagaaatgcacattaaaataatgtataatataaccacatttatttaagaatgtaatccaatatcaaacggcaaatttcaacaatgcaaaaactgcattagcaccaactaatactagctaagtggccttggtaagttattgaaaggaggaaaataatgatagtttacggtatgtgttaccataccctcagcacccccacaccttaacaaaaataagcaacaaaataacctatccatgataaaacaatagtattatactttgcggttagcctgggcacccataattccagcttattcagttcatttcacagttacttcatcagtgcaccacttgccattagtagacctgtatttttctgttctgatgccattggatgggcttttgttagggcttacctggaaggttttagttattttcaacatctggaggaagaggtcgggggtttcttttccatccttcccagaagacccttatgctgattataaattctttgtattgatctgtttcacacatgcacattcacgcaccctccactcgtgctctctctctctctctcacatacatacacgcgtgcaaacaaaatgagttttattttacaggacttctaaacaataataatggtgatagtgatgaagatagctaacatttttgaggatttatgtatgcctaacatgataaacaatttatatatattatctcatttttttcctcactttcatgagattagcattattatcctgtttttacagattaggaaattggggcatagagaggtgaaataatttgtccaaggtcaatcaactagttagtgaagaagtcagcattcagacctaggtctttctgacccaagaaccagggcttttggccaggaagcaattctgtgctgtaagtatgtatttctgtgaattatgttttgttgacataaatcatgggcttcttgaatcacagtattcttgtattttctgtttgttcctcatatctatattatttagaccataacttcttaaagactcagacatattcttattaaacttctttgtaggaatcagcaaagcattgggcacgcaaattttttatttgaaataatttacagtattgtaaaacagattttatgggagaaatttgtgatatttgaaggcttttcccccttaaaatcctcatggtttgtattacagtgattactgacagaatactttctgtctagctttactgtttttgccctccttggcatccattctagaatggttgctcactacaagaaaagttttaacgaaatgactgtatgatttaaatattctcaatgtattagaaatcacataattcaatgtgacattatacagcagcccctgcagaaaaaagttattcccgaggtcattcttaaattcaaaaattatatttcaatttataacatagaaaaggacatatgtataccagaccagtaattttatttagaaatattgtgctggctttaatctgtggagtccattaatattctgcatttctccttatgattttgagacaatgctaaattatttttaaagatagggttttgttttaaatatcttagccatctttcatgctgtcttgaggtcaaatgagatagtgtttgtaaaagttctttaagaaaaaactgaaagctgtatgaattaaagttaagattgtgtaaagttaagctaacatttttctagtaaagaggtgcctrttgtcaaagggctctgtgagcattttctgtataatttgtcaaagatatataataaaccacttttgatgctattatttttttaaattataggattattttcagaatcttctacaattagaatacatgtgattttgattaaacaaagtttctgcttactatgaaaaaaatgtactcccccacttcaacccttcaaatccctaaaactagcacgaaggctttcctgacgctaagagatttaaaaatcattttgaaaaagttaagtttcttgaaagcctctgacagagtttatggtaatcgtataacattctcatttccataaaggagcaaccttagtaggtcctaaagtgttggtgcctatgggccacacagactttccccacgttgtggaaattatccatgacacaaagattcatatgaaaatataaaattagggaggaagaatccaaatggtaatttttacagatgttgattttctgtagtgggaatctagaggcaattgtcttgtcatttaatatttgtggaattgttcttaccctttgtgaaggccaaattcatgtgtgaagcatcaatgaactttgaaagaaaggtttattctcaacctgagaaggttagagatttctgtttgaggaaattatgtggaaaacactttttgaaaggaacatatattttacttgaaataaaatgaagtgtgaaaaaagttttttactgagagaaccccattgttgagccatctaagtgaagctcaagacccatttagagatcttttaaaaattttgttccttttgccataatgaaatatttcccccatgctctgtcagagtcagtttgatttgctgtgttttttctaattttaggagcaatttctacttagttgacactttcatttttttgtcttaaatttgacataatcttaggaaacttctaaaataactagatggcagaattattaactcttagtagtttttaaatatcaaggtcatataaagtcatactgttggtttgtgccatttaaaatcaatattggattttaacagataccctctctatacttatctgccttataaattatataaaacttagctttgcatttgaatgtggtttaactgggaagtgtttaagaatgcaaatataacattattttgagtgtttacttcatataagtaatttcatgagtgtgttagaaccaagtctccatttacctatttgcatcatatgatgatgacagaggatcaaattttacttcctctttacattcaggagttttaaattttgagggaaggacgcataaatagttcttacagtrgtcggggctctgccattttctcaagctgtagaaaaatcagtacatagaatcacaactgacctttattaagcagcagagaaacttcatgttgtctctggatgtttcagtcattaaaatcaagaatttggttcctaataatgggagttaactgccaaattgcatgcggtaatccatacacggttagtaaatttttttaaaacaccacaatgtagatagtatcaaactaccagcatttttgaggttggtgaaatcaaagaggaaaacaaggtaccaaccccctttagtttttatagtcttctggaataaaaacaattcagttgtcgagggtttataaagtaacttcatatttgtcagtttttcctgcctgcagtatttgaaaactggcatctgagacattagaagtttattttgtcaaggttatggatcatgacccatgacacagccctaggaggtcctgagagcatgtgcccaaggttgttgggttacagcttgggttatgttttaggaaacataaaacatcaacaatacatgtgaggcatacattggttcagtccagaaaagccagaaaacttggaaggggtgggaagcttacaaggtcattggtggattcaaatattttctgattggcagtttgttgagttattatctaaaggcttagaatcatagaaagaagtggctgggttaagataagggattgtggagaccaaggttatttcttacatagatgaagtctcatgggtggctgcctcaccagaaacagtagaaggcaaatgttttctatacagatccttaaaaggctctagactcagtctcttcgggatcagaaaaagacctggatcgggaaaggttctctattctctataggaagtaagtttcccctatgagacagttttgcggggccatttcaaaatatgtcaaagaaatacattttggtggaaaatactttggtttctttcagggccctactctctgccatgtgctgttatactagagtcaggttggaagctatagagtctgttctgttagtcttagaatctctgttttaatgttaatgctggtcagccccgtgcctgaactcccaaggaaggagagtataatgaggcatgcctgacccacctcccttccagtcatggtctgaactagtttttcaggtttagttgggtcctcttggccaggaggagggtacattcagctagttggtggggcacctagaattttatttttggtttacacccaaatacttcaaaaagtaaatcttaaagagagaagaaaggtcagtgatttttcaggtgggttcttctgtctgggaaggtgcttagcttttaccaagatagtaaaaggattgggaagattgtacactgagtagtgaagaaagaagatatttagatagctagtcatattaactaatgcaaccaatgaagagatgtaacttaacaagatattatgtcaaaaagacagggagattgttaaaaatcaatacaaaaagtttaggaagttcatttaaggggggaaaagccagaagatttgactgctgcttcataataggatgctgaaatgggtagtaaacataaataaaggtactccatgctattaatcatcagaaaaatgcaaatgtaaacctcagtgagataacaccatatacccatcagaatggctttaaaaaaaaaaacaccaccaccaagtgttggtgaggacgtggagcaacaagtaatctcatacattgctgatgtaagttataaattgtgcacacacttggaaaaaaatttttcaatatctactaaagctgagcctagaggtcccctctgctcagatgcatattgaaaatttgaagctctcacaagtattgatgtcataggtccattcattttaattaagctgtttagattatggggactagaggccaacctatattcccttgagaaatgggaaaattcccagcaaccaagaaaatttagaatacgctacctgcaaggcaagttggaattgtatacttaactcaagtgcttttattgttaacaaaactccaatcacctgccctcagctacaattaatatatctgtttcatcctattatttcttttctcttttttgtaattcctgtttattcataacttttgctctcctatcctattcttagtttctgtttccttggtttgtcatttttctgtcttttgatttcaacccctaactgccttaatctcttagtatgtcccaaagtaaaagaaaaaagtctaattgccatttcacagcacattactatgaatttgttaattatttgtttttaaagaaagtttaaaggaaggggtaggattggcagttatacaagtataatgttctgaaaatgcattttatgattttgcatagagtttaccagattttcaagtttttataatgtttactatgtgtttgccactaacaatttaggttactgttactagattttcagcttatttctctatccttttttcgtctgtaatttgtaaactatttagataacaagttataaaaaaaggttaatctagagttaaataactgttccatataattcttacagaagatattaaagaaaatgagattacatactgcaaaagttatttctgtacaatgccctaatgtggtatttaaatttttatttaatgaagagggaagatttctgacagtcactgggacacatgggattctgcttttttctatatttaatatggaaaagtaatggtgggagacatggcttatacatattgacagcaatataaactgttttccaattttgcttgctgagtattaggacattagctgggagaaaatgtttcctaaagtcaacacagaactgcactttttcatcaaatctttttaatcacttaaaagtattgtacttatattatcgttattgcttggtacatattctcagcttgtctgatactgagaatgaaaaacaacattggggtaggaataataaaaataggtagcaaagtaaattagtatcccgcaggttaaaatattaccgtaactgaaaacagttctatcatttttcagtcacacaggaagtccatgtacttcataggcaaataatgattaagataggaatgcttatattgctgttcagttcttagccccttgttctttttagtagtactcctctgatatatagagggatagaaggaataattcagcactttaatgtgttatttaattctcacagaagccccattttacataaaaatgaaattgaatggattatgagaatattgattattgattggtaagtagtaacattattttttcaagaacagcaacctaaaatactcatacagttagctctaacaatgtttacaagtcttaaaactattcctgcaaattgttgtattacataaatgttattgactcctcaaccatggttttttaaagtaatatttgttaattataaagtaagaaaatacaagccgggcatgatggcacatgcctgtagtcccatctactggggaggctgagtcaggaggattgtttgagcctggagtttgaggctacagtgagctatgatcacattattgcacgttagcctgggtaacacaatgagaccctgtctctttaacaaaaaaaaaaaggaggccgggtgtggtggctcacacctgttatcccagcactctgggaggctgaggtgggtggatcacgaggtcaggagatcgagaccatcctggcgaacatggtgaaaccctgtctctactaaaagtacaaaaaaaagattagctgggcgtggtggtgggcacctgtagtcccagctactcgggaggctgaggcgggagaatggcatgaacctgggaggcagagcttgcagtgagccaagatcgcgccactgcactctaccctgggcaacagagcgaaactccgtctcaaaaaaataaaaaataaataaataaataaataaataaataaattttttttaaaaaaggaagaaaatatagaaactaccttcagtcttataacccagacaacggtatatttttctcttctgtgtaccttttccttcaaaaacattatggatggagataggatttggggaagatggcagagcaggaagcacccagaatctgtctccccacctagacaacaattaccctagccagatatgtctgatataactgttttgaaactctggagtctgctaaaggcttgcaagttccagggaaggcttgagtggtaaattgctgttaatttcggttaatttcagctcttaacacagtagtagcttcctgtacctccacccatcccagccccgtggcaggcagctgtgcatgtgttcctagagcaatccatacacttgtgggagccagagtgagcacaaaagattctgtcctctaaatactagggatctatgctctgactgcaagttatggcttcttatcacagaggtgcagaaaaagaggtgggtgaccattattgttgcaggtccctccccctctggctgtagtgatttctaggagacttgaagggccaatgccctctttctccttaacttttctccttttccttttgggagcgagacattaaagactaggacattcataaacaactgcatatacacaaaaaattagaaagtgatgattgtgcatgctcagggaaaggtgcagggctagaaaaaatccgaagaagaccttacctttccacctcaggctggatccttggcacagaaatagcctacgacagtaaaaaataacaataacaaataacaaaccctgaggaaaaaaaagaacctgatttccagagttaccacactagtaaattcaaagttccagttttcaacaaaaaaacacaaggcatagaagaaaacaggaaaatgtggctttttcaagggaaaaatgtagatcaacaggaactgtccctgaaaaagacttgatggctgatctactagacaaaagactttaaagcagctaccttaatgatactcaaataactaaaggaagatgtggggaaagttaagaaaaagataaatgaacaaaatagaaatatcaatgaagaaatagaaaacctgaaaagaaatcaaaaagaaattatggagctagaaactctagtaactgaaatgaaaaattcactagaggtattcaaaggcagatttgcacaaacagaacaatcagtgaacttaaatataggacaacggatatgatttagtttgaagaacaaaaagaaaagattgaagtgaacagagcctaagagaactatgggacacatctgacagacctccctatacattttgagagtgccaggagaaaagagaaaggagcagaaagaatattcaaagagataatggccgaaaacttcccaaatttgatgaaagacatgaatataaacatgtgagaagtttaatgaactccaaataagataaaatcaatgagattcacagataaaatcaactttcaaaagacatacagagtatcctgaaagcaatcagaagcagctcatcatataaaaggaatcctcaatataattaacagatttcttgtcagaaactttagaagccagaaggtatgggccaatgtattcaaagtgctaaaaggaaagaactgtcaaccaagatgcctatatttgtggagccaggcatggtggcattgcacctgtaatctcagctactcaggaggtagaggcaggtggatcatttaacaccaggagtttgagaccagctttagcaacatcgcaagacctcatctcagtaaaaacccaatcctatgtctgacaaaagtgtccttcaaaggagaaggagatagcaggtgtggtggtgtgtgcctgtagtcctagctacttggaaggctgaggcaggagagtcacttgagcccaggagtttaagtttagcctggcaaaatagcaagtccttgtctcttaaagaaagaaaaaattagtttttcagcagtaaaatgagggaataaagtgagggagaaatttaaacacgcccaaataaacaaaagctaagggaattagctttgctatttgccactagacctgcactgcaagaaatgcttaagggagtcctctgaagtgaaatgtaagcatactggacaatacctctgagctgtatgaagaaataaaaatcttagtaaaagtgcatgagcaagtataaaaattagaattattgtaataacagtttgtaattctgctttttgttttctacatgatttaagaaaatgatacatgtttaagaacacaattagtctaaaagctaatagtattgtaactggtttgtaattgcagattttgttttcagtagactaatggatttaaaagaatatttgcttatttttttagtcacacagaatataaagatgtaattttgtgacatcaacaactgaaaggggtgaagacagagcttcaaaggagtagagtttttgtatgttactgaagttaagctagtttaagttcacattacagtgttataatttcaggatgttaaatatcatcccgatgataaccacaaaaaaaataggtatagaaatacacaaaaggaaatacgaaaaaaattcaaatatttcactatgaaaaatcaactaggctgggtgcagtggctcatgcctgtaatcccagcactttaggaggccgaggcgggcagatcacgaggtcaagagatcaagaccaccctggccaacatggtgaaacccagtctctactaaaaatacaaaaattggctgggcatggtcacgtgggcctgtagtcccagctacttgggaggctgagataggagaatctcttgaacccaggaggtggaggttgcagtgagccgagattgcaccactgcactcagcctggtgacagaatgagactctgtctcaaaaaaaaaaaaaaaaaagaaaagaaaagcaaaatcaactaaacagtgataaactagacagtgatgcaggaaatgagggacaaaaatactaataaggcacatagaaaatagcaaaaataagtaagttcttccttatcagtaattactttaaatgtaaatggatccaactcttcaattgaaagactgacagaatgaattaaaaatacatgatcaggccaggcgcagtggctcacatttgtaattccagcactttgggaggctgaggtgggtggatcacaaggtcaggagttcaagaccagcctggccaagatggtaaaacttcatctctactaaaactataaaaattagctgagcgcagtggcgggtgcctgtaatcccagctactcgggaggctgaggcaggagacttgcttgaacctgggcggcaggggttgcagtgagccaagatcacgccactgcactcctgcctgggtgacagcaaaaacaaacaaaaaaaatgatcaactatatgctgtctatatgacacttgagatccaaagacaacaaacagattgaaagtgaaagaatggaagaaaatattcatgcaaatagcaaccaaaagagagcagggttagctatagtaatatcagagaaaatagactttaagttagagaaggttttaagagacaaataaggacattgtgtattaataaaaggttcactgcagcaagaagactataacaattataaacatatctaatgacagaccatcaaaataatatgaaacaaaaacagaattgaaaggagaaatagacagttctacaataataattcaatgccctttttcagtaatagaccagacagaattaagtaaagaaacagagaacttaacacaatataccaactaggtctaaaagacatatacagaacactgtaccaaactataatatatacatttttctcaagtacacatgggacattttctaggttagatcatgtattaggacacagattaaatcttattccattttgaaataaataccatataaagtgtcctctctgaccacagctgggtgacttgagaaattagtaacaagtaaaactggaaaatttacagaatcatggaagttaaacaactagtggatcaaagaaaaaattacaagggaaattagaaaatgcttagagttgaataaaaacataccaaaactttgaggatacagtgaaagcagtgctaagggagaaatatagccataaacayttatattagtaaacaagacctcaaatcaacaacatagctttacaaattaaaaaggaaaataatgtaaatccaaagctagcaaaaggaaggaaataataaagatgtgagctgaaatcaacaaaacgagaatagaaaaacaatagagaaaatcattggaactaaaacttgattatttaaaaagatcaagaaatttgacaaacctttagctagatggactaaggaaaaaagaacattcaaattaccaacatcaggaattaacgtagggatgttatagcagtcctaccttattcacaagggtatatgttccaagaccccaagtggatgcctgaaacaccacagatggtactgagctctatatgtatatatataaatttttttcctatgcatacatacttacgataaagtttattttagaaatttggcacagtaagagattaccaccaatgacaaataataaaatagaataattataacgtatactatagtaaaagttacatgaatgtgagcacatgtgcgtgctcactctggctctttctctcttttccgttctctccccctatttccccctccctctctcctttcaaaatgtgttactgtgctatactcacctatttttggatcagaatttccacaagtaactgaatctatgcacatgaaaccagggaaaagaggggattactgtactactgactatagaaaataaaaagaagtgtaagacattatgaaaaattttatgccctaaaatcgggtaacctagatgaaatggacaaattcctagaaacacaacactgaccaagactaaatcagaaaggctgggcacagtggctcttgcctgtaatcccagcactttgggaggcagtggcaggtggattgcttgaacccaggactttaagaccagactgggcaacataatgagaccccatgtctacaaaaaatacaaaaattagctggacgtggtggtgtgcacctgtagtcccagctgcttgagagctgagctgtgagtattgcttgagcctgggaggcagaggttgcaatgagctgagattactagacctgcactgcaagaaatgcttaagggagtcctctgaagtgaaatgtaagcatactggacaatatctctaagttgtatgaagaaataaaaatcttagtaaaagtcaatgcatgagcaattataaaaattgctctccagcctgagtgacagagtcaaattaatagtataatgagataccaccttaaacccattagggtggctattatcaaataaataacaagtgttggcaaagatgtgaagaaattggaacccttgtgccctgttgataggaatgtaaaatagtacagccagtgtgaaaaatagtatggcaattcctcaaaaaatgaaaaatggaattaacatatgatctaccacttctgggtatttacccaaaagaaatgaaagagggatcttgaagagagttgtatacccgtgttcctggtatgattcacaatcacaaaaacatggaagcaacctatgtgtacatagatggacaaatatataagcaaaatgtggtatatccattcaatggaatatcactcaacctttaaaaagaaggaaattctgccacatgctactgaagcgtgaggacactatgctaagtgaagccagtcaccaaaagataaatactgtatgattccactcatattgggtgcatagagtagtcaaattcatagagacagaaagtagaatggtgattgccagggatagggggagggaaaaatgggatgttgctgtttaatgggtatagagtttcagttttgtaagctgaaaaagttttggagattaattgtataataaagtggatatacttaccactactgaactgtactcttaatggttaagatagtttcactgtttcaaaacatgtagtgtatccttataacaaatacccacgttcttaacaatagagatgcattctgagaaatgcatagtttgtcgattttgttgtgcaaacatcatagagtgaacttatgtatagatggtatagtctattacacacttaggctatatgatagagcatattgcttctaggttacaaacctgtataacatgctattgtactgaatattgtaggcagttgtgacacaatagtaattatttgtatgtcaaaacatagaaaaggtacaataaaaatatggtattataatcctatggaaccaccatcatatatgtggtctgtcattgacaaaaacattatgcagtgcatgactgtacatactagaacaaaacacttttataccaatactgttgtgacacattttaaatattggatactaaatgaatatagaggctgatagttgagtgtaattgtatttctacctctaccaagaccttattagcaatgcatggacttgatcctaagagaaacagggagccatagatacaggtatatgatattatgtaatcaaaagccctgaattacaagtgtaagaaaagaaggttgaaaccaagcagagaatgggggcagctgttatggccctctacttctatggtaccatgttatatttgggcatttttttttactttggatggtcataagcaatgtcttactctcttcttcctctctagtatacttgtaacactcagctttttagccctgagttaggtaagtcattgcttaagacacaggaactagggtgtatgataggccctggttaatttttccagcttcatgtcactttagcattttgcctattcagatatttctgtaaaggaaagtttatcgcatgttctagtttagtagaagaaaatgccaaatgaataaccagctcccataaatgaccttcaaatgagttgctatatttgatattagtttttaaattatgatacaggaatgactaggatttgaaaaagctctcccgtggtggtttgtgggcaaatttttgcaaatgttctgattttcagcgtgatttgagaaaagtatcttgagggtaagcaaatagggtattcagtgaagttaattgtactgtacctaggttttagaccattgaaatatgataaaaatcctgtttaatactattagaaaataaatgttttaaaatttatttgattcatgattggttcagttcctggaaattattgtcagttgagccttttcttataaagttagttttctttcatatctctccatctggttcagcaagggactgtcttatttggtttctactgtatatgtacattttcagtctgagtcttggtatttaggtttagtatagagaattacacttctggactaaccatatcgttttacagataaaatgaagcccagggaaggcaataagtaatgtgtctaattgtctgttacagtgattcaaaagcacattttctcactcatgttcttgtggggtttttgctacagactataacttctctagtgggggacccataagtatttgaaagcctaaataaattttaatattaatgagcatgaaattgtcatgctaaattttacctcagataatatatttatattgacctggacaagctaaaattgttcccattgcgtattttaaattacaattttattgattaaattgctgtcttaggtattgtatctggctcctcatgtggtttgttttaaaatagtaatattgaagttaaatgtatggatgctcacaacacagtcagcttgtttgattttattacgggtttcagaattttattttcagaaaaatcctttattgtgcttatgttaacatttaatcttgtattttctcattttccataattaaaatggagagagacaatgtagtttaggtggagggagtgggagtgaggaactgtgacattaacagctaggtaatttttgacaccatgaggaagttacttaatttctctctcaatttctttgctgtgcttcttgctacagagtgttattaggaaaaagaagaaggttttcaaaaggcaagtgctattttttttttaaagccaacctttttactatgttttataccactttctttggagggtagatagactgatgaacaaactgttcagaatgataatgtacgagtttatcttccacataattaaaccaagctaccaaatttagctgcaactttaagagaggttttttggctttttttttttgttcaattcagtttttagacatttctggtattttatttaatcgataactttgaactatattatttaatttgaaatgcttttaaatgttctcaaagcatcaaagtctaaagcataaaggtatatatatattggatttagtctaaaggttactatttttttttgaccagtagtaaccttcgtatcagctttcacatcgaaaaatattactgacctcctctagtggccaaaagattgttaatttaaaaacatgttcaggctggtattgctcttaaaagaaaaaaaaaaagatatgtcctaatataacaaaggtatggtctcattactgtagtattcagaagtagtaaaccttgatctgggtaggaggtgtttcagtaagtgcttcattgacccaagatgttattttttatttatgtagaacatgcttaggaatactgcttacaaatactaacaaatttgggaagcagtttttttgcaaaaaatttgtatgagggatcttaaagcaaatatgttgaaatggaaaaatactcctatagtaactatatttgaattccagattattaattttggtagaatttatgttttcaaaataatggattggtgattagaggttgtaaatgagttcaccttcttttttcttgtggaagagtaagtggaattaagaaaaagccagyatgcctttaaagtactgtccccaaaactggtgccactgggattttgaaagcatgttacaaattttaagaacatttaacactgtatcagttatgaccactgagtaatttcttctcattttcatccttacttccttaaccctgcttcaccctcaaaaagcagacattataaatgcaaataaaaactgtgggttttcaaagtggatatcttgagaagccaaagagatgtgttaacaaatttttatcagttttttagaacagtttgataacttttcttttagaactacttttggtccctatagtactttttaaaggtactgatatctttgatgatagatacgatttttgagagaaattaaaaactaattgagagccatgtcatataaataaaatcaatttaagaatttaagctcttcctttaatataatgagtcttttctttaatttttattctaaaatcaccaaaatgatttgaaatagctctattttgtgtaataaattgctctcaatatggttatgataggaacattcaggaaatttcacacaatgacagcatcattagcacaattgtagacattaccagaatgactaatttttaaacaatgaaggtgtatttgtgtgtatatttgtatttgttaaaaactcaaaatttttatatttgtagttattgtagttactggcataatgaaccctcattattaaattgaataacaatggaagtaggattcatgagtatactatcttttcttttttcttttttttttttttttttaatgagacagagtctcactctgttgcccaggctggagtgcagtggtacaatcccagcttactgcaacctctgcctcccgggttcaagcgagtctcctgcctcagcctcccaagtagctgggacaataggcgtgcaccaccacacccagctaattttcatatttttagtagagactgggttttgccatattggccaggctggtctcaaactcctgacctcaagtaatccacctgccttggcctcccaaagtgctgggattacaggcgtgagccatcatgcctggcctgttttctttttcattggaattatttatacagtatataatgaaacttatttaaatgaaattttattagacttagaagtacaagtgtactaaactcgtagcctccacatttatctgttacccatcacttaaaatgtgttgcatcgattttgctgaaatggagtcttgttttatcatgtctttgttgtaagatgatgttacttgttttgaaatagtggaacttgaagaaatacataagggcacaagacatatagtgaagacaccgttagtaaagtgtttaatgtttatattttgttttaagatcattttaaaaaatcagtagttttgacttgctctgtttaagactcattaatactggacatgaatagggtggattcatttggatttaaacttcatactgggccagttacagtggctcctgcctgtaatcccaggactttgagaggccaaggtaggagaatcgcttgaccccaacagtttgagaccagcctagacaacgtaataagaccccgtctttaaaaaagtaaaaaataaaaataaattagtggggcatctttgctgcatgccattagtcccagcatgcagcatacttgggaggctgagatgggaggattgtctgagcctgtgagatcgaggctcctgcaagccatgactgccactgcactccagcctgggtaacagagcgataccctgtctcaaaagaaaaaacatatatattcaaactgttgagttttgaatattttcaaataaatgtccaaaatgtgtttaatattataaaatatggattataagttgtagggggtattattatatttcaaaagacattccaattttgcttagaaatgaatcacacataggtatctaagtaacttctgaaataccttatattttcatctgttacagagagattcttatttttaattgcagtctcccatatttaaatctagcaaaagaaagaaaggaaagggaaagggaaggaaaaggaaacctttaccaaaaccagtataagaaatagagtactacacttacaaagctagcattgtgtctcagaaaagaagaaactagagccattttaggtaaaggacctaacatgatacctttgctctaggattttaatacacctcattctttcataagaattttccacacaggtggccgagtgcagtggctcacgcctgtaatcccagcacttagggaggccgaggcgggcagatcatgaggtcaggagatcgagaccatcctggctaacacggtgaaactctgtctctactaaaaatacaaaaaaattagccaggcatggtagcggacgtctgtagtcccagctactcgggaggccgaggcagaagaatggcgtgaacccgggaggtggagcttgcagtgcgccaagatcgcaccgctgcactccagcctgtgtgacagagcgatcctccgtctcaaaaaaaataaaataatttttcacacagggacctgccgctgccccagctggcatgcatgcatgcacagacccctataggtacacaaatatatgaggacacctgcaggtaccctgctggtgtgcacatgagcaaggacccccactgccccacctgtgcatatgtgcagggtgagggagccaccaccaccctaccagagtgcttttgccagcagtccccatcagagtgtttttaccagcagactgggaatgccttatccctccagtacagcaggtgcttaacctctaggggccagacagtaatnnnnnnnnnnnnnnnnnnnnnnnnnnnnnnnnnnnnnnnnnnnnnnnnnnnnnnnnnnnnnnnnnnnnnnnnnnnnnnnnnnnnnnnnnnnnnnnnnnnnnnnnnnnnnnnnnnnnnnnnnnnnnnncaatcaactaaacccaacttacaccacagtcaattccttaagagcctcaaacaatataaaaaaagaaagccctatccaaaagacagcagcttcaaagattaaaggaacaccagcccacagagttgagaaagaattagcacaagaagtctagcaactctaaaagtcagtgtctgctaacctccaaattaccacctagctccccagcaatggctctgaagcagactgaaatggctaaaatgatagctacagaattcagaatctggatggcaaggcagctccttgacaaacaagagaaggttgaaatgcagtccaaggaacacagttaaacagtccaagggttgaaagatgacatagccattttaggaaagaaccaaacagaacttctggaaatgaaaaattcaccacaggaatttcagaacacagtggaagtattaatagcagaaaagaccaagctgaagaaagaatctcatagcttgaagaccactcctttgaatcagtgcagacagacagaaataaaagagatagaattttaaataatgaacaaaacctccaaaaaatatgcctacatcaagaacttagaatgatcacaaatttacaacctaacatcaccatgatgaactagaaaaacaagaccaaccccaaagccagcaggataaatcaaataaaatgagagctgatctgaatgaaactgagacatgtaatctgtgcagaaaatcaacaaaatgaaaacttggttctttggaaaaataagattgatagacttctagctagactactaatgaaaaaaagaagatccaaataaacacacttagaaatgacaaaggtgacattaccactcatcccacagaaatacaaaaaaccctcagagattaaaaacctctgtgcacaaaaactacaaaacctagaaataggtgaattcctggaaacataaaaccttccaaggtttgaccaggaagtaaatgaaatcctgaacagaccaataacaagttcagaaatggaatcagtaattaaaaaaaaaaaaacctaccaatcagaaaaagccgtggaccacatggattcatagctctattctaccagatgtataaagaagaattggtaccaatgctactgaaattattccggaaaaaattaaggagtacatattcctccctaactcattctgaggccagcatcattcttataccaaaacctggcagagacacaacaaaaaacttcaagccaatatccctgataaactgagatgcaaaaatcctcagcaaaatattagcaaattgaatacagcagcacgtcaaaacaccaccacaatcaagtaggctttattcctggaatgtaaggttgtttcaccatatgcaaatcaataaatgtgattcatcagataaacagaactagaaatgaaaaacacatgatcatctcagtggataacaggaaaggccttagattaaacatcccttcatgataaaaaaaaaaaaaaaaaaacctcaacaaactaggcattgaaggaacatacctcaaaacaatataagccatctttgacaaactcacagccgatgtaatactgaacaggcaaaagctggaagtaccccctgtgataaccaggaaaagacaaggatgtccactctcaccactcctattgaacataatgctggaagctcttagccagaacgataagtcaagagaaggaaataaaaggcatctggattggaaaagaggaagtcagactatcttcacagataataaatattattctattcctagaaaaccccatagtctctgcccaaaggctcctagaaccaataaacaaattcagggtataatatcaatgtacaaaaatcagtaccacaagccaagcaccatggctcatgcctgtaatcccagccccttgggaagctgaagcagaaggatcacttgagaccaggagttggagactagactgggcaaaaagagtgagaccccatctctacaacaaatcaaaaaattacctgggtgtagtggcatgcacttgtagtcccagctactttggaggctgaggcaggaggaccactggagcctaggaggttgaggcttcagtgagccatgatcacaccactgcactccagcctgggtgacagcacgagaccctatctcgataaaacaaaatcagtaccatttctatacaccaataacatccaagctgagagtcagatcaggaatgcagtcccattcacagtaaccacaaaaggaattaaatacctaggaatacagctaaccaggtaagtgttaaagatctctacaatgagaattataaaacactgctgaaggaaattggagatgacacaaacaaatggaaaaacattccgtgcttatggataggaagaatcaatattgttaaaactgctgtaatgcccaaagcagtttacagattcattgccatttctatcaaactactaatgtcttttttcacagaattagaaaaaactattttaaaattcatatggtaccaataaaggtcccaaatagaacaatcctcagcaaaaagaacaaagctggaggtatcacactacctaattttaaactgtattacaatgctacagtaacaaaacagcatagtactggtacaaaaacagacacatgaccagtggaataggttagataacccagaaataaagcctcacaaccacaaccatctgttcttcgaaaaagttgacaaaaataagcaatagggaaaaggctccctatttaatacatggtgctagtataccaggctagccatatgcagaagattgaaactggatgccttcctctcaccttgtacaaaaattaactcaagatggattaaagacataaatgtaagttctaaaactataaaaacccaagtaggaaatctaggacatactggtctaggcataggccttggtgaagatttcatgaagaagtctccaaaagcaattgcaacaaaaacaaaaattgacaagtgaaacctaattatagagcttttgcaaagcaagagaaactatcaacagagtaaacagacaacatacagaaagagagaaagtatttgccaactatgcatacaacaaaggtctgatatccagaatataaggaacttaaatcaagcaaaacctaaacaaccccattaaacgatgggcaaaggacatgaacagacacttctcaaaagacatccatgctgccatcaagcatgtgaaaaagtgttcaacatcactgtttgttagataaatgtaaatcagaaccatctcaccaatcagaatgtctgttacaacaaattcagaaaataacagatgttggtgaggttgcagagaaaagggaatgcttggccgggcgtggtggctcatgcctgtaatcccagtactttgggaggccaaggcaggcggattacgacgtcagagatcgagaccatcctggctaacatggcaaaaccctgtctctactaaaaatacaaaaacaaaattagccgggtgtggtggctagcgcctgtagtcccagctattcaggaggctgaggcgagagaatggcatgaaccctggaggtggagcttgcagtgagttgagatcgcgccactgcattgcagcctgggtgacagagcaagtcttcatctcaaaaaaaaaaaagggggggggaatgtttatacactgctggtgggaacgtaaattagttcagccactgtggaatgtagtttggtgatttctcaaacaacttaaaacagaactaccatttgaccagcaatctcattactgtgtatatacccataggaatataaatcattcctccataaagaccacatgcatgtgtatgttcatcacaacatttttcacaatagcaaaaacatggaatgaacctaaatgcccatcaacagtagactggataaataaaatgtggcatatataccccatggaatactacacagccataaaaaggagtgagatcatgtcctttgcagccacatggatggaactggtggccattatccttagtaaactaatgcaggatcagaaaaacaaatactgcatgttttcatttataagtgagagcgaaataatgagaacacatgggccaaatcatggagcttatctaataatttatgtccaacattagctctaattagttcatttccaaccccataacacagagaagggatcaggtgggtgatgccaacagttcctgccatgacagagctcacatagcagggccacagaagcattgttcatccaaagtgtttcctgagctccctctgcctgctggaccacctcttcagtgtagtaagtctggaatgggtgctaattcccttcttcatgaaatggatgcagttagaggccattatcctaagtgaattaacacaggaacagaaaaccaaataccacatgttcttacttaaaagtgggaggtaaacattcagtacatatggacacaaagagggaaacaatagacactgggccctacttgagggtggaggatgggaggagggctagggacaaaaaaatacctgtcaggcactaagctcacgtcctaggtgatgaaattattttataccaaactccagcagcatgcaatttacccatgtaataaacctccacatgtattgcctgaacctaaaattaaaattgaaaaacagtaagtcttttgtttgtttgagatagtctgtctgtgtcacccagactggagtacagtggcacaatcctagctcagtgctatctcgaacttctggatgcaagggatcctcctgcctcggccttccaagtaactgagactacaggagcacaccacaatgccccactaacttttaaaaactttttttgtagagatggtgtctcgctttattgctcaggctggtcttgaactcctgggattaagcagttctcctgccttggcctccagagtgctgggattacaggtgtgagccactgcacctaatcaagaactctttttttttttgtgaactgattgctgtaattagaattccattttgctgtgattctgttatgttgaaacaagcttacatttttttctttatcaactttattggggtacaatttacatttacattcttaaaaagtacccattttaattgtacagtttcagttttgacagatgtagtctacacttcccacattttcttctacctctttgtattcagtgcccccattgtactctggcctgctcttgtttgtcatagattagttttgtcttttttaaaaatcagttttcttgaggcataatttgcataccatgaagtacatgcttttgattaccttttcattaatcattttcctggctccagaatgtttatattccttcatcactaagacattgctttgagatgtggattcatgtaagtctcggagaagagctttgattccaccttgtcttaaaattatgtgtaatttgttagccaattaagagttgagaacatattgaagtactttttatagatagaatgttttataagcaagcattattaaaaagtgtgaccattttactttggcaactggtaggtgttagaagtttgaaatttaagaggctacttgttttcatatggataaattcctagtgtctgcctgaaaatgtccatttcttttttcatgaactgttactttggttacagattcctttcctcctctcgtcatcctctttcttttttttttccattttgaccagatccatcatctgattattgatgttgggggtggggacaagtttcctcctcctttgagattgttactgttgtaccttcagagaattgtccctctttgttgctgttccttgccattgttactaccacttctaatctctactattctttttacccttgcttttttttttttttttcattttttcttatatttggatgaacttatctagtttctgatagcttttcagcacttaacactgccaggaaccaaactttatggtgaccatgggctcttaactgtttcaaggtaatatagaggacggcaggctatttttgatttacttgcttgtttaaaagacagggtcttcttgctctgtcacctaggcttcagtataggggtgcgtttagagcttactgcagccataaactcctcgcctcaagtgattcttctgcctcagtctctcaagtagctgggactagaggcacaagccaccacactggtccagggcaggaggtttaaagaattccaggatattttgggcaggcagggtggctcacgcctataagcccagcactttgggaagccgaggcaggtggatcacctgacgttaggagtttgaagactagcctggccaacataatgaaaccccgtctctactaaaaatacaaaaattatctggacatggtggcacacgcctgtgatcccagctaccagggaggctgaggcaggagaatcatttgaacccaggagacagaggtggcagtgagccgagattgtgccactgcactccagcctgggcaagagacagtgagactctgtctcaaaataataataataataattattattattattattattattcagtttctatttagaggttttcaaaatcccagataacctgaattttatgtactgtaggctggaggtggaagtaggggtagggatgttttttgacaaaaagaccattaatctgagaagcggaaaatccagagattactataagatcctagatggctaaaacattgaatttctgtcacttagtgtaaagtaggatttagaaacatttatggataaagataataaagatgggggattatttgataagaaacaaaatgtaattatcatacaaatgtaaagccaatctaccttgaagagataataggacacaagggaagatttttggaatgtgctttgttctttaagtttaggtaccatcagttcttttgcaactttaaatgaatttaaggttaatgaattaacagtttggttttaaaacccaatctaggttaatgacagcttgtttctttctttgtgttgattataatctttgcctcttgtaaatattttttttttttttttgagacagagtctcgctctttcacccatgtcagactgcagtggcgcaatctcagctcactgcaagctccgcctcccaggttcatgccattctcctgcctcagcctcccgagtagctgggactacaggcgcccgccactgcgccctgctaattttgtgtatttttagtagagacagggtttcaccrtgttagccaggatggtctcaatcttttgacctcatgatccgcccgccttggcctaccaaagtgctgggattacaggcgtgagccaccgcacccggccaactattttttaaaattaatgtgtgttcagagtctcctcttttctttgtaaatttgcttccattttattgcaaattgcacgttttttttgattgggtgccaccattccaggagctccgagatcctagaatattaaagttaaggtaaatgaagtgatactaactggaaaatgttttaaactagtgctaatatcatttacataaaaataaacataaaacttttatttattaattaaaccatagaagcttagtattcttatagctaaaaagaatattttccaattagaataatatcatgggtaaaccaatagctatatagaaatgtaatagattttcaggaattagaccacagaggctataaaatgtcaatggatatattttctataacacattgtatataattttgtttcctaatattaatcttgaaatgtttgtaactttaaataatttttcattgtaaccataggtttgatactaaaaataattagatattattttaccacttgtttattgagtagaattaaaattaaatacaatgtagctttttgttcctttgttttcactgttgatctctaagtattaaaaaaaaattgatgtttactaaacctacaggtttgttttcaccattcaaatgaagaaaagctgttcaatataaatacttacctagaaccataatagtacagaggagcaggattgaaatcagtcaaaccatgatagatatgatatattgtcaaaggatataatacagatgccttggtttttccacacaagcatattaattcactgtacttttttgagacttgagttttactgtgtcacccaggctggagtgagtgcagtggcgtaatctcggctcactgcaacctctgcttcccaggttcaggcgattctcctgcctcagccttctgagtagccgggattacaggtgcccgccaccatgcccggctaatttttgtatttttagtagagacagggtttcaccatattggccaggctggtctcagactccttacctcaagtgatccacccaccttggcctcccaaagttctgggattannnnnnnnnnnnnnnnnnnnnnnnnnnnnnnnnnnnnnnnnnnnnnnnnnnnnnnnnnnnnnnnnnnnnnnnnnnnnnnnnnnnnnnnnnnnnnnnnnnnnnnnnnnnnnnnnnnnnnnnnnnnnnnnnnnnnnnnnnnnnnnnnnncatgggatgctgacttaacagactagcaaaattggaaacttcgtgccatgaactgtcgaggtggttacaaaaatttaaaagatacaagctgcttccagaaagatccaagtccagtagtaataacaaaacacaaactattgtgaatggtaaatgctgtaattgtgatgtgttaagaatgggtgagaatacataaaattaccattttgaccactgttaagtgtacagttctgtggtattaagtacattcacactattgttcaaccgtcaccatcatccatcttcagagcttttttatcttccccagctgaaactctgtgtccattaaataataactacccattcttcttttccctgcccctggtaacaactattctgctttctgtctatgaatttgactactttagttttcctattattaaacagtctttgtgaccactagcccagcacatagtaggtattcaataaatttctaaattaaatggcatttaggaattgaaaggcattgcttatgtcagtggattgactatatatcttatgtgcacccagactgccaattgttataataaccttgttaattcataggaaaccttttgttttctcaagtattttttatttaaattcttttcacatagtttacttttttttttagactgaatctggatatggatctgaatccagcttgcgtcgacatggctcaatggtgtccctggtgtctggagcaagtggctactctgcaacatccacctcttcattcaaggtgtgtagttaatggatgccttaagttaaacaacataaattgagtttagtattggatgttgtgaacagaacatatgtgataattttttgaacaaacttttttatagtataatttatttgaagttattagagaagtactttttaaggtataaaataataactcatatagatgaacacatgtcactgattttatttcattcattcattaatgaggtaaaatataaaaaaactggttcaaaggaaaatctgaagaatactgaaatgatttgtgaatatgggaaaaactggtcagtatccacagattaataatcagtgcttctgcaccagacaaaattcatttgcatctctatgaacaagaattatttatactactcagttttttactaaaagagttgtaaaatagctcaaatgcagtgaaaggcaaaagtgtctatatgatcaaatagtactctcccaagggtaccataaatgacagctcaccattactttgaaaggacacaagtaatattttttcccatttcaaagtctttcacagttgttccacacaattttgtttaatttgaaaataccaaatgttatatttgcaaactgtcaggtattactgctttcttgttttctataaaaaatagggcttatttataagtgatatcacgaggttatcatcattcataagtggcttatcgctatcaagccaatagattcatcagtttcaagcctattcctagaagtattatatygaactagacagctctcyttatcccatgccctcagttataaggtgcagaccttaaaagttgatgaaataccataggaccacatgaaatccagttttgttttacttgaattacatccccctattttatgttttgcagaaaggccacagtttacgtgagaagttggctgaaatggaaacatttagagacatcttatgtagacaagttgacacgctacagaagtactttgatgcctgtgctgatgctgtctctaaggatgaacttcaaagggataaaggttaattaggctattaccactatttttacttggagaatgaatggattaaaagcctcttgatctcaaagggtaatgtctttaagtgataaaggtgtttatagtcattttttgctgcaaacccccagtgaaacagatttcagtgtccttgtaacttgggtacttcagttacacatactaattcattttgatcatccataccagatgccattgaagacctttattttatttatttacttttttgttgagacatggtttcattctatcgcccaggctggagtgcagtggcgcgatcatagctcactgcagcctcaaacttctggcctcaagcaattctcccatctcagccacccaggttgctaggactacaggtgtgcatcaccacacccagctaatttatttttctattttttatagagacgggggtctcactatgttggtcaggttggtcttgaactcctggcctcaagcaatcttcccacttcggcctaccaaagtgttgagattataggtgtgagccaccacaccaggcaaagactttcaaatgatactctttattccattaaaaaatgatatctattatcttggtattatggatcatttcacattattattatgtctgataaatttagcccatgatgagtcttagaggagataagtatatgttaaatccttcagatctgaaatcaaccagttgatctctttctctttctccctctcatttctctttttctccccttctcttttctttttgccttttcctctctctctctttttctttctttttttttttgagacagagtctcgctctgtcaccaggctggagtgcagtcgcgtgatctcggctcgctgcaacctccggctccctggttcaagtgattgtcctgcctcagcctcccaagtagctgggattacaggcacgtgccaccatgcccagctaatttttgtatttttagtagagacggggttttggccaggatggtcttaatctcctgacctcatgatctgcccgcctcggccttccaaagtgctgggattacaggcctgagccaccgcgctcggccccctctctctctcagtctctccctttctctaccctttttctcatagaagaagaatcagtaatagaaatggaagtaataattgtatgtacatttaaaaataattttattgagttcttatttaaaagaaacaagatatcttcaattaacttttagtgttaggtttatagtttaactttcctttgttagtcccaaaaatactgctgatgtcaacattgttcttcagctttttcacttaatttattgtgatggcaaaaattaactactctaccattattaccaaacaggactaagttcatccccaatataactaggtggcttgacatggtttcatttctcttttttattaaatgtgtttgatctggatccaagttctttttgtctattctatattccctttttctgccttctttggatgaaatttttttcatatatatataattccactttatctcctttgttagcttcttaggtataactcgtggttttgttattttagtggctactttaaggtttatagtttgcatatttaacttaccacagtctgccttcaagtaatataccactttatgtgtagtatcagaaccttccaataatgtagtagaatgttcatagctccctgtgaccttaaactcctgggctcaagtgatcctcctgcctcaacttccgaactggctaggactacaggcatacaccgtcatatctggttaatttttaaattttttgtagagatgaggtctcgctatgtggcccaggctggtctttaaactcctggcctcaagggattctcccacctcaactgcccaaagtactagaattacaggcttgagccattgtgcctggccttgaagttctatttgttaatataaaaacttttattaaaggttttggttcgttaatgtgtgattttttttttttcccctctaaaaatagaaaacacctgaacttctgtttctccttcattaaaaaagtataccttttaatcaatttaaatgttacagattagctttaaacaaaaacaggatacatatagaatatgatgccttgtttatcttaatggtccataccaatagcgtatagtattagaaggacaaaagtgatggtggaaaaagtggaagttggaatgcagtgataaccaggttgtgtagatgatttgaaaaataataatagacattacmcggaatcttttctgctacatgtttaaataaatagcaaattgaagactgatgtattagtttgctagggctgccatatcaaagtaccacagactgggtggcttaaacaacagatttattttctcacagttctgagataaaggtattggcagggttggtttcttctgaaggccatgaaggaaaaacctgttccacgcctctctccttggcttataggtagcctccctatatcttcacatcatcatctttccctttgtatgtgtctgtgtccaaatttcttctgcatattgtacagtcatagtggattagtgcccatcctaatgaccccatgttaacttaattactgctttacaaaccttgtctccaaataacagccatattctaaggtactggagattaaggacttcaacatatgaatttctgagacacaattcagcccataacaactgatttccctacaaatgttatttgtgagatactgactgattgattgatcctttgatttttatttgatactgggtctccctctgtcacccaggctggagtgcagtggcacaatcttggctcactgcaacctccgccccccaggcccaagcagtcctcccacctcagccttcccaagtagttgggactacagatgtgcaccaccatgcccagctaattgttgtattttttgtagagacagggttttgccatgttgcccaggcttgtctcaaactcctgagctcaagcagtctgcttgcctctgcctcccaaagtgctgggattacaggcataagccaccacgcccagcctgaaaaagctattttgtgtctgttttggaggtggaaggttatggtaaaggggtagtttgagaggaagatttaatgtgctggtggctgagaaatatttgggtggcaaaaataaatagatgtctggctgatactgtaatcatctcggggagctttaaaaaagaaataattgtatcatacccttcaccatagtctcactaaaccagaatattcaggggttgaggggagagagagagattaacgttttgttctttaaaagttccttgataggtagataatcaaaagttccttgatatgtggataccctctctagtagaagtatgagctagcattataaacaagccttctgaaggcagaaggaaagcacagcagaaaggggaaaacaaatattgtacagaaggcttttgagttttccaagaaaacaactcctttaaattgtgagaataggtcaaatctagagcaaatgaaatatctcctgcttctgtagaaaagaatgcatgaaggtagagttgaagagtgagtaacaaactgttttaacttttcattgatatgatgcaaaaaagtagggaaatttgaaaaggccccgggaagtaaggatctcaaaaggtacttgaaggtcatctttatgggattatgccaggggactaatttaggaatagtcgtattataacttcaactgatggtcagcatgattttttatctgagtatggtttaaaaataatgtatctaaagacattgcacagcatatttattgagcatatgagatcttactcatctttgtattttcactggtaatcaagatatgctcatattgaagtctgtaggaatgatggaagtggaaaagaaaaagaattgaatattgagatcacagccaggtagaaatgaatacagggtattaatagataatagtttatgatttgtaagagttgttatagatgattgacaacattttcaagtggttataaaaaaatgaaatagtccagtaattagaaaatggcagtacagaagattttccatggtgattcctaccatttaatcaaagaagggaaataaggtatcgaattgggctctgcatccataaaaaagacagctaagatagatgagatgttccttatagagccacggtgctcctgatgtaaaaagatacatgcagtaagtaagacattagtttaaaatgtagattccttctttataaagggagttcctgaaaagataaaggagccatgtaggctgggtgcagtggcttacacctgtaatcccagcattttgagaggcagaggtgggcagattgcttgagctcaggagtttgaaaccggcctgggcaacatggcaaaacctcatctctacaaaaattagctgggctggtggtgtgcacctgtgttcccagctgctcaaggggctgagtaggattgcttgagcctgggaggtggaggttgcagtgagctgagattgtgccactgcactccaggctgggcaacagagccagaccctgtctcacaaacaagaagaagaagaagccacaaaaagcttgataaaagcagcaaataatgttgggaactaagatgcaggaatttgcattatgagtggaatgcgtagtacagagaattaaagcatgtggcgtagtagaaaaagggatagcacatagaagaaagaggtatgttaaagtagaacaagagagattctgtttttgtctggaattagagaaaagggatgcctggatacagatacagcctgggatgaatgaaaattgatatcatggtcaggagattgagaccggattcctggctaacatggtcaaaccccgtctctactaaaaatacaaaaaattagccaggcatggtggcaggcgcctgtagtcccagctactcgggaggctgaggcaggagaatggtgtgaacccgggaggtggagcttgcagtgagccgagatcgcgccactgcactccagcctgggcgacagagcaagactccgcctcaaaaaaaaaaaaaacagtcgatatcatatctgcaagtcattatattttccttgcacatcagaaatagtatatataagaactctcgcctgggtgtggtcactcacacctgtaatcccagcacattgggaggccgaggtgggcggatcatgaggccaggagtttcgaaaccagcctggccaacatagtgaaaccccttctctactaaaaatacaaaaatattagctggctgtggtggcacgcacctgtagtcccagctacttgggaggctgaggtggaagaattgcttgaacctaggaggcagaggttgcagtgagccgagaccatgccattgcactccagcctgggtgacagagtgagactccatctacaaaaaaaaaaaaaagaacaactcttagaggcaagctaaggtgtcttctgcatagaaggcacccttatagtcctgttcagcccttctggtcctcttacagagtggaaatggccccacggaagggagcaagagataggaagactacagggtgaaataattcataactcagtaaccttcccttacacaaatgagagtgaatatggtttaaaaataatgtatctaaagacattccacatatttgggtggcaaaaataaatagatggctgatactgtaatcatctcggggagctttaaaaagaaataattgtatcatacccttctccatagtctcactaaatgagaatattcaggggttgaggggagagagagagattaagattttgttctttaaaagttccttgataggtagatatttattgagcataccttgattaccagtgaaaatacaaagatgagtaagacttcatactcagaatcagaatccagagtaaaatgactcagttgaacataagaatagacattaatttctatttcttttcatcctaatttccttaaatatattttatttagtggtagaagatgatgaagatgactttcctacaacgcgttctgatggtgacttcttgcatagtaccaacggcaataaagaaaagtgtaagtaatacatttttcccctcagctggataaaatatactttcagaagttatgtaacaactcacaagaaataattacctgattaattttttaaaaagcagtagaactggtggaatccaagtgaaaatatcttccaaggcatgcaggtaaaaatcacattctgacattatgtaataatggtaacttttacataaggatgtccagctgtcccagcatcatttgctgaaaagacaatttttttcccttgtcttggcaccttcgtgaaaatctgatagactgtaaatgcgagggtttatttctggattctcagttctgttgagttgatgtacgtgcgtattcttattaagaaaatataagctttaaaaaagctttattgagatacaattgacataccatttaaagtgtataatttgataaatttggatattttcgtgaaactatcaacacaatcaagatagttaacatttatatcaccttcaaaagttttctccatcccctttgtcattcctctctcccccattcctgaatagccactgatctattttctgacactatagattagtttgcattttctataatctaatataaatggagtcatacagtatgtattctttttttgcctggcttttttcttagtttgagattcatcattattgttgcatatatcagtagttcagttcttctcatagctcagtagtattttattgtatagatataccatagtttgtgtatctagtcattcattggtggacatttgggtcggttacagttttgactattacaaataaaactgctatgagcattcatatacaattctattcatggaaatttattgtatttattttgggtaaatacctaggagtagaatgttctaatcatatggcgggtgtgggtgtgtttaatttttaaagaaactgccaaactgttttttaccagccacatatgagagtcccagttcctccatatccccaccaacacttaatatggtcagtcttcaaatttcagtcattctaataggtgtgtagggatatgtcattgtggttttaatttgcatttccatattaactagtgatattaagcaccttttcatgtttttatttgccatttatatctgctctttggtgaagtgtgtgttcacattttttactcatgttgggcttggtgattattattattattattttgagacagagtttccctcttgttacccaggctggagtgcagtgtggtgatctcagctcaccgcaacctccacctcccggtttcaagtgattgtcctgcttcagcctcctgagtagctgggattacaggcatgcgccaccacacccagctaattttgtatttttagtggagacggggtttctccatgtttgtcaggctggtctcgaactcccagcttcaggtgatccgcccgccttggcctcccaaagtgctgggattacaggcgtgagccaccgcgcccagccagtgtttattattaatgagctttgaggttacttcatatattctggatagaagtctttattaaatatatgccacacaagattttctcccagtttgtggcttatctctttatcctcttaacagtgttttcaagagcagaaattttacattttgatttaagtttcacaatttgttctttgatggattatacctttactgtcatatctctaatcgtttttaaagtcaaaattgacattatttcatttataattattctactagaatgatttcttaactatagaatattatgatttcttgtttgcatctttgagttttaagattttttgtttaattcaaaagctaaccatgaattaaaatgataaaattgaaacgtaaaaggcattgagtttaagtgcattggtcctggatttaaatttgtatgtttatttttaaattgtatattattttattagattctttagtttatcttcagattttttttaattctaggcttttcaaaataataaggtagttcttgccataattaggtcctactctaagctgtcagaatgttattgttaaagtattgctcctcctaccatttgattaattgggtgcagcacagcaaataaatttcaggaaacagaatctagaaaaaaaggacttgaaagtacatatgctgccacgaagcttctttgcttatagagcttggataggagatttttaaatgttggcctacaggaggaaaattaaaatcccaaaacctgctctgacttgctaattttctaaacattttctaatcttaaattgtgatgaattatttcctcattagagatattttcagtgaataattttcattttcagtatttccacatgtgacaccaaaaggaattaatggtatagactttaaaggggaagcgataacttttaaagcaactactgctggaatccttgcaacactttctcattgtattgaactaatggttaaacgtgaggacagctggcagaagagactggataaggtaagactaggtttttttccttttaaaaataatcacatttaagttttacgtattgtttgaatatttaaaacaagctaacttcttagggaagaatcttgggttgatagaaatagcagatgatactactactctgaagctttatgggcatcctaaactcatttgcctaacaagattcaccaattacttgtttagttactatacagtatgctttcttgaaagatttaatataaaagtttttgtgatgatgttagtaatgctttggaatagaagtgttgagccatttaacattacacacctttaggtgcatgatgtatgaaactgcatttaaggcatatgaactaacttatatgccaatttacaaagttaaacatttacttattatagtaatactcatgtattttttccatggtcagtgataccatttaacatacattatgttgtttgagcatttgccctatgttcacattttcccacctttgtttaaactgcagcactgataatattatagtatgactctttagtttctagtgtgaagcatggctcagtggatttgttaagtaggaaaacttctatttataattcagctttagaataatagtaaaatgttagagttgaaacataccttaaagttctagtccaatgccatcattttatagaagaaggaattgaggcccagaggcttgtcaaaaggtgaaaagtaatagagttagaggcatttttctctattcttttatatatcagctctggatgccagattagacatcagccagaatcatattcattctgagttatattgcttgcagagtttgaaggcctttgaatttgagcgggacactaaggaaagcaatgatagcactatgtgtttaggaaggttcccatgttttagaagaaaagagagctgttcagaatgcacaagtgcaggtgagagtaagccattttgattaggaatatgtcttcttttaaaataggtaatgaaaacatccttttaaggtatagaaaatttattatcattctggagccaaactattattatcttcaaagatttcaactctatactcagtgtggatcaaattgaattattagaagagtccctgttcacaaaaaaaaaacaatgtattgaaaaacaggacaactccctaaatacattagactaatggttcaagattatcattcagctagtccagactagcttatttccaactttttggcaactttctctctctttagtctctttttccttcactaagggatcatattctttggtcatatactctaaccacattgcctaaaataattttttttaaacctttgcacattatataccacttcctgattattttagcattcaagtttatttgccatgttgaaaaggggagatagatttttgattgctttcagcattgttaatcttaccagttctctttctttattgggtagcaatgagcagagcaaaccaaagatctgcgggaaaaaaaccacttttgttgcttctccatgcaacactctccaccaaagaacagccagaaaagatggcaggcagtattggttaaaatctggacactactgtgttttatagtcttcttacagatctatctgatgtcaaattttattaaccttttccactgtaattttttctcaaggttgaaataactggatcccagttacattttacatggaatgtaagtgtgtgtgtatttgcacatgtgtgtacacacagtatgtgtgtgttcatatatatatacataatatatgcagggtatgtgtgtatttattggtaagcaactctattcaagaactttctaatcttttgtatgtagagtgtgtgtgtgtgtgtgtgtgtatatatacacactaaagactagaaagttcttaaatagagaaagttgtttatcaacaaatacgtctttcaggtaattcttagaattgagaaagaaagtacaatgataacaatatggtttcactgaaattgtttcattcaggtgtgtgcctgctgtgtgcttgactctaagctaggaatgggaaaacagtgatgagcaggaaatagtctctcaaggggcttaaaatctaatgagagcaattaaataggtgataataacagctatttaataatagaattgtctatattatacttttatgtagatttataatgtcagttccaggattctttcagctaattgaaaatactattttgtagtgatgatttttattggttacctataataataatgatcctttccactgtagaagaagtgtacttaattgttagccagtcatgtccaggaaaaccaaaaattctaaaattaggcaattatggttaacagtgttaataagagataacctgttcattgaagatacattttcttacattattagattcacaggtgtgtacttttacatacattttcactttcctgtaagtctttaatattattgctgtgctgtgyatttttgttttattcatttaaaattaatacataacatacatacaatgaagtgtaccaatcttaagtatactacctgattttttttaacgtttgtatacaccccttaaccatagacagatcaagatatataacttttctagcaccctagaaggttccttcatgctccttcctattccatatcataccaccaccccaagaggtgatcatatggttttaacctatgtcattatagattagttttgcctgttctggaacaacatacaaatggaatcatacagtatacttttgagtcaggccttctctttccttcaacatttgactgtgagattcattcatgttgttatatttaatagtagtttattcttttttattgctatacactattttattgtataactttttattgtatgacttcaatttgcttatctattttcctgttggtggacatttagatttttttcattttttggctatcatgaatgaaactgctatgagagttcttggggcatatctttaggtatatttctcataccttggagtagacttcttgattcataggggtatatgcttaactttagtggatactgatgattttccaaagtgattatttctaccagcaatgggtgaggattccaattatttttaattcttgacagcattttggtattgttagggatgtgtgggtgtgtgggtgttgttgatgttgttcactcttgactgtacttggtattgtgtgtgtgtgcgtctgtgtgtgtgtgtgtgtataggtgttggtgttgtttgattttggggacagtctttctttttttgagagacagggtctcactgtgttgtccaggctgaagtgcaatgactattcacagacacagccattagtatactacagccttgaactccagggctcgggtgatcctcctgcctcagcctcctgaatgaccaggactacaggcacatgccactgcacctggcttagtcattctggtggatctgtagtcccattttctctttagtacacaaaaatcaattaatgaaatctttgggtctaatgaacccattgattcattgatttccactgtctttaacgctgatgtggtatttagaagtagtttgctttgtgtgagttcagtttagactttagccattaagttcagtgatacactgcataacgacatttccgtcagtgatggaccacatatacaactgtggtcccataacatgataatggagctgaataattccttttgcctagtgacatcttgatgatcctgaccctgtgtaggcctaggctaatgtgtgtgttgtctcttagtttataacaaaaaagtttaaaaagttaaaaaaaataaattttttaaaaaatagaaaaatgtttgtagaatacagtataaagaaaatatttttgtgctgctgtacaatgtttatgttttaagatatcttattacaaaagactcaaaaagtttaaaaaattaaaaagtttataaagtaaaagttacagtaagctaaggttgttattgaaggaagaacatttttaaataaatgtagtgtagcctaagtatgcagtgttaaaagtttacagtggtgtgcagtaatgtcctacgccttcacattcattgactactcactcactcactcaccctgaggaacttcaaatcctgcaagctccattcataagtgccctgtgcaagtatactgttttttatcttttatatcatatttttcctgtcccttttctatgtttagattcacaaatacttaaccatcatgttaaaattgccttcagtattcagtgcagtcatatgttgtaaatgtttatagcctagatgtgtagtaggctataccatctaggtttatataagtacactctatgatgtttatacaagaattaagtcgtcagtgacacatttctcagactgtatccccatggtgaactaacatgtgacagtaaatacatgtggctttcactagccttctttagatcacaagcataatctgttctcttatgatttttgatgatcacgctcttcagagtagtgtttttttgggaataaggggaaataggaagagctgtttacatttcctgtagccagagtgaccatgaatcctggtttgaccaaggcagttcttaattcagcaagattattactaacattccctttcgctttcaaaagtgtggtgcttacattacccaatagggggaccaagcaaatcagtcttttagaaaatggaatttggacaaggtaaaaaaaagaaagaaaagaaaaaagccatgtatgactatttgaaatgaggaaataaaagcattagattatttacaaacatactggactccagtatcagttttgacccagtgaaccccattgttgtggaaataagttttatatgggaccaacctttgttattttaagtgttgaccctgggtcttttaaccttttagagctataggccctatcattaaaaggagagtgttaaaatacataactaaagtctttttcaacgctaaaatacagtcttaagcagcagtgagaaagtataagaaggttttctttcttagaatatctttttagcattcattgatcccacctactgagttcttttctggtattacttgctgtttttcttcataccaaaataaatgtatctcttaactggggttggtgggaaggggaagtataagaatgtatagtaggtatttttcaggtgctaatttacctgggtttttttcttttcttttctttttaagtatacatgcagttacttaaccatttaaacacataacctacttttaaggtgattttagtggtgatttaaatcgtaggttgtggccgggtgcagtggctcacacctgtaatcccagcactttgggaggctgaggagggtggatcacgaggtgaggagttcgagaaaagcctgacaaacatagtgaaaccccatctctactaaaaataccaaaattagctgggtgtgatggcacaagcctgtaatcccagctacttgggaggctgaggcaggagaattgcttgaacccaggaggcggaggttgcagtgagccgagaccatgccattgcactccagcctgggtgacagagcaagactccgtctcaaaaaatacatacatacatacatacataaatagtaggttgtaagtaatttatagcctagagaaaagtgttttcttgggcagaataatactcttatttttcacaggagtggaatttttttgtgtcaaattgtaaaatttcagtgaaatgtagaggaattccacctaaaagacttcattgtaattaaaatgcctgcctcaaattacagatttttcacttctttttaataggaaactgagaagaaaagaagaacagaggaagcatataaaaatgcaatgacagaacttaagaaaaaatcccactttggaggaccagattatgaagtatgaatttatattttgatcttagagaaacacatagatcatgtctatcacaaaagtgattttttaataatactcttgtaacctttaaatattctraatatataattttttcctcagtgtttatgttaattcagtgtatatttcatgatatataaatgccaggcatgctcaaatrtatatttcttattgcctacaaagtttaggcttcaaaaggcttagtattaggcctgttcacttgataggacaaatttttatctcccctgtaaagatgatcatttttaatgttatctactttttttttttttttaacataaaagcaaactataaaggaaaaatctgagtactttgcagacaaaaagattttagtctgtactatactgtgagatctttttttttttttttgagaccgagtctcgctgtgtcacccaggctggagtgcagtggcgcgatctcggctcactgcaagctccgcctcccgggttcacgccattctcctgcctcagctgccctagtagctgggactacaggcacccgccaccacgcctggctaatttttttgtatttttagtagagacggggtttcaccatgttagccaggatggtctcgatctcctgacctcgtgatccgcccgcctcagcctcccaaagtgctggcattacaggcgtgagccaccccgcccggcctactgtgagatcttatccatagctgaacataaaactgttctaattgtctttgtttgaaaatgtctgaaaccagcttttttctccttgtgtttatttgttaagcagktaataaaatctccttcacatgtatatacacacatacattaaaatcttataagctttctatattaagagaaaaaaatgtgtaagaaatatatttggtaattgccattaaacaatgttgaggctagcgcactggctcacatctgtaatcccagcactttgagaggccaaggcaggaggattgcttgaggccaggagttcaagaccaacctggacagcatagcaagacttcatctctataaaataaaataacaaaaattatctgggtatagtggcacatgcctgtagtcccagctactgaggagcccaagactgcagtgagctacgattgcaccactccactccaggctgggtgacagagcgagactttgtctctttaaaaaaaaaaaaaaaacgtgttggccagcacggtggttcacacctgtaatctcagcactttgggaggctgaggcggggggatcacaaggtcaagagctcgagaccagcctggccaatatggtgaaaccccgtctctactaaaaaaatgcaaaaattagccgggcgtggttgtgagtgcctgttgtcccagctactcgggaggctgaggcaggagaatcacttgaacccgggaggcagaggttgcagtgagctgagatcgtgccactgcgctccagcctgggcaacagagcgagactccgtctcaaaaaaaaaagtgttgatatttctgaaatgagcagtttaaaaatggggtatcaaggagtaccactgaggtggaacagaagaataaaatagttgtagttatatttatgaaaacagaagaattttttcttgctacttttgctctagaaaggaaaactaaacagctgctctgctgttgctgaatttttttgcattggaatcaatttccaactgtgagagtgcattctgatgagacttaaattgtaatatttttaaattattctcaatttatcccttctaaaatgtattaaaattacataattagctatcctctgaggttttaatatgaggtattataatgatgatttttgttttgaaactaaacaaattattttgctattttagaattattattttggaagaaataccaactttttaaagtaccttattttttaatattataaataaaatgtatattcattataggaagattgtacaaaaattcaaataagccaataaagcccatgttttaaatttaacaatatatggtacagtttatcatctaccagcagtatgtaagtataatttgtgtacatatttatctctgcttccatcaacacaggttttgttttttttttcctaggggtagaggacaggggtggagggaagaggggccttgtgctaggtacatgcatttactagtttcaaagccaaaaaattgctttatgtatgtaattgagcattttaaaaattatgtttatcagatattcatgtttcttttttttttattttattttacattggaagtacacatgcatgtttgttacatgagtatattgtgtactggcagagattgggcttctagtgtgccccttacccaaatagtgaacattataccaaatagctaattttttaactctcacccctccctcccaaccttcctccttttagagtccctacatttccatctttatgtctgtgtgtacctattatttagctcccactcataaatgagaacatgcagtatttgactttctgtttgtgagttaatttgttctgggaccaaactgaggttcgggctgctatttctcacrgcccaataacgagatgcagatgaactggggaggaagagagttatttctgtaactggttacagggagaaggtctgaacatcatcaccagaccaactccaaattacaaagttttccagagcttatataccttctaagctatatgtctacctgtaagtgtgcattcacctaaagacataagttactaacttcttttaatctataactaaggtctgagtcctgaagaccttcctttggagcctcagtaaagtgctagagtgattacccttatcgtgtctcctactatatcacataggtttgaggagttccttcagacccctaatacacttgtttgtggaggactggggagtttcttcagacccccagtaaaacttgtttaatcctaaatggctcctattaagaattccttcattattgaagaaacaaggagttgttcaatgggaacagagtttcagttttgtaagatgaaaaagttctagagatcttttacattgcaatgtgcatatacagtaattaacactattgtactatacacttaaaaattgttaagatggtcaattttatgttttttttttttaccataataaaaaaaaaacaattgtgccaaaaaaaaaaaaaaaagaattccttcattattttatcacgctttaaggcccaggaaaggcctaggcaaaactcttgatgggcttttgttacatcccagcctttgtataagggcactggcttttaatatttaacttaaacattcagtcagtactgaaatggttgtttagtgagacctggcctgtgacaagttcactttggataatggcctccagctccatccatgttgctgcaaagaatatgatttcattcttttttatggctgccacgtttcttttttacgattaacttggccatgtcctttggttgttttcttattcgttttttttgtttgtttgtttgtttgggttttttttccctattgatttagaagatgtatagaatttgcctttttttttttttaatttttttccttcgtaccttaaaaaagtttggtagattttgacatataaaagttttaaaccttcgtgtaattaactcctcagtcctttgatccacttttctccacatttggtatcatgcttagaagggcattttctattttaaataatcatattttctaattttttattttccaatggtctcttctaaatatattaatacatctggagtttttaaaataatgatacaatatagaaacctattttattccactagcatttgttgaataaacatcctttattcacctatttgaaatgcactttactctttcttagtgaagaaactggttaagggtactctaattattttttttctcactaagttaaattaaatatacaattctttagataaactgggaactgtttttacacttccccttcttttggagttttgaaccatctatcttttcttgtaacaatattatagtcgtatgggttttagacacttaattcaaactatgactctttttggttataatcagacattcatgatgttctaattataaaaaagttctaagtgtttctgacttctgtagcctcagaaattactttataatcttaaatttattccttaagacttaccataatgtggctgggtgtggtggctcacatctgtaataccaacactttgggaggccgaggcgggcagatcacctgaggtcaggagttcaagagcagcctggccaacatggtgaaacgccctctctactaaaaatacaaaaattagctgtattaggcatggtggtgtgcacctgtagtcccatctactcgggagtctgaggcaggagaattgcttgaaccggcaggcggaagctgcagtgagccaagacctcgctactgcactccagcctgggcaaccaactgagactccatctcaaaaaaaaaaaaaaaagacttaccataatgtagggcactacactaggcttggagaatacaacaagaaacaaggcttataaggatcctgcctaagggccctacctgaatgcataatgggaacaaaggctaatagacagttatcataatgtatgtcatgaaacacttttaatgcagggaaggtgttgaatcagagatgtcttcccggagggaaagaacctcttaggaggaaagaacctcttagcagaaaccttaagaatgagtaaattgagtaaagagtgttttccagtagtcagaagcaaaataatatttttcctcaggggaactgaaagtaattctctttggaaggtagagcctccacaaattgagaggaaagaatggttaagagactgactggaaagatcaacaagaattagttcagatcctgagacaataggttttaatcaagaaaatgacattttcacatttgcagttcagaaaagtcattctccctgcagtaggaagaatggattgaaagtaacaattgtgactgggcacttggacactttttgtataatatagatgagagttgaaggtggcctaaattagagtcaaagcaggaggaatagagaggcactgacaaattagatacagtaatcccattgtatcagtggttgggggggatacattacaagacccccccccccccagtaactgcagatagtactgaaccctatatacactgttttttcctatatgtgctatgttttttcctatatgtatgtacctgtgataaagtttaatttttattttaacaataataaaatagaacaattatagtactgtattatagtaaaaagttatatgaatgtagtctctttctctctcaaaatatcttattgtatataaaccacataaatcaaaaccacagatgggggagactattgtatttggaaagtagaattgaagggtgtgatgattgaatgagggaaaaggaaggaatccaagattaggcccaggtttctgcagatacgtgtggagatagaagaggaggtttcagacacgttgcaattgaggtgagtcatatgaggaagtcttctatattagatacaaagatctgacccttagaagagagatggtctggctgtgaatttaggagtcatcaaaggatgactgaagcgttggatataagtaagaatgctgtgggtagagcaagtatggaaccctgaggaacaccaacatttaaaggataggcagagaaggggaaacctacaaaggagccccataagagtgcttagagagggagaggggaatttaggaatctaagggtagagaactcttcaaggagagttgttaacataagaaatgctattctaagggggcagataagtagctcctgcccttagtaagcatgatgagataaaagggttttttttaaagtcccttttaataaagaaaattttatgccaattcctttagttcctctcccaaaggtttaccattaaaggaaaaaccatttcatttggcaaaatagaatttttgttgttgttgttgttgttgttgtttgagactgagtcttgctctaccacccaggctggagtgcagtggtgcgatcttggctcactgcaacctctgcaacttccgcctcccaggttcaagcaattattgtgcctcctcctcctgagtactaggtttatagacgtgctccaccacacccactgatttttgtatttttgatagagacaggttttcgtcatgttggcctggctagtccagagctcctggcctcatgtgatctcccctccttggtctcccagagtgctgggtttataggcatgagccaccatacttggccagaatttttaaatgctgtagttttcaattagactcctgaggctctgacatgattgcttaaggactagaaatccacatgtactaaatcactgtagattgaatgaatattaatattttttaaatgtagatgtggttaaatagtatttaaaatcattagaaaatatgcttgagtttggatattttgtgttttctctgatcaacagagagcaaagttgtcctgctgtcattttactgtctttgaaatgttttgattttgtaaagagaatcctgcaggaggaaggcctctagggtgttgttactattttttcatgaccctcttgtcccagatggtcattagatggtatattcactttgtgatgcttcactaagatatgcactgttctgtatgtttgttgtatctgaatagaaagttgtttttttttttttttttttttttatgaagtaggttgtaggggactgagtcctcataaccctaaaagaagaactccattaagtcaacatttcttatatgccaaatgacaagaacgtgaccccatacctcccacccttccagtgtagttccaggttatggtggggataggacgatgttgctagatactttttaatggactaatgatgacttggggttatgagtttaactgggaagatttcaccaattgttcatgtgtcttattttatatattttaacatttaagaaatgctaaacccaagcctaccttttagtctctacttttatcataatacaaagctgttgttccacttacttggttcatcacagcaggaacatatgttgattgtttacattttgttattgttctttgtatgtttatcttctgatgcagctgaggttccacttgcatgggaatcacttgagggaattattaaacatgtatattccaaggttccactgaagacctactaagaaataatttttggccatggaggcctgggaattttcattgtaagaagtctcccacacaattccccaagtgattgatggccattattctgccatctagccagactatcaagcatcaactcaacttttatttccccatgaaacaattacctgtgcttaggaagatccgcctctgaatgcctagccgtacttattagctatagttcttgtgcaaatttttacttacctcattgcaattttatatctctgttgtctctgtcataagtctcaactctgctactaaagaagccctagataatatatagctgaatgagcatcactgttttccagtaaaactttatggacaccaaacttttaatttcaagtaattcacacatgtcatattattacttttattttttccagccatttaaaaatgaaattcttagctcacaggctgtacaaaagtaggcagcagactggatttggcccttgggccatagtttttgccaatctctgctctagactattatcccaacacaatattggtcaatatacagtaagtaaatatatgagtactgagtgaattaattgtaacactcgtgattttacacagagcatgcatatgatctagtatactgactgctttgtaaatatgtgttcaataaatgtttattaggtcaattttcaaactcaagttaataccagagttatcagagttttctgtttctttaaataaactgcttttttctccactgtgtgttggaataggaaggccctaacagtctgattaatgaagaagagttctttgatgctgttgaagctgctcttgacagacaagataaaatagaagaacaggtatatctattattgaaaattctaagctgaaatttattttaacactataggcattccttggtgtatattatttcatgtaaatagaatttgaacattgtgaacttaataacctagaagcttaactgtgaatacattgagtcacaaatgtaaaataatctttttttttttttttgagacagagtctcgctctgttgcccaggctagaatgcagtggcgcgatctcggcttactgcaacttccacctcctgggttcaagcgattcttctgcctcagcctcccgagtagctgggactacaggtgcgcgccaccgtgcctgactaaatttttttgtgtttttagtagagacggggttttaccatattggccaggctggtctcgaactccagagctcatgatccacccgcctcagcctcccaaagtgctgggattgattacaggcatgagccatggtactggccgtaaaataatctttataagtcagttcctttatatgtgaatttccaagcaatagaaagaaaaccaataattgttaaaaggaaccatgcgtaattaacatgaacttaaatagaaatgctctttttgcttatttccctttaagtgtccagcttaaaacattcttttaatataaagcatatatttagtctaagtaaaaagcttctttgaatttttcttcaccaagtatgatatgaaaaggaagatgaccaaaaacttaaggtttttcatctatattagtattgtttttattaacccctttattaccttcactacttcaccttcagtttctttctcacttttgctttgttcagtgttttgtcatcattattgagtgtatagcagttacacccagctgctgtggaaattgaagaaaagtatttcttaaacccattaactagcttcaagattaatttgatactttgtcttctttaatttggcaacagtacagttaccatacgttacaactagatggtacttaaggatgaattttgttatttcctccccttgtttaagctatgctagttatggtggaagcttaacctttttggggggcaagtattaataaactgtggctacagagtatcttgccaaataatcatgtatgtgtcagttttatactacaaatgaatttgcatagaaaagttggcttgttcgtttcttatcattgctaagacagtcatggctattatgctcttattggtctacctaagggtaaatcacctgcagtagtaactgcttctcatgtgtatctttcgttatttttttaaaaattactgataaaaagttcatgtcacattaatttgtaaagcttattgctcattttttttatacccaaaagatgctatgtaccactcaagaagagtgggaacttttagttcctaaatgggctctacttttggaaacctaaagtactacctgaagtagcattatttatttgtttcccttagttttttgtctaggatgtgctgttttgggaaaaagtagtgaatgagtcaagacacctcagtcttactcttagttttacctctaactaactttgtagctatgaacttatcactgaattctctgggccttggttttctaatctgtgaaacaaaggagacaagatgattcaaaacatctcttctctctaaaatgctactctactgaatatcagtatggtgattgagttgggtttgagagaattgatgaacccttccgtaagctttagaaaaagaaatattcatggggccatccaatcaacttcattctattcttgacactgtactagatgctctgcaaaatagtcattgaacagagcattgtttttcttgcctaagagccaggcatgttgatatgacagagatacagtgtggtaatactctatagagtagtgagagcttcagtaatccataaaatcagttccatagatttagatcatttccctcttcatattcagtgtatattgcacagatctctcaacaacacagccattaaatagatattctccaagtgacacttacatcacacatgtttgagtttaygttacttgcaaacatagggaaagaaagatacatgggataaactggtgcatgagaaatgagatcttagcagttggttgaaataaatgagaacaactgaggcaaactaaagaggaagaagggcaagtggcagcttaacaggagtaagatgatgagatgaagggcagaataccttcatggagaggaggcaaagagatatacatgatatgttcttaggaacataactgaagcaaacaatgatattatttctaattatatataaacctgtgagtcagccttccaggggcggcctgctaaggtagaatcattggaatgatttggccagggtttggataggagagaattggcagcagcgttaagattgacccatgataaataatgctatgcaggtagcagggagtctgactaggagcaaaatcaacgaacttatcccttgcctaacatagtatctgtggagtcagaaagaagaggttaaattgggatatctgaggcaagtatcaggatttgccatgtctgcggagtagtttcataattctaatggttataagcactaaggcgttcactaagtgaatgttggtagttccaggttatattatccattcttgagttacaaaatacactttaaaaccttcccatcttaatattatatgtttttttagtcacagagtgaaaaggtgagattacattggcctacatccttgccctctggagatgccttttcttctgtggggacacatagatttgtccaaaaggtaagctaatgtcagagtttactaaaagtacaccttgtattgttcttcattgttggtggaaatatcttttatttgagacggagtctcactctgtcaccagagtggagtgcagtggcgcgatctcggctcactacagtctccacctcccgggttcaagagattctcgtgcctcagcctccctggtagctgggattacaggcatgtaccaccacacccagctaatttttgtatttttaatggagacagtttcaccatggccaggatggtcttgatctcctgaccttgtgatccacccacctcagcctcccagagtgctgggattacaggcgtgagccaccatgcccagccggaaatatcttgtagtatataagttttctccccttttcattaatttaagtaatgagactgtttttggttttatatattgtattccatatacatcctccaaaacagttagaaattttgttctgaaaataaagttctttcatttttatttaaggggaaagttgggggtgggcaaataaggagtggctagtccaaaatagttaaccagaagtatatccagttatactaaatctctctcttctttggggttaaatggtattactttgtattattggaagcactacattcttttttggaatgattttggaacataatacataataggtgcatgaagtcagcagttgctgctgtgcttgtttcatatagtgctttgttttctcttccctttatcttgtgtttggaagttggtactgaatgctctgttgtgcytttgttctgattacttggttttttctttgtctgtctctggtagccctatagtcgctcttcctccatgtcttccattgatctagtcagtgcctctgatgatgttcacagattcagctcccaggtactgtatgaatgtatagagtggacttgagtctttctgtrctatatttcagcctgctttcccagttcctagaaatcttttggttaggccactgattttagttttgaattttaaatagtaacattaagcattaaaaaggtcttccttgtctactaaatagttcctctgtcaggtttgcatgtgtcctttactattcacagcttggaattttgtcatataggaggtactccagaaagattttcaaactgaattgaaacaaatagaagatactgggttttgtatatcatgtaatatctgtttcttcagtcaggatttagcagttttgatggacgtggtcyatatgatatgttatagcagaaaagcagattttaacagtctcactttwaagctaaagtatctccaaattatattcaacaaggaaatcactttttaataatatgtttcatttccattataatactaagctctattgagcagattgtgttttccttatgcaaattacctttggatattataaatgaatatttctgttcatatgctaaatctatggaaatttgttttaatttttagcattggtaagggtttaggaatttaagacaggaagctggatgcttgcggtctctaaagtctgtaccctcaaaataaaatcagattaccattggaagaagttttttttagtgtcagcgttagttctttttttaattttcttaatcttcacatctttgccattcaactttttatctttctggtgattgcattttattggactagattatattatgttaatcttatattaaagacctgagcactctggtcagaatgactcagtttaaaccctggttaggtgtatgatcccagtaagttttctaacttttttgtgcttcatttttatgatttagctagaacctgacacataataagtgctcaataaatgttaccttgtattgctattataacataatttctttgagctaataaaagttatctacatcattattttttcctctgtgagagtattgctataaaagtttttaaaagtcatagtttaaagagatttctattatttttatgtttataaataaagtttacattagtttttaacctgcaatagagaagaatattaagactttaatttttctgacttgtacagcgtttttctccttgaatactcttaagaaaaagatttagcaattctggatcagaaatcatccataaccaaatataccacagtatattttaccttttgcttgtccatttatgcatttttttttaattttacttatttattttcgagacagggtcttgctctgttgcccaggctggagtgcagtggcacgatctgggctcactgcaacctccatctcccaggttcaagcaattctcctgcctcagcctcccaagtagctgggattacaggcacgcaccactatgcccagctaatttttgtattcttagtaaagacgggttttcaccatgttggccaggctggtctagcactcctgacctcgtgatctgcccacctcggcctcccaaagtgctgggattacaggtgtgagccaccatgcccggccctgcgtatgtttttaaaaagagactcatattcataatgaatctgtgacaaaactacataatactgggagactttggtttattgtgctaagctccacattgcattaaaatcatatcacagactaatcaaaaatgcaggaatacataggctataaatgaaagaaaatataatgacagcaaagaaagaatgtaagccagtaataaagaatgcctaagaattaggggttcagaacccaaaccagggccctcactgtagtgctgtagaacagctgaattgcttttaagtccaggtaactatatcactgagaagcaggtgcctatatttttacaaaattttgctgacagcttacttcttcgtaatattaatamccttttgtaaaactcatgtatgtaacttgagagaaatcttgctggatttttttctctaatatatggtgctcatgattgatcagatcctgttttagcctttgattatgtactgttttatatgccagaagaggtaaaaatgaagaaaataacattaaggtcttcaagtatttgttgtccttgctaaagcattagttgtcattagcagacgtggactctagcaattcactgttgtaattaaattgtgtgccttatgttcagcagttcctttataatagatgactaattcccaattgataagattttttgtttcagaggatgttacactgccttatcagccattatcaaaggatctagcaagttgattctgtatagtcacacttgagaatatagcattggatgtagatctggagttaatattagttgagaaacattgtgttatctggaaaactcttccagttcaacacagtgtaaaattatagtagtgactatacagtagtgttacattttacagttctcacaccctatagagacttttgtattaagcaaaataagaggctcaaaggttattcattaacattagaaacacttatgttatattacattgcatcggtcttttctgttttttgttttttttttttttttgagacggagtttcgcttttgttgcccaggctggagtgcaatggtacgatcttggctcactgcaccctctgccccctggattcaagcgattctcttgcctcagccacctgagtagctgggattacaggcacctgccaccacacccagctaattttttttcatttttagtagagatggggtttcaccatgttggccaggctggtctcgaactcctgacctcaggtgatctgcccgcctcggcctcccaaagtgctgggattacaggcatgagccgccacacctggcctacatcgttcttaatacacaaatatacatcagttactccacagcgcttgatatgggaggtaaccaaattctttgttttataatatcttcataattaattaaaaaactaagtcgacatttttaatcacctttaataatttgccaaaatattatataagcataatataatcaattcttacttactccaacaaattttaaaagtccagatacagataccatatctagtttcttgatcatttatatcagctcccatacagaagccttctaaatctctggtaatttcactttgctgtttatataagtgttggctcatgactaccttgttcttcttgaaatgatgttttatagccttgaattggctgaaataatcaagtgtacaattgagagatgccctgaaaacagcttaaaataaaatatgtacatctactaggaaattagtaccaacacatgaatctgtctgatgggcagatattaggaatgaagtcactccagatctgagaaattaaagttgtaaaggactgcaagttctgtgtttttgttgttgttgttgttgttgttgttgtttgttttttcatttttgttttttgggtttttttgagacagagtctcattctgtcacccaggctgtagtgcagtggcacgatctcaactcactgcaacctccgtctcccaggttcaagygattctcctgtctcagctgggattacaggcacacgctatcacacccagctaatttttgtatttttagtagagacagggtttcaccatgttagccaggctggtctcgaactcctgacctcaagtgatctgcccgtctcggcctcccaaagtgctgggattacaggcctgagacaccatgcccagcattttttttttttttttttttttttgtaaagagacaaggtttcacttgtccaggccaagtgcagtggcatgatcatagctctgtaacctgacctctgacctctgacttcctggacacaagtgatcctcctgtctctcagcctcccaagtagctgggactacaggcattccaccacacccaactaattgtttttattttttgtagagacagggccttgctatgttgcccaggctggcaagttcttgaaataatggctgtggccacaaactagaaaataattttcaggtgtacagagaatagaaagaatttagattcataaattgatcattttgttcacagttatttgcataacacagttcacatttaaaggtgtcaccttagaaatcaaaggggaagaacatcatcctctattgaaaaagaaagaaatcaaaggatgtacagtgaatttgcagcttaatctatggggagcatcattgcaaaaaatggttctgtgtgaggctctttcccaccctttgtccataggagcacattattgttgtagtaattatttcacccctctccctttttcagtgtacaagtgatacatgctaattttaacagaacttgaaagtagaataaaattaaaataatagtttactaatattccatttatcttctctcatatatatgagataaatattaaggtgtatgtacttatccatatgtgcctgattttttaaaatccttgtatatgcatctttgcacccttatctaattatttccttagaatatattcctagaagcataattgtgggaacaaaggccatgaacattttcaagtgtttattttattattttattttatttttattaattttgatacagggttttgctttgttccccagactggagtgcagtggtgagatcaccactcactgcaccttgacctcctggactcaagcgatccacctgcctcagtctcctcagtagcgggggctaaggactacaggcacatgccatcatgcccagctaatttttttatttgtagcagagacgaggtctcactgtgttgcccaggctgctattttatttattttttaagagatagggtctcattctgtcwtccaggctagaatgcagtggcacaatcatagctcactgcaacctcaagcgatctttgcctcagcctgagtagctgggactacaggcatgggccaccactctcagctaatttttttttcaattttttattttttgtagatatgggggtctcactgtgttgcctaggctggtcttgaacccctagcctaaagtgatcttcccacctcagcctcccaaagtgctaggattacaggccacaggcctcagccaagttttaaaaatttttactgccaaastcttcattagaaaagttgaaccagcttacattcccaggccagttttctattgatatagtagcactgaatattataattcagttaacttttgtcaatacggtaggctaaaagtgctatgttcttagccatctctcttttgggttaacagtgcactattttgttattaataattattctatctaacaagccccctctatggttttgtggctttgtagtaagcatagttgtatttccttttttgaggtggagtcttgctatgttgcccaggctggagtgcagtggcgcgatctcggctcactgcaccctccgcctcccgggttcaagtgattctcctgcctcagactcctgagtatctgggactacaggcatgcaccaccacgcccagctaattttttatatttttagtagagaggggagttcaccgtgttagccgggatggtctctatctcttgacctcgtggtccgcgtgcctcagcctcccaaaatgctgtgattacaggcatgagccaccctgcctggccaacatttcttttacatgcataaaagagatctgagctgtttttgagcccttctagactttcttttttttttttttttttttttttttttttttttttttttttaagtagatgaggtcttgctatgttgccgagacttaacctcaaactcctaggcccaagcaatcctcccaagctgctgggactacaggcatgaaccaccatgcccaacttagacttttattgtactatcaaaaggcaattttcttttcaaatttctgggtaatagtgttagaaaaatcctrcttggtaacatccagaaatggcatcatactgagtgattcaaatgtgagatggaagaaaaggttagaattggagtgaacgtcccctcttatctcaaatgtattttatctccattttgtttcatagtttattagtttgaagatgctttgaatgtcacctaatcattttcaactctaggtccagaaaaatcaagggcatgatttctgaaattacacttagcctaattaaaacttagaaacactgttcaccttcttcaatgtttttgactgagtctttttcatttataagtgacaggaggtgttactataacattatttcctagaatgtcaaattttgagcctaatagcatggtaaatttggctatatttgttgttttttgtttttgttttttttttaatgaaacttagtatttccttgtttcccacttcttttttttttttttttttttttttttttgagacggagtctctctctgtcatccaggctggagtgcaatggcgtgatcttggctcactgccacctccgcctcgcaggttcacgctattctcctttcacagcctcctgagtagctgggactacaggcacccaccaccacgcccggccaatttttttgtatttttagtagagacggggttttaccatgttaggcaggatggtctcgaactcctgaccttgtgatctgcccgcctcagcctcccaaagtgctgggattacaggcgtgagccaccgcacctggcctcccacttctttttaatatgtcgtgtcataactgaacagtaaagtgagcagattatcaggttaaatctgaagtgtcagtctggtcaccagtgcccaagttactgcccctatggtaatattggttactttgtattttcctacagcaaacataaaatttgttatagtgagatttttacctgtatacctctcttaactttaatgttattacctcaaggaagatattatcatgaatgaagattccatgatgaaagttttgcagagtttattgcagtaatttagtacttcattagaatctttagttttttaggagcacagtactgaatgtttgtttctttgttggaccttttgaaaaccggttttccattgatgcagtgtagctgttacaggaataycatttttaaaacgtttttatacagcatggctgaaaattgaacctgggcctccctcgtggcctaccattgaaggaacagcattttttgcctatctagaaagacaatgttaaatgtgctatctatatattttttaacttgtgctacctactacgcgtttatatttgtggaatctgttttcttttggacaaaaccacaaatcaaaaacacctcatttcttaggcatttgaaatccctaattcagaataatctcccaaacagaaacacaactacctgcattctttttgacaaaagagctaagtagcattagaaaattattttaaacccaattctgttttttaacagaataaaattcttctgttcttcacattcttctttcataggtaacctattgaaagtagggtttatttgggggaagcatttctttctgtctcttatctcataataaatacaggtgtgcttaactactagtttcctacctcaaagatatactcaaatctaaagatgtttaagattttgggatctgaagagtaarcatttctcctaatcacaatgtgacagagacaaatgaatcaagccaatgctacttttatttatgcatactaactggaacttttctttttggaaatcagatacattttgtatgtattagtaatttggaatcctgcattggttatcctcgccctcccaaagcagattctgaaattataaaggtgcacaggttctccatgcaacaccaaaagttatattttccaaggctttgtaaaattgtagaatgtcctgttaaatttctgtcaaatcagtaactcacactgttttgagaattatgaataaaggaataaaatattgttagtgtttatttagtacaaaagtagattatagaatctcagcatttttgtcaaaaaatttctttttgatgattgacagatcaggagacacttaaggccatacctgctttcagtaatcaaaaatgcatttaagatccagaaacttgaggtagcagaacatcactatcacatataacatatcctttggtatagaaaattatattcccagagtgagtttcttttttaaaaccattaatgaggccaaggtgggaagatcacttgggaccaggagttcaagaccagcctgggccagatggcgagaccctgtctctacaaaaaattaactggatgtggtggtgcactcctgtagtcccacctactcagaggctgaggcaggaggatcccttgagcccaggaaattgtagtggcagtgagctatgatcatactactgtactgcagtctgggccacgaagtgagaccgtgtctcttaaaaaaaaaaaaatgttaggcatggtggcacaggcatatagttttagctacttaggaggctgaggcaggaggatcacttgagcccagaagttcaagattacagtgagttatgattgtgccgctgcactccaacctgggtgacaaaataaccctgtctctggcgggtaggggggaagttgattatttactttgaaatatgttcaaaactgattcctgttctatattcctaatgaacagaatagactttatataaaacaaatagttaaacttaaggataaaattttaatggaagtataatatatatatcttccagctcttctgtcttctaatgtatttattacagaaaatgaaattactttgtttccgcaatctttgtatcacttcagttctccaataaatctgagaattctggtagtgtgaaatattcagctttctttgcttatttacataaaatgtataaggacaatttgtgataattaagagttacatttaaatatcaggaaaaagttataaatttaaattaaaaaattttaaaaggaaattattagaaattttaaaagaatgaactaaaaggtgattatatgtaaatgcttgcatatatgaatattagcattgtccccaaaataatttagaacaaagaaattggaatcaaataaataaaggtttgattatttttaaattggcttatattccatgataaaagagaggtttatcagtggcataagaaaggtttttcaccttttttgtattgaaatctttgacatatacatatatatctttgctcatctttgtgtatctttgctcgtatgagagcaaagatataggcaaagatatgctctctctctctatgtctttgttcataccagaccttcctgatatctccacataatcttaaatataggaacattagactggatgatctctgtgccccctttatctctactcttccattattttatactttaacacatcatctctgttttatgatatagaatggaatatttcttttttcctgaaaatgcttattttggtcacttgatacacattaggccaatatgtgttacttgagtgacccatcttccttcttttcatttctgtctcctgtcattaacctggatatctggaatgtggactaaactcttcaaacactatgtaaaacctactaacctttgtgcatttggttgctcagctactaagagcaccatttctgaactgaagttaactgaagaccattctgttttagakattatgacataccttttggattctcatgcctttttcctcccytctcaaggttgaagagatggtgcagaaccacatgacttactcattacaggatgtaggcggagatgccaattggcagttggttgtagaagaaggagaaatgaaggtaattccccctgaaatgttatagattgccaaaggcgtctctgtttcagtcatattatcattactattgatatgaataaggatagcactttcaacttacctttaaaacaaattattacatgtgatcaaagcagtaccatatattgagcaataaaatgtctttttgcttttctggctttgcctttactaaaggtttttatgattataatataaatatatgattaaacctttctgttttgactaggccatgaagaaaataaaatttagagaattagatatgaccaggtcacaattagctgatggtcctgtatttggatatttccttttgttttgtttttttaacatactgaatgttgtgcctagatgacactttgtttctctccctttttggtctataccctccttcttttcccttctcttactgcacctttawttgatatttggacattggtcagttaatcytgkttacatccctaaacacawggacagaaaataagagcagggactgagagatacagagatggattgaaaagcaaaagcaacattgaattttggattttctcattcctaaggaactatgctaaataaagatacaaagataataagacactctccaagctaaagctttagttaaggaaaaagaatattgacatttaaaagatactattggccaggcacagtggctatgcctgtaatcccagcacttttaggaggacatggcaggcggattacttgagctcaggagttcaagtcaaacctgggcaacacggtgaaaccccgtctctaccaaaaatacaaaaattagctgggtgcagtaccacacacttgtagtcccagctacccaggaggctgaggcaaaagattccttgagccagggaggtcaaggctgcaatgagccgcgtttgtgccactgcactctagcctgggtcacaaagtgagaccctgtgtgagatatatatatatatatatatatatatatatatatatatatatatgcatgcatgctatacttggctccatctgataatgtactgagtgaagagtacagatgagtggtggagaaaatcagaaaagaaagatctctgtgatttgaaacaattagattgttttacaatgcagagaagcatttgaactacatctggaattaaaaagaaagttgtgacaagggtgaggtgagggcattttaggaaaaaaattataatgtgagcaaaaacttgaaagcaaactttttagtcaggattttttgcataatctatgttgaccagaattattctagcaaataagatataatattagatgctgggatttcctctccccttgaataaggaacaaagtaagacataagataaaacagacagataaatgagataccagaatgttagctataattctgataaggtgattgtagaaaatagtttgagatcagctgctacagggtcttgttactccagaattaagcatgttcctggcattgctggataatcacaaaccttcactacagaagcaggccaggatgtatgctcttcgcggaagaaagggttgagccagacctgccttatttcttcttctgtagtcatcgttcagtcaccgtagagtcacctccctctggggaggaggaagtgaagtactaaagagaagccaggagtgatggtctggatgacgtccctctacctggaatgaggaatagaaaataactactcctacagcccacagtgttagagagaaattgggcctagataatgggaagcataaagttactctctaaagagaacaatcgttgtctataacaattgtctacaacagtagactagccactgtatgaaaagtatctttttttttttttcttttttttgagacagagttttgctcttgtcacccaggctggagtgcaatggcatgatcttggcttatcgcagcctccgcctcctgggttcaagtgattctcctgcctcagcctcccaggtagctgggattacaggcacccgccactacgctgggttaatttttgtatttttagtagaaatggggtttcaccttgttggctaggctggtcttgaactcctgacctcaggtgatccgcccgcctcggcctcccaaagtgctgggataacaggtgtgagccactgcgcctggcctgaaaagtgtaattttaagaagatcaagctgatagggaagaaactggagaacaagcagactacttaaaagagtcaggcacaaagtgatgaaagcctacctagaacagtagaaaagtcaaactgttggatgtcttagcgaagacattttagacaaaaaataataatgtgagctagaggcctccctgctctgcacctttggcaccacatctaggaactgccagtgccatggtgtcaatagattcctgcctcacccctaatcatctcttctatgctttattaagaacagtttttgactggtggcagtggctcatacctgtaatcccagcactttgggaggccaaggcgggcagatcatctgaggtcagaagtttgagaccagcytggycaacatggtgaaaccctgtctctactaaaaataccaaaaattagctgggcgtagtggcaggcgcctgtaatcccagctactcaggaagccgagacaggagaatcgcttgaacctgggaggcggaggttgcagtgagccgagacggcgccattgcactccagcctgggcaacaatagcgaaactctgtctcaaaaaacaaaaaagaatagtaaagagcttactagctgtgtgaactgtaaagggaggaatcaaaagtctagagtttctagtttgggtagctgggaaaacggtggtcccaataatatgagtaataaataggtaggggaaggtagtctgttgagagatactctaagaaaatctatgtgaaatgcctaacagtgtccagccccataggtccttcataaattggcacttggttctcccccatgatgacatgtttcatttctcaagagtatttatcacataattatctaaagtagcaaactctataattttaaaataattaattttacttagcatttaaggtatgtaacctcagtatttaaagcaagatagatctgtatttacgtttttgccatcttagctttcagccattgatttaacaaataactgagtgcctattgtgtttcatatactattctagctgttggggatacagcattgaacaaagcagacttaatttagtatctttaaggagaatatattctagccaggtttatttggttttcttagccatgttaaacagtcttttgagaatggtaaataatgcctaattcaaattgatacatttatttttaaacaactcacaataagtcatttatcacatatgcatgtttttatctgaggtttaccttggatttataattttaagtacttttttgtctgttaatttgaaatttttaattttcttttagcagaatatgttctataaatagactttcataaaaatctaaagagcagctgtattaaaagcatgctttcctgcttttatgggcttgatttttaattttcaaacagttttggaattatgttctctttaggtatacagaagagaagtagaagaaaatgggattgttctggatcctttaaaagctacccatgcagttaaaggcgtcacaggacatgargtctgcaattatttctggaatgttgacgttcgcaatgactgggaaagtaagctgtcattattaatatattttaatctattattttgaatttaatatcaaatccaacctagttttctgcatctcctacatagtttacaaagtcaacgtagaaagtatttggaaaatcatatagaggactagcaatacatttatgtagagcttttcagtgtatgaaatgcttcctagtatgtaatttgatccaataacctcagtaatcctacagtgataggtagktattattgcttattttacatacaaataaagtaaaattcagataggcaaagtgacttgtcaaaggcaacaagagctatatggtggagaagccaagactgaaattgaagatttctgtttcatcatctactctttcctaaactgtttccgtggtaaatcctaggtgaatccttttgtgattactttagaattattttatttttttagacagagtttcgctcttgtcacacaggctggagtgcagtggtatgatctcagctcgctgcaacctttacctccccagttcaagtgattcttctgcctcagcctcccaagtaactgggattacaggcgcacaccatcacgcccagctaatttttgtatttttagtagagacggggttttgccgtgttggtcaggctggtctcgaactcctgacctcaggtgttccacctgccttggcctcccaaagtgctgggattacagatgtgagccactgcacccagcctagagttattcttagtgtgtattccccttagacacaaaatttcctaagtatagatacttctcaacatcatcagatgtttatcattggcagtttgacatctctttttcwcagaaatagccacctaagattagatataacaatttatttaacatcaataaattggggaaaagggaagggttttagtgttagggaattatttgtgcctgagtgatgcagtggtgattagaattgctttcttgctgtggaagatagataattgggccaaagaaaatgaggcttcctggtgatcagacctcacatccctaatctgtaaccataatactaagtattagctaccttccatttggatgtaacctaratagggcaggatcctgttcaatttaccatactgtccattcgtacttgactttcaacataagtgaattgatcacattctaggaaaagataatatatctttttattattctcttcatttcagcaactatagaaaactttcatgtggtggaaacattagctgataatgcaatcatcatttatcaaacacacaaggtaaagatctcttcattcatcctaaaaggatttcaatgtagttcaaactcagacatatagattctctaaagtaaaattggggaggttattaaaagccacaaaaatccaaagactttattaaataatgattcatgaatgtcatgtatttaaaaggtatatcaacttgttcagaacagaaatatgtgcaggcaagaatctgagagatacaatctagaaatagagtgcttgataaagatcaacggttagttccctttgtgcactttttatttttaaagagacagggtcttgctgtatttcccaggctagtctcaaactcctgagctcaagtgatcctcctgcctcagcctctcaagtaattggaactactggtgtatgccacactcttagctttctttatacacagtttaagtctaraaaagagccttctgaaatactgaaatccatttaaatacctttctagtatctagtttctataagaggtaaatgatagttaccaaatatgaaagtgaattatagcttcctgtgacaacaacaataagggtaatggctagcatggtattagcctatgttaagactaatagatataaaagtaaatggattatctgaaagcaaagaaaaatcacagagcgtgacttgagaggttagtcatacaccagagcatacagaaacataatttaagttagctccctttcaccttatttcttctgctattcttgatatttaaaattatagaatcaatagttctcttgccttattctgctctttctcttctgaaaactgcccaataacataatgtgtatagcataataaaaggaattaaaattttggagagatccaccaaaaacagtattaaacattataaaagaaatgtaatgatttaataggtactttgtttttccaattcagtgagtgcttcatttttctttttaaatggtttttgagtgcagtatatgaaaacattataagtctgttatgtatttcttaaactcagtcttgtcatctgagacatcttatatctaataattaggagccatacttaattttacacggtagctgctcagaaatgcataacaattaagattctgtttcagcatacaaattttgaagtctaatttgaaatctaaaatttagtaaatgtcagaatattaattaatcaccctataatttggaatgaagataaatgaccaataatttagaaccaaaagaaccttattatctgaaaataatccatcatggaaaacaatctgctgaaggtattctgctagataaatagtagatggagggagggtcatataagttgtatcaggattgaaaaataaaactaaaaattattaaaataatcttatatgtaacaaaatttgttacagttataattatttgccaattcttggaataaacaaattgtcctggaatcattttttcaagaaaatcacattacattcgcagtgtatgtaactataccactcacactatatctgaaatttatcatcaccccaaacagaaactccgtactcattaagcaacaactcyccattccctctcctcccattccataataatgttctgcttagactcaaagtctatagtgttatttacactacaatatttttccctttaaatttgacatcttttgcagtatggtcttaaaagagggctactggtctcttgatatttaagtcattctcattctttaaatttctatcttatcatcctgtggatttgtattcattaggtctaaatttgccaaatcttcatgtattacttactgtctccacacaatttacccaacactatatttatcaactacatgaaattttgtatctttaaaaaatgaatcatttcatcttgcaaatgatttgtattgtatgctatttattactctcagtaatcaggaatgacgctgcataacaaggactagtccagatacatatacgagataaccaaaataaaagtaacttaaataggataaaaggttttttttctcatttaaagtaggtagtcccatttattgaagacctaggctccatgtcattcccatagtatatgtttccccttgcataccttaatattgaaatatttaatctaagtgacttagaattctttctaatgtgatttgattcaaataagtcttttttcattaaatctttgaatctaagtagaacataatcatggagtatgaggagagaggaatggaaagttgttgcttactgggtacagagtttctgtttgggatgatgataaatttcagagatagcaatatggttacataacactgtgaatgtaattaatgtccctgaattgtaccctaaaagttagttaaaatgacaaattatacgtgtatatattttactgcaattaaaaaaatagaacattattccttttattatattgttctgcaaagctattaactctgttcataattaatcatttggtagatatcctcagatgctttccatttaaaatttgagagattttaccttcaattaagacatttattggcattacgtttctcttgttagttccatgttagatctgtttttcaaaagatttttacttctccacagagggtgtggcctgcttctcagcgagacgtattatatctttctgtcattcgaaagataccagccttgactgaaaatgaccctgaaacttggatagtttgtaatttttctgtggatcatgacagtgctcctgtaagtacatgtatataaatgtgtataattaaacaatataaagctaaatacacaatgcgggacaaaaatgataaacacagcccatacactatacttgatttgataatggttcttagattttatgttggattgactgctaggaacagtatagcccatgtgttgtctgagggcaacagtcatgcctatgaacattccaccagggccgtttacctttccttctaatgtttcgtgaaacagccaaaagggcagtacatacactgggcagtaggctacttcccacagttatctcttaagccgttatcaactgccagccaaacctctgtggtttaccacaatttagctccatttactacttaagaggaagggatcctgggcaacatggttagaccccatctctattaaaaaaaattttttttttttttttaattagccaggcctggtgatgtgcacctgtggtcccagctactctggaggttgaggcgggaggattgctttgagcccaggagtttgaagctgcagtgaactatgatggcaccactgcactccagagtgggcaacagagcaagaccttgtccccagaaaaagtgggtggggaggaatcctggtgtcatatcagcttggtgcttataagatttcactggagatacttttaagagttacgattttggttaacctaatataatattagaccagcagagtttacaaaatacygggtatctactgatgctttgttttttgttttggcagctaaacaaccgatgtgtccgtgccaaaataaatgttgctatgatttgtcaaaccttggtaagcccaccagagggaaaccaggaaattagyagggacaacattctatgcaagattacatatgtagctaatggtatgtattttattgtttttgctctttgataatgtggctgttcttgatcatgacctatatgacaacaatttggacaaatgcctttttagttcttatccattagattactaatttttaatttggagaaaggtatatcagaattactagagaatctttgaaagtacagatgtctgaatttcaccctggaactactactatatgagtatttctgaagctagagctggataggaaaattttaaaactttatccctaggtcactgtatatacccttcttttttttttttttttttttttgagatggagtctcgttctgttgcccaggctggagtgcagtggtgcagtctcagctcactgcagcctccgcctcctgggttcaagcgattctctgcctctgtagctgggattacaggtgcccacaaccacgcctggctagttttttgtatttttagtagagacggggtttcaccatcttggccaggctggtcttgaactcctgacctcgtgatccacccacctcggcctcccaaagtgctgggattacaggcgtgagccactgcgctcgacctagccttcatattaagcaccattttcttagatatttgcctcatagaacagatttattattaggaatataagcaacagtggggaaggaaattaagagttcttttactcattgtcagcctttttagctttctgaatcaatgttcccctagtccttattagttgctagttacatatttatttctctttgacattcattgtcaggctttttgttttctgagtcagcgtttccctagtccttattagttgctagttacatatatttgtttcactttggataggtcttttcattgcttgctttgggtccttacttcacctgctttgcacctggagtaatcattgcaacctctctcatcaaaagtcataccttctttatacagggccataactgctagtatgttcaaagaaacagttgtacctgagtaagttactatttcattatagtacagatttgtgaataatctgccctaaataaccttaagtggtgctatactaatttttgcaggtaatttcgggaactaagaacattgtagaaaggttatagatgctttcttatttgctgtctgattatgtctgatggatagtgttaaggaatgaagggttgggacttaaaagatcataattggtccagctgggtacagtgactcagcctgtaatcccagcaccttgggaggctgaggcgggcggatcatgaggtcaagagttcgagaccatcctagccaacatggtgaaaacccatctctactaaaaatacaaaattagctgggcatggtggcgtgcacctgtaatcccagctactccggaggctgaggcaggagaatcacttgaaccccggaggcggaagttgcagtgagccaagatcgcgccactgcactgcaccctggcaacagagcaagactccgtctcaaaaagaaaaaaaaaagatgctaattggtccaatgtgaggaatattttaaaaacaagggaacaaattaagtgcttcacatatgtttggagaattgtatcttaatacattttaattttcctttatcttgcagtgaaccctggaggatgggcaccagcctcagtgttaagggcagtggcaaagcgagagtatcctaaatttctaaaacgttttacttcttacgtccaagaaaaaactgcaggaaagcctattttgttctagtattaacaggtactagaagatatgttttatctttttttaactttatttgactaatatgactgtcaatactaaaatttagttgttgaaagtatttrctatgttttttgatgttcccctatagagtattgtttcgttggtttttgttgttgtcgttgttgttgttttaaacagggtcttgctctgtttcctaagctgaagtgcaatgacaccatcacggctcactgcaacctcaacctctggcctcaarcaatcctctcatctcagccttcccagtagctgggagtccccacaggcatgtgccaccatgctcagctaattttttattttttgtagagataggggtcttgctatgttacccaagctggtcttgaactcctggcctcagacaatcctcctgcctcagcctcccaaagtgctgggattacagacatgagccaccgtgcctggccttgaaaattgtagtttatagcctttaaaacttaattcttttattgtttcctttttcttctaatgcttatgtaaagaaattttgatattatagaactgtagaattgtagaagtgcaaacttcctgtattctttcctttcccagaaactgttatttttgttgtatattcctccagatttttctgtgtatgtactgacatatttttgaatgttaaaatgtttatacttactattatacaaaattcttgttttataacctttttttcacttaacaatgtatcttgactatctttctttataagacatgagatgtgtaaaacatctcattcttttaacatctgttacatgcatgttgcagaatttattaactagtcccatgttaatgtctgagttggttccatatttttactgtcaaccagtacagcactgaacacctttatgcaaagaggtagaatctttaactttattttggtgttgttgagacaaagtttctctcttgctgcccaggctggagtgcagtggtgcaatcttggctcactgcaacctctgcctcccaggttcaagcgattctcctgcctcagcctcccgagtagctgggattacaggcgtccatcaccacgcccagcctatttttgtatttttagtagaggcagggtttcaccatgttggccaggctggtctcgaactccttacctcaggtgacctgctctcctgggcctcccaaaatgctgggtttacaggcgtgagccactgcactcagcccaaaatctttaactttttaaagtaagtgatacgttaacatgattaraagccaaaagtggccaggtgcagtgggtcacacctgtaatcccaacactttttgggagactgaggtgggagaatggcttgaggccaggagttcaagtctagcctggataacatagcaagattccatcttgacaaaaaacaattaggcgtggtggtatacatgtatagtcctaggtacttgggaggctgaagcaggaagatcgctttgtctgggagtttgaggctgcagtgagctgtgattacacgactgcactccagcctggacaggtaatgtctgtcaaaaaataaataaataaagtcaaaagtatgaaaaagttatacagtaaaatttaccctgtcttgcattcaccatatagtattaacatatgctattactagtttcttctagaaagtttttaatgcttgaatgaacaaatacaagtgtattttctacacagatacactttttttgttgttaaagaagcagcagcatactataaacactgttcaacatcttatatttgcatttattttatcttgaaggtctcacatatttgtaaggagcttcctcattttgatggttatacagtatcccattgtatagatgtacataatttatttaatcagttctgcattggcgaatattacagtttccaatttctgccagagcagtgtcataattgtatccatatgtcattttgtacttgcaagtttatatgtgggaaaattaatagatgtggtactactggccctgctaggggtttgtgcatartttagatactacttttcatagaggttatagtaattgaccatctcaacagcaataatgaattggagtccctgtgtcccacagtttttcatacaacgtgtaaaacaaaactttataactttcccaactcattaggtgaaaaatactctctcagtgtagttttaattgtattcctcttcttatgactgagtttaagcctgctttagtccattgagaatcttttgtatagtactatttctataaattctattttgtaataacatttaaaatattagtagatattgccaattgtgatacacaaatggtaagcaataacatgaatattctctcattctcacctacactggatgttaaataattgactgagaaatgtatattcttgagtccttttctttagctaaaaataatagtcaattatataatgaaataattttaaacaagtctgatttctaatgatgtttatagtatgtctttcttttaaaaaatgcaaaagctaaatttattgtccgatactaactaatatcccatactaacataagggatattgcattgatgtctcagttgtttagctttatcccaggaaaaagggtatttgaaaatattaaataggttccagtcttagttacctgaatgattggtgttttggaatatagccttaccctttagggattctctcttcaagcacaagtgcactgcattcagtgtgctgacaatttttatatcttgtactttagaattgttatagctagatctggacacattacttcttatcgattctgagtctgtgccatatttatcaaataaaccagaaaactgatggcacgtgacagcaacaggcttatcaccctgcttcgctgtgtgtctctttgccatggcctctagggtttttaaagtggtgctgtttcactctatccaagaccagattttgtttcactctaactatatctgccttctctcttcttcactatgacctcactgaaacggcctccctcttgatgctttatgatgacttccttaccaaaggttctcagatattcaaccaagcaaggcagaaatacaactttgtattaaagcaagagaaatctgaatgcagttgtgtgtaaaacatgctctcaattatatttgagaagaataattttttaaacagttgaaagataaatggtaggatattagcagcatttgcttctagacttggatttagagcggtgtttcattgactctctgtgtgtgtgcatgtgtatgttcacagatttttcatttgtggacctgggagggaggagcttggaatctgaaaaaattcatctctggggaagagaggtctattgtttgtgggtacatgtatatgtgtgcaaagatacagctgaaaagattcattggcccaaactcagatttggctttttgagtccagattgagcttctttctaacaaagatccaaattcaaaccttaacatggtaaaatctttgttactgtaacgtaactttttttttttttttacaataattatggaagataaatgtatgaagtcgaacccagcattgaaaccctaggaaagcgaacattcttaattttggtgatggaaaaaaatagtaacattcaataatgtgtgtatcatctttagagaaagttctgtaaagagttaataagatccaaagttgtttaacagtaaaaactttatatatatattatatataatatatatttttatttattttatttatttatttatttatttatttatttatttatttatttatttattttgagacagcatctcactcctgtcgcccaggttggagtacactggagcgatctcagctcactgcagcctcaacttctcaagctcaggtgttcctcctacctccctgggtagctgggactataggcacacaccaccatgcccggctaattttttatacttttagtagagttggggtttcaccatgtttcccaagctggtctcaaactcctgagttcaagcaatccgcctgcctcaacctcccaaagtgctgggattacaggtgcgagccacctagccccgccagtaaaaacttttaaactcatttgacaaagaggtctgagcatgtttgttgattaaataaggcaggcctctctctcatagcttgaatacattttttaaattcttggtaagtagtattgtatgtcataatttttattgcaggctaagaggaaagaaatgccatgttgtggagtaaaaatccagagacctttcactgattacctctgctcacctatattgccctttttttttcaggtgcctgtgccccctttattttacacaactatgcaaattgtgaggccaaggatgtgactgcaaacaattaagatttgatttacatgaataagctttcttctccatgaaaatacactgtgtcacttcacacttggtctaacacacacacaaaattctcaccctaggtggcacagatacactcagcatgcaatattaagtacaatttccattttatttttctccagagaatagtccatcttcagtctttaaggactcagctccttacatgggctttggtgggggtcatggggcagcacccgcaggtctaaattggggtggaggtgttcgatccttctccttcatgagatcgattcctgactactttgttgtgagttgcacaactcacacagtaatatagcttcacataacagcttgggaagcacatagacatcaaagacactcrcttcggaaatgtccctgactgctgcgaccttcactgtgtttcaaatgacgaatttcttaatggccttgtccttgggcacgcatcaggcacggttcgtgcagcaaacaggctgcacgtggctgtggccctttttggcacaaccattgttccttcttttctttgtcatcttggaggcctggactgtagagaggactgttcccgtttttttttctaacttttgaaaaattccatatacctttgattccttgctgatggaataagttcaaatttgtaaggttaataattttgcattcataatgataaattttaatagagattccatgcattccatgaatatggagggtgggagaactctgttctggtagtcttgcagctgttcgtagcaaacatactgctgagttttttacttgtcttttttttttttttttttccttcagtgactgaagcaaggctgtgtgacattccatgttggagaaaaaaagaaaaaaaaaagctgaatgctctaagctggaacgtaggatctatagccttgtctgtggcccaagaccttggccttgtgtacaaaaatgacaaaatattgcaatagcaaagctgaacatctaacactagctatctcttgctagatctccttgctcagcatataactataaatacatgtaaaattacatgtatatggctatatttttatttgcttgctcctagaagagaaaaaaaaatcaactttgaatcacaactaggaattgatgctttaatttttggatactttttcagaatttttaatttactatggtccggcctaagatcctctgttgtatcaggttttgtgcacaaaagaaaagcacaaaagttgaatgcacatggggcatgtgctttctgtgcaccaaatatctggatgaggttcttttttcaggcctacagtcaaatctgtgtccagaattttttgacttttttgctttgtataatcatagaattcattgctgctgatttctataatgattcatgttgtcatgtgtctcttaataactgagggctgtcagtaacctgtgattttgccttttctatagtcttactcccatgaagaaccttggttctgatggagaaagtgaaaagctttatttcttcccctagatatctttatatttctattatattttttagttgtgtactgtgtactagagatttttttcagtttgttatgaacacaatttggtaagccctaaattggttctgcctgtctccaaacagaaacatctgtacaaatcttgttggtatagactactttctggaaaatggtcaagataagttcatgttttcttgaaatttctaagatagtatatggtatcacttgtttaaagcaaatcagactgagtttgacatttaattcaatatttctggtattcagtaacgggtatatatgtttgttcttccagtttgggtcagtttaaaagatatgttgcaaagtatacatagaaaatgtgagcaatgcctctctttgccttttgatcagaaacttcagcagagcggtaaggattccacatgatttaaactgaaatgcttttctttgttgctgtaagaacttaaaatgtaaaatacctttttcagtttaagtcctgtaaacaacattgaagcatggagatgaggcaaggaatagtactcactgaagttgaaatgactgcccacttcaaaatcttcattgtgtttacacaccagtgtatttatacaaatcagaggcattttgtagatgctttgctgacttgttcagctctgtaaaaacacagaaatcagacccattttgtaaagcggaaaatcatgttacatggaacatgtcctgtatatatcacatacatggtaatggagtcttaatgataagtgcaagataataatttaatgatgggattagtctgatcgcttaatatgcacaatcctggaagtgaattacttgcatcagatatagtgatatttattattctgtacagagagaaaaatacatataaaacatatgcttacattacatgcacgcggatttcatgctccataatcttttctattttttaatttacctttctgtaaatgatgtgcatggaatatgccttatagaaaaatgctgttcataatttgactacgtggaaaagtgcctatatggtggtaatgctagtaaggcaaataagacaaattatcatgttggtttactacatcaccagttaacattttatattgtgatgtttaaaaaagaaaaatttatacctcaaatgtgtattttattttacaatcagctgtggggtatggggttgggatgggagaatgggggggttggggagggcaggtttattcaccatagccgctgataagaatcttcaaaaaaattctatatgcgcactataaatgtttctctgtttgccatttctggtaactatcatgaacacagacagttaactctttcataactgaattggatagctttattttacagaagtatggcaagtttacaaagcaatatctaaatctaattatcattagttgcatttggactaaatgtgatgatatacttttgcaattgattctgtaaataaaaggattacactaaaatatttgtattaaaagaagaaaagataacattttacctttagataactgcacttgtacctcactagagttaatcccacccaatcagattgagaaataaattggggaatgtggaaagagtccaaaagaggtcagaatttggagaggtactggccttctggacaacatttagaccctctacaattattttcattaagctgattcctacatcctgaatattcatgttttctcatctacagatatttgtcttcccccaaactaaaagaaaaaaaactaccctttactctcttttctactcagttactcttttgtgctatgttagaaacttgaaatatattggtgatgtggggattttgtccctgactgcccactgtacaggacaagagagtacagtgtttcagttggaattcaggactcctggttttgaggtagaggatgatcactgcagtacttggtttggaattgccacaggggtagctaaaccaaaggagggttatatctgcaagggaggtgtaagaaggcaaaataaggaaaaggaggaatgggttttctatttgttcagtttcatcaactaatttatacacttaatacaacttcagtgtcaattgctattaagaaatttttagttgggctgagctggttctcttgtgaaattgtgctggttatctttaagcttatcagttatttgtccaattaaacacttttcaccagtatttagtccgagttgtacagacgatgtatttggattttgtcatggttcatctacagactcaaaacataatcattttaaagtaccttgggagtgtgtagagtaacttctataatagctttatgatcctgatgatgttttttaaacacaataaagttggatcttccatgttacaatcacagaattaaaaccagtatttaaagtggaaaagtattaaaatattatggacaaawatgctggcttgatttgttttccttaaccctgagatattgccctactctgaatagttaagagcttgaaattcagtgttcttcccgtaacccagttagggatcaagaaaactactgagttgcagcctaaatttttttttttttttttttttttggagacagagtcttgctttgtcacccaggctggagtgcagtggtgggatcttggctcactgcaacctccacttcccaggttcaagtgattcttgtgcctcagcctcctgagtggctgggattacaggcatgaggcactatgcccggctaatttttgtatttttagtagagacagggtttcgccatgttggccaggttggtctcaaactcctgacctcagatgatccacccacctgggcctcccaaagtgctgggattacaggcctcagccatcgcgcccagctcagttttttttttaacaaaatataacaggaggaatatatcaagtacatgacatgtaataaatattttgtgtatcttttgtcatatgtattacacatacgtgtgtaatgggttacagtttacaatgaatttcttactgtggatcacatccagaagttttaaaagattggtagagaagccatattcacttgggtgtttctaaaatggaagcacagtgctggtgaatgatacacacttattttgtaattgagctgtatgcatttaatcataaataaataatctcatttatttaaatctcgtttaatctcagctccacttgttgcactcaggtaatttatgccctagaacaaccatgaaatgggaagtgtggacttccatttcactcagtcagtggattcatattgaaaggcactgagcatatttctctcctagtgttcaaagatacatgccatccaaacaatgtgatctgtaaacaaaagccaactacttaatctggtgggatgctggagggaaaatctgacttgtgttgaatttgatgacagagaaatattatgtggtcctcattcctagagggattttctagggcacttttaactgtgcagtttttctttagacttgactttggcatataacctgcaaataaggtgtagttctaactagcagtttcaaatgaggttgcttttataggatcttccagattttcttgccattattcgaacttggttacaacagagttcatactatcatttatattgtctaccttttaagacacattttctgtgaacgttccacatctgtatactttgaatagccttgcacaaataccataagtgaagctactttatttggcctcttcattctctcttcctatagaattctgtgaggttagtactagaacaaatctttaagatctctgaagttattagaagatgccaaaccaggattttcctgtcacccaggctctgtggttgatgaggtggtgtgtgagggtatctccgccgtgtctgtaccggcactatgccttttctgactcctccccactcaacagtcctgtggaggtggtagcggtgattggtggtaccacccctgttttacagatgagggaacaggttggggttacaaacctactgattccctgactcttaagtttttttttttcccattagactctactttttaatgcctatgtgtaatatctagaatatagtgtttgatggactagaaagagctaacatgcttgaagactagcaattttggtgtatgggtcttagtcccacacttcaatattggcttcacaaaattccaaatacacatggttccttaacaatggttcgatttatgattgttcgactttatgcaaagcactacaaatacagtacactccaacttaccatggggctgcgttccgataaaccagtcatatatggaaaataccgtaagtcaaaagtacattttcagccgggggcagcggctcacacctgtaatcccagcactttggaagactgaggcgggtggattgcctgaggtcaggagttgaagaccagcctgtctaacatggtgaaaccccttgtctctactaaaaataaaaaagttagctgggtgtggtggcatgcacctgtaatccccagctactcaggaggctgagtcaggagaattgcttgatcccgggaggtggaagttgcagtgagctgagattacaccactgcactccagcctgggtgatacagcaagactctgtctccaaaaaaaaaaaagttttcaacttacgttattttcaacttgcagtgggcttatcagcacatagccacatcataaatggaggtgcttctgtcaaaagtacattattgttttattttcaacttacagtggggcttatcagtatgtagccccatcataagtcaaggggcttttataacgatgtgtcttacaaaatcccaccagatacagaaaggagggcagtaaagatgaaatttgatcacaattaggtgcttaaactttcttcctgtcctccagctcagaggatgaaacaggaaactgagtcataaaacactactacaaacaagcccaaggattttatcccagattttcaacccaaggatgagctgcaatataactatcactgttttgttggctgcctgccacagaatgaccactgaggaaataaagcgagctttggattcactgcagcttggtttactgtggttcttttctgtattaccgttgttaggattgggaggtttaagtggtaactgggtccagcagcagggaatctgcgtgcagcagctaaatcaaggtttagtcaatgtccaaaacactttagcaaattggatatcagtaattccccagcaccctaaaacagttcccagagcaagtatttattgagctcctactacatgccatgaaggattggagataaacgataaccagcatatagccttcattgttgtcataaccaggcttttaagaaatgtatccaaagttaaaggaaataggctggcccgggcgcggtggctcacacctgtaatcccagcactttggtaggccgaggcaggtggatcacgaggtcaggagttcgagaccagcctggccaacattgtgaaaccccgtctctactaaaaatacaaaaattagctgggtgtggtggcgggcacctgtaatcccagctactcgggaggctgaggcaggagaatcatttgaacccgggaggcagaggttacaatgagccaagattgcaccattgtactccagcctgggcgacagggcaagactccatcttaaaaaaaaaaaaaaaaaaaaaaaggatttgagatcagaagcatttgaataaggtacattgaacaatagatttagccacatttgagatgtacaaaagtgtttttaattcttggttctcagttctcaaaagatagataggaaataggttgttgctgtgttttaagtttaccaacctctgtacattgatagcaccacattaatggtattcattttaatttaaaactacaatttatagtctgtgactcacttttcattcccagcatccagtaggtttttgttgttgttatttctaagtaaatttccaagttcctggttaccatgtgttaaacatactgagaaagaatgagacttagaagtcagaagaccagaggttctcttgctctctcacttgaacagcttttatcttgggcaaatcattttaatgtgtctaagtctattttaatctataaaattatacaaagccacctactatggctacatcacagggtggtttggggaagagcaagataatgtattttagtgctttaaaaactttaaagtactatgcaaatactaaggaatactaaggcaactacaaatatgtgctaggtgctgggttttgaatggtagagataggaagatgagcaagagacaggaataatgacaagttgcaaacatttggaggctttgagcagaactgtaagttacttggcttgtctggggtttagtctacctccaggacataaccagtaagggagaagactagggggagaggcacaggcagttggtagaaaaccttgaagtgtgtaaagtttgatctttgttctgccagcaatgggagacaccgagggactttttggagcattattattgtacacgttttagaaatatctgtgggtcttgccacctggtttcgtttgaatagggaataagtcaaatggttttggttttgttttttgatacagagtctcgctgtgtcatccaggctggagtgcagtggtgcgatagctcactgcaacctccgcctcccgggttcaagtggttctcatgcctcagcctcccgagtagctgggattaaaggcatgcaccaccacgccagactaatttttatgtttttagtagagatgggggtttctccatgttgaccaggctggtcttgaactcctggcctcaagtgatctgcccacctcagcctcccaaaatcctgggattacgccataagcctgatggtggtggtggtggtgttttgttgggtttttttttgttttgagatggagttctgctcttgtccaggctggagtgcaatggcgcaatctcggctcactgcaacgtctgcctcctgggttcaagcgattctcctgccttagcctcccgagtagctgggattacaggcatgtgccaccgcgcctgtctaattttgtatttttagtagagatggggtttcaccatgttggtcaggctcatctcgaactcccaacctcagatgatctgcccacctcggccttccaaagtgctgggattacaggcgtgagccactgcaccccctcaactgttattcagttctataatatgtccttttcctttgtatttggattatataactactatgatattgcttgttgtattagtctagaagctctactaataagctaggctgtagcttatcagctcaactgaccagtagaacacaaggccccacctaaagtcagagagcagtttcaatggagtgtatgtttaaggtggcaaaaaagtgaaaaaaaaaatatggataggttgtgaatagcagtaaatgaacctggaggggcagaagagtttttaacttcaatgagaaggtgcaaggatgagatccaggaaaaggaacaccattatcttcttttcccctaggacttaagctttataaagagatgccagctctcccagccagagatagtggcagataagcaaggggtcaaaagaaatgcagggcagcccacagtaggtctgggctgcaaagggttatggctagttagctgcaactgctgaggagagacgatgaaaacaaagattgactgagtcacctctgctgacaatccctgtggtgctctgtggaaggtactaggctgttctctaaagtatcaatacacatgagattcatatcatccactacaaaaatatacatgtttccatctttggatgataaactgattctgtgtttatatgaggacacaataaatacagcatttcatagactacgtagagctagatacctccttagaagccagcgaatccaactgtcatttcacaaggaaactgaagacgagataggaagtgaatagcgtaaggtctcacagctagtcagtgccatagcaaggactggaatggaagtctctggatttccagctccctcaacactgccttcctctgttgtgactgttttctgtttggcataagtgtggagtatattaatttattgcctcggccattcaacaaacttagacctttaatgtaaggcacttgtttaaggtaacaagaaaagacatagtccctgccttccagagacctcagtctggaaaaaatgggggcaagatttatctctgcagtacagaataaaaaatctttggcttttatttttatatattttttatcatttaattttttgtttgataatgtatataattcaatataatttatcaagaaatattaacagcctggccaacatggtgagaccctgtctctactaaaaatataaaaattagccatgcacggtggtgcatgtctgtaatcccagctacttgggaggcttgaggtaggagaatcacttgaacctgggagac

SEQ ID NO: 96864 - DNA, 40260 bp, Homo sapiens
acagcgatcaggaggtggcaacaaaagtaacagatcccaaaacaaaggccagaagcggagtttcagtaaagcatttggtcaataattagaaatagaagatttatatagcaaaaagagaatgatgtttggcaatatagaactgaacattatttttcatgcaaagttaaaagcacattgtgcctccttttgaccacttgccaagtccctgtctctttcagacacagacaagcttcatttaaattatttcatctgatcattatcatttataactttattgttacttcttcatcagtttttccttttgaaaggtgtatgaattcattacatttttattctaatgtattatctgtagattagaagataaaatcaagcatgtatctgcctatactttgtgagttcacctgtctttatactcaaaagtgtcccttaatagtgtccttccctgaaataaatacctaagggagtgtaacagtctctggaggaccactttgagcctttggaagttaaggtttcctcagccacctgccgaacagtttctcatgtggtcctattatttgtctactgagacttaatactgagcaatgttttgaaacaagatttcaaactaatctgggttgtaatacagtttataccagtgtatgctctagacttggaagatgtagtatgtttgatgtggattacctatacttatgttcgttttgatacatttttagcttctcattataaggtgattcatgctttagtgaattcttcatagatagtatatataaaagtacattttaatagaaagccagggttttaaggaatttcacatgtataaggtggctccatagctttatttgtaagtaggctggataaatggtgcttaaatggtaatgtactccacttcttcctattggaagattaacattatttaccaagaaggacttaagggagtaaggggcgcagattagcattgctcaagagtatgtaaaaaaaaaaaaaaaaaaaaagaaccaaaccactggaaataatcaaatgcaaaaaggtaacaaattcataactggaaagcaaagagaagaacaagtatgatttggatgataaagcattgttttaatggtgaaaacttcacagatcactaatgtttctagaggttaacttcaagtgggcaagctggggtttttaggtagtcagtggcctagttcctaaagccacagtataggatctgttaaactgaatgtctgttgaaagtttgttttagctgcttggaggcttccttttaagacaaactgtatgtgattaagttgttttgagggaactgaagaacctgatgtagcccctggccagataactgcctgatttctcagatattatttctctgggaaacattctacatagcacaggagcttaagagtggcattatcttctcgccttaatttccagagattatttctgtactgagaatcctggaactactatgctaggaaatttaaagctgcatggtctgtcttgttttcatttaattattgtgaatacctagaatctttcttggtcctgatttctcttgcttaatccagtctttatctctaactgccccttatttgatcaccatgtactaggagctctgatagccagctcagctcctaatccttgaggcaacattctttttctatttgaacttcagttctgtccttgaatcccgactagatatttcttgccctctggtctcagaattctcttggcttttattccttgatccacttgccagttttatcactttacccttgttcctcatggcttcccatcaagccatgggtattaggtgacagtgtaatttattagattctggttttgcccaaatactgggcatgctttaataataactgaaccatttcattatttggataggcatgggtaccttatcaagcagattaaaaggatatggtacccgtcctttagaaaagaacagctaaaaccttgttgtggattatggatttagcctaaagaaaaataatctggcataaattaagagtaagagagaagattaatagaaatttcacttcacataacttaaaacatggctatttcaataaaggactaaagtttctcctggatcccagaattcaacctgtatttataaatgtataatgtatttagctactttttggtttaaatgaacttgttgggttagcttggtaaatgttataatttttactattttctacaaagaaaatattttctaatttaagttggagctatctgtgcagcagtttctctacagttgtgcataaatgtttttactataaaatgagctaatgtataaaatactgctgtataccataataaagatagtaatacttgattttagtggcttttgttttctaaaatgaaaatagcttgaaatatttattataaaaataataaaagctagatataaaaatctaaagagaaaaaaaaccagtcacccttatctaatattttagtgagcagtcttccacatgttcatttataaaattggaattatttgattttgtgtattgcttttcccccctcaacatgttgtgcacaattttgtacaggcttacatggacatttttgatgacatgttttcttgtatggatatgccactacacatttaaccagtactcgatgtccatgttggttatttctaatttttcaccattataaacaaccctaaagttaatatcctcacatatgtgtttgcatactcgtctgtcaccttaggatacgttttctaaaggtagaactacagctttgaactcctaggctcaagtgatcttccctctcagcctcccaagtagctgagactacaggggggtaccaccaaacctggctaatatttaaattttttatagagatggagtctcattctgttgatcaagctgtttgtgaacccctggcctcaagcaatcgtcctgccttggcctcccaaagtgctgggattataggtgtgagccaccatgcccgccctcttctaattatctgtcatgagatggatctccagtcattgcattgaggtttatgtatttaatatatttagtgttttccctataccggggcatggatttttgtctttctttgagacagggtctctatctgttacccaggatggagttcagtggcatgatcatagctcactgcagccttgaactcctgggctctaatgaccctcttacttcagtctcccacttagctaagactataggcatgtgccgccacacctggccaatatttctttaaaaatgttttttgtagaaaaattagctgggcatggtggcgggcgcctgtagtcccagctacttgggaggctgaggcaggtgaatggcgtgaacccgggaggcagaatttgcagtgagctgagatcatgccactgcactccagcctgggtgacagagcaagactctgtctcaaaaaaaaagatgttttttgtagagccagggatctcactatattgtccaggctggtgaatttttatccattttttactgctgaattcccagcacctacaacagtgctggcaaataatagataactaaatattgaacaggtgaacaaattttttttttttttttttttttgagacagggtctcactctgctacccaggctggtgtgcagtggcttgatcacagctcaccgcagcctccaactgccaggttcaggtgatctcccatgtcagcctcctgagtagctgggactacaggcatccaccaccatgcctgtcaaatttttgtatttatttatttatttttttgtagatacggggtttcgccatgttgcccgggctggtcttgaactcctgggctcaatcgatcccgcgaccttggcctcccaaagtgctaggattacaggtgtgagccattgcgcctggcccaaatcattttaaatgtactgggagatgcactgataggaggccaaactggcagcaggactgcctgttagaagtaatcagatgatggtggcctaaactaatggagataaaaagatgtacacagagctctttaggaggtggactaagcagtactatctggttttaggtttaatgacagaagaggcctggtgcagtggctcacgcctgtaatcacagtactttgggaggccaaggcgggcacattacttcaggtcaggagttcgagaccagtatggccaacatggtgaaccgcccccccaaccccgtctctaccaaaaatacaaaaattagctaggtgtggtggtgcacacctgtaatcccaactactcaggaggttgaggttgcagtgagctgagaccacgccagtgcactccagcctgggcaacaaagcaagactccgtctcaaaaaaaaaaaaaaaaaaaaaaaagaatgacagaacaggctgggcttggtaatcccagcactttagggggctgaggtgggaggattgcttgataagcctgggcaacatggcaagactccatctctaccaaaaaaaaaaaaaaaagtgcaggaaatcagcctggtggatggtggtgccattcactgacatgtagaactgcaaatgtggcaaatttggtatgggaaggaaggggcatgtgaagaggaagatcatttagacttgaacatactgacacacagcagctattgaaacattcaggtgtgattgttgtagctggatgttggatattccagtctggagctctggagagccatctggcctggagacaaagtgggagtgagcagcgtgtttaatgatagacctggaaatggatgagatctcccagggataaggtttaggaaggactttttaggagcattaacacttaaaggatagacgtttaattttatttattcttcagaataattctgtcgaggtaagtagtatcattcagattttactgtgggaaacctgaagcttaaaaaagttaacttgtcaataagaaagctggttggtctgaggttcaaaccatatgtctatgagctcccaaaatcaatgctcctttgtatgtctcaaagcactgtacacagctggtgcttaatagttaaaatcttctatcacccctccccatttgacttgataacttaggaaggtaaaaggcatgaggcggctttcacagctgtgggacttagctcttgttaccttgggcagttgtacagattcctacaacctgtatttcagggtcgaagtgaaaatatttgtctatcactgagtgttttgtatatttatggctctcgatcaagagattatgtgtcaatgataataatcagctcttggctacatttcaattttttttcttttattttacttttaagttctgggatacatgtgcagaacatgcaggtttgttacataggtatacatgtgccatggtggtttgctgcacctatcaacctgtcagctaagttttatgccccgcatacattaggtatttgttctaatgctcgtgttttctttttttctgaggcagtctcgctcactgtaacctccacctcttgggctcaagccatccttccgcctcagcctccatggtagctgggactacagtcgcgcgccaccacgcccggctaattttttaaaaaaaattatgtagagatgggtcttgctatgttgcccactccagtgggcatcccaaaatgttactggcatcccaaaatgttaggattgcagatatgagccactgcgcctggccttttttaaaaaaagttttatccagtgacaggctgggctatacacttaatgtctaaaggtttttgcctttcagttcatatcaacgcgagtagagttagctagctatgtttgtaaacaatattccgatatgcttcgttaaagtaagccgatattaaacatttatataaatccatcctcacagggtcaatctggagataaactcaccgctgcagggggcggggaaggaggtgggaacacgctcattgacaacttcatttccatgagaatggttgctgtggtgattgctgcgtcttcccattggtcattgccgagcgtattgcggttctccgggagggttatattggttcccattccacagcggccgcaacgtgtcgagagccgtaagtaaagtgtcgcaaagcagaaggaaggcgggagtcccractgcaaacattgaggaaagccaggcagtagaggccgctatggcgaacgttccgtgggcagaggtctgcgagaaattccaggcggcgctcgctctgtcgcgggtggaactgcataaaaatccggagaaggaaccatacaagtccaaatacagcgcccgggcgctactggaagaggtcaaggcgctgctcggccctgcgcctgaggacgaggatgagcggcctgaggccgaggacrgcccgggtgccggtgaccacgccctggggctgccggctgaggtggtggagcccgaggggcccgtcgcccagcgagcggtgaggctggcagtcatcgagttccacctcggggtgaaccacatcgacacggaggagctgtcggcgggggaggagcacctggtgaaatgcctgcggctgctgcgcaggtaccggctctcgcacgactgcatctctctctgcatccaggcgcaggtgagagcgagcccggccaggccggcccctgttggcaaatggcgagggatggggaggagcccctgccaaggccaagggcagacgttgtaaggcgcaattcgtccccacgtttttgtagctctggactgagtcccaaagagcgtctgtggtcttcaaaaaagccagtcttatggacttattgccttgtaactagatctcccacagtcggccgtccccagactccgtgtccaccctcgtcgcccacaccaatatcgcttgctgctgcttcacttagacgtggcgatgcattggtgtccgagaccctcctacatcgtcatgcgctttcctctccaccagtccaactcctgttcattctgttaagaaaatccaaagtaatttaaatcttaacgtctcaaggaaatgacaatgaccggagtacattcttttttggttttgtcttgtttttgtttttttcttagagatggggtctcactgtgtcgcccaggttcgagttaagtggcaccatcatagctcattgcagcttccacctcttgggctcaagcagtcctcctgcctcagccttcatagtagctggaaccacaggcgcatgccaccattcttggtaatttttttaattttctgtagagatgggggtctcactatattgcccaggctggtcttgaactcctggactcaagtgatccttctggctcaccttctcaaagtgctgggattacaggcctgagccgctgtgcctggctcggaatacattcttaattcaaaataaaatgtccaaaatctgcagcttcctttcttaccaaattcatttgtttgcatcttagggaattcttccccattcttgaaaacctatctcaagaatcacttcctttagtattaataactttcttgggaccattttgggccaaactgatctctccctcctacctttgaattcttataatactttttgtktcccatttatatggtacttggtttcttaaataaatctgggcagggcacagtggctcccatctgtaatcccagcattttgggaggccgaagtgggaggatggcgtgaggtcagtagttcaagaccagcctgggcaacaaagtgagactctgtctcttaaacaaaacaaaacaaaacaaaaaacscacaaaactagccaggcatggtggtacacgcctgtagtcttagctactggggaggctaggttgagcygggaggatcacttgagcccctggaggagccatgatcatgccactgcaactgcagtctgggtgacagagcaagaccttttctcaacaacaacaaaatccacatcaatattctaaagtaatattggtcaacacctgtgaaaagaaggggtgaaaaaaagaaaaatactttaaaaagttaaaataatattgggacaggtgaacatggatgtttatcacagcagtgttgattattaaagaaggaaaatcgcagggctgaggcaggaggatcgcttgagcccaggaggtcaaggctgcagtgagccaagattgtatcactgcactccagcctgtgcaacagagtgagaccctgtctcaaaaagcaaagaaaaggaaaacaatataaatgtcagtaggaatatgattaaattccrttacatccaaacagaagaacagtacacaattattaaaaataataatttatattaacaaaaattggcaatatgaagagggaggaagaagactataagccatatttagaattatgtagaaaaggccggatgtggtggctcacacttgtaatcctagcactttgggaggctgggatgagatgatcactcgagcttaggagttcaagaccaacctgggcacatagtgacacctcatcgctactaaaaataagaaaaaaaaattattccaggcatggctgctttgctaggcagtatgttctttgggcagccatcggggccccaaccaccaccggggctctggggccaggcttcctttacttaccagcagctccrgggcctctgagaccttctaacagtactttggtggatgacatggagtcatctttccagacttgctttgcctctccgttaagtcaggactatgtcaatggcagcaatcaggaagaaattggaactggtgttgatcrgtgtatacacaagtttctggatattgcaagacagaatatttctttcctacaaaaaagattgcaattatctgtccagaaaccagagcaagttatcaatgaggatgtcgatgtctccgaactaagaaatgaataacattggagacatgcactggtccagaagcacttgacaaagctaaggcattggcagcaagtgctggaggtcatcacgtgcagtacaaaaagctagctgacatccatcaaggctccttggtctaccttgagcaggcattcaatatccctgcacttctgaagtgcacctgagcaaaagggtaaaggctgtgggcctgagagtgggctggtgtgggagagccccatgcagayggtttgccacacatcccttcttgtagacttggcattttggaagaactctttgacagagaatgagttgattttagttttatgctcccacctaaawttttttcactatttttataagatgttaatttcttgagtactttatttataacatgcctgtaccttgggtaaaccaagtaaacttttttttgycttaggcaaagtttagactgttcgtatgatgatacactttcttttttatgtgggttttttttttttgcttgttttttatttttatttttatttttgagacagaatcttcctctgttgccmaggctacatagcagtggcaccttcacagctcattgcaacttccaccctcctggcttaagcgatccttccacctcagcctcccaaatagctgggaccacaggtgcctgccaccatgcccagctaatttttgtatttttagagagacggtgtttcaccatgttgctcgggctggtctcgaactactgagctcaggcaattctacccaccccagcctcccaaagtgttgggattaccagtataagccactgtgtctggccttttaaaaatttttgcatgacttttcatctttttatgtgtgtttcccatttgtttgatatgagggaaaaatttctaatagcttgagaatcaaggggatggggattttggttgtaggcattttataataattaaccccttagcagtggtgtagaaaaataggtaaattttttgtttcaagacttaaaactacctcaagaagaacaatctaatgtaacagtatttgtaacgcttccagaggtctcagatgaggaatttttttgtaaatggtttggaagaagattaaaatatcctgggttagcgtagtaacattacggtaggatccttaggttgatgctgacttttgtttggggtaagtttatattttgtgtggtgtttatttactttttttgaagaggaggatgtagtaggagcagtgttacaaatcagtttaagtaatggagtagaccctgttgtcagtggggcatagatgagttatgagggctaaagcttgctctgatggtctctttttgttttgttttctttgcttttatcttttgttttacatttggggaggggagagattttccattaaggaaggttattgctagtggatttgattccaagggtctggggtgtcacagtagggttggggaggggctgcagggtgatccttggctactgaacctccacagagagcatgtggtgcccctgccctttcaagataatttactctcttgttagttttgcaggccacctcagattctctgttgaattgctgttaagaaatacagaccagtgttgtttctgggctctcgttgggtgaggttttcctgagttttatgtctcttcttagttcacatcgtgttacccagaacacatgcttcactgtcttctgaacaggcagtactcctgtggctctgtgtcttggcttgtttagtttttttcagccttgaaggctccttcccacacttactgacatccactcatgttcctggtatgacctggattgctgcctggtccctgcaacctcccaatgccctttctgctgcattcccagagcacaggacttttctcttttctactgaccttgcttggttctcccttgtgggttagtaatttctgtctgtctctttgcccctcactaattgttcacccatgagaattaggtattattccttttaaatatacagggaccatatagtctttatcttttatacatgatacttattactcaattttgtgtgtgcaaggtatctggcacatggacctgtgattagtagcctgaggtcaacaaatctcagttagaatgcgtaggttaaacaaagcttttttttttttaaatttaatttaattttatctttatagagatggggtctcactatattgaccaggctggtctcaaactcctggcctcaagtgatcctcacatctcggcttcccaaagtgcaaggattatgggcatgagccactgagcccagcctaaacaaagcttttaaaagctcctgcaacctcaaggttgttaacctggtcatctcatggtaattasaaactctgattggctgctttagatttcttgattaaaaacctaagtaaactgattaagttttaggcattctttcaaaggtttctcagtgaaaagattgggaactattctatttggtgctttgtgaamatattttgaattagtatatgtgccagttattgccatttcttaagtccaaaatgtttttctggtcaaataaatagcagtttttcaaaaacaaaaattagctgtgtgtggtggcatgcatgtgtagtcccagctactcaggaggctgtgggaggactgcttaagcctgggagatcaaggctgcagtaagctaagatggtgtcactgcactccagcctgggtgacagagtaagaccctgtctcagaaaaaaaaaaaatttatagaatgatcctatttttgtataagactaagtatacacacacacacacatacttacattatatatacacatatagtaaaaagtttatatacatgtgaatatatacaaatacrtatgtatgtgtgtgtatatggaagagttttgcaagtatcagttaatgggaattcatgatattctaactgctttgtcttaatctggtgtmttctccttggggaactacagaacttggctctatattatttatcaaaagagattgatattacattagattatcaagagatttctgtcttctctgggttccagtgccttaggaataatttttatctggtattccttctgatccttgttatcaccagtacacactggcactaccatcttgattacttcactttagtaaaatttcctaggaaattagtagattgctgtccccactccaggttatatatgtataggagtactttttgttgttattgttcacagattcattgagttgcaattggcatataataaactgcacatatttttaagggtacagtttgatgagttttgacatatatatttatacctgtgaaacaatcactgcaatcaagatatgaacatatctgtcaccaccaaaagttttcttgtgctcctttgtagtccctccctctctcctatattcttttcctcccttctgcttgcccccaaccctgcattttgtagaattttattttattttagagacagggtcttactatgttgcctaggctggcctcaaactcctgggatcatgtgaacctttcacctcagcctcctgaatagctgggactatgtagaaattttattttatttttgaagacggggtctggctctgtcacccaggctggagtgcagtggtgggatttyggctcactgcaacctctgctttctgggctcaagccatcctcccacctcagcctcctaagtagctgagactacagggtcacaccaccaygcccagctaatttttgtattttttgtagaggcagggtttcaccatgttgcccaggcctcaagtgattcgcctgcgttggcctcccaaagtgctgggattacaggtatgtgccactgtacccagcctatgtagaattttatataaatgaaatcatattgtatatactcttgttttggtataccttttttccactcaacatcgttatttcattctgtatctactgagctgatcgtgtcttttcattttcagtctgttaatagggtggattacattgatttttgtaaatgttaaactaatcttgcattcctgggataaactccatttggtcgtagcgtattctttttatatattgttgaactgaattcactaaatttttgtttaaaatctttgcatctgtgttcatgaaggatttcagtctgtagttttcttgttatatctttgtttaatatgagatgggaagtgtactgtccttttctcttttctggaagtgtttgtgtagtgttggtgttaaacttcattacatgtttggcagaatttaccagtaatacttttttagctgtttttattttatattttacttttctccttacctagtttgatagtggcaaggatatgatatgtgaaagatgcaagaccttccattgtagcttttctacccttagtaggatttatattgtatttaaagaataattcacataaaggctgggcacggtacctcatggctgtaatcccagcactttgggaggccaaggcgggtggatcacttgaggtcaggagtttgagatcagcctggccaacatgatgaaaccccatctctactaaaaatacaaaaattagccaggtgtggtggcaggtgcctgtaatcccaattgctcaggaggctgaggcacaagaatcgctagaacccgggaggcggaggttgcagtgagccaagatcatgtcacagcactccagactgggcaacagagcaagactctatctcaaaaaaaaaaaatggtaataataattcaaataaaatgtcaatagtgattatctctgtggagtcaagctttaaaaaaaaaatccaaaacaccaaacctaatttaattttaaaaataaaggtgggccgggtgtggtggctgacgcctgtaatcccagcattttgggaggctgaggtgggtggatcacctaaggtcaggagttcaagacaagcctggccaacatggcaaaaccccgtctctactaaaaatacaaaaattagctgggcgtgatgttgggcgcttgcaatcccagctactctggaagctgaggcaggagaatagcttgaacctgggaggtagaggttgcagtgagttgagattgtgccactgcactccagcctgggcgacaagagggaaactctcaaaaaaataaataggctgggcatggtggctaacacctgtaatcccagcactttgggaggctgaggtaggtggattgcctgaggtcagcagttcgagaccagcctggccaacatggtgaaaccccgtctctattaaaaatacaaaaattagccgggcatggtggcgcatgtctgtaatcccagttacccaggaggctgaggcaggagaatcgcttgaacccaggaggtggaggttgcagtgagccaagatcgtgccactgcactccagcctgggcaacagagtgagagactgtctcaaaaaataaaataaaataaaaaatattttggccaggcgcagtggctcatgcctgtaatcccaagactttgggaggctgagacttgagtccaggagtttgagaccagcctggacaacatagtgagactttgtctctatttgaagaaaaataaaataaaagtgatttgatcattccactggaacatagcactttggtcttccggctttacaaaatatatccattgtatatatatttttttaagtgacttgatcagtcctcagtatccaggactataggtcatactgataatgttttgagattggatagttctctcctctatgttacttatgaggtcctttccaggacctcattaaactacataagtaatagaggcttgacataatagaggaccttattaaacctcataagtaatagagacttgaagggtgatatggtttggctctgtgtccccacccaaatctcatgttgaattgtgatcttcagtcttggaggagaagcctggtgggaggtgactggatcatgggggtggatttcgtcttgctgttctcatgagatctggttgtttgaaagtgtayagcacttccttctttgctctctccccttcctactccagccatgtagaatgtttgggcttccccttcaccttttgccgtgattgtaagtttcccgaggcctccccagccatacctcctgtacagcctgtggaactgtgacccaattaaacctcttttctttataaagtatctagtctcaggtagttctttatagcaatatgagaatgaactaatagaaagggctctgccttcctaataacttactgattgtaatttcctgatcttagacctacaggccaccttttccttactctttagttcaacttatttctcctttgatgatagacagtgcttgggaaactcctttgaccatgacaccagtaagccccactgcagcacactgcaactaacctaggtagtctagagactcacctagtaccagaaactggttagtcacactctatttttgggacagggttgtgtttggcctgctatattcagggtagactgtgccacagaaagcaacaattcttggtatgtgacaaatctgaaaccatgaaaccatgattgtaagtttcccgaggcctccccagccatacctcctgtacagcctgtggaactgtgagccaattaaacttcttttctttataaagtatctagtctcaggtagttctttatagcaatatgagaatggactaatacaaagggctctgccttcctaataacttactgattggtcatgttacatgttagtcaggctggtcttgaactcctgaccccgtgayctgcccgcttcagcctcccaaagtgctgggattacaggcgtgagccattgcacccagcccaaaagatttttaaaacaaaatgtgtgatatagtaatatatatgcttctttattaacacattatataatgtgtctaatatctatgatgattktaaagtaatgatgagcataaatgatattttgagatatctgcaaactagcataatagaaaggtttttttttttcatttctattgttcacaaagtcccaggtcctataatactgctacaatttatttcctgtgttcataatgaaaagaaatgctgtattttaataggagattggtgaaaagaaatttgtatttttttccctgtccaaattcatggactctgaattctctttatggatgccttggggatccttagacttgaggttaagaatttctgcattaaaaacttccttccctagtggcaaaagatggtagaaggccagcctcagaagtatccttgtgcctgaaggactgactattccaagggaagtgaggtagactaaccccactacatacatacatacatacatacatatatgtatatatatatatatwtatatatattttttttttttttttgagacagagtctcaatctgtagcccaggctggagtgcagtggcacgatctcggctcactgtaacctccacctcctgggttcaagcaattcttctgcctcagcctcccaagtagttgggattacaggcatctgccaccacactcggctaaattttttttgtatttttcagtagagatggggtttcaccacgttggccaggctggtctcgaactcctgacctcaagtgatctgcctacttcggcctcccaaagtgctgggattacaggtgtgagccactgtgccgggcccatatatataattttttggttttggttttgtttttgagacagagtcttgctccatcacccaggtaggagtgcaatggcacgatctcggctcactgcaacctctgcctcccaggttcaggcagttctcgtgcctcagccccccaagcagctgggattacaggtgcacgccaccactcctggctaatttttatgtttttagtagagatggggtttcaccattttggccaggccggtcttgaacttctcgcctcaagtgatctgcctgcctcggcctcccaaagtgctagaattacaggcgtgagccaccatgcctggcctatttcttttttttttwaaaaaaaagktctctggaagagcatagtattttgaaagtattatatgtttctgatccatctttgtctattatctcagaatctcaccatggcttagctgattgttccttactcaaaggcmcacatcatattgttgacctgctggggctcgcagtaatacttgaagactgggacgccgggaggatccatttccaacttactcacatggttgttggcaggattcagttcctcacaggctttttgactgagggcctcagactgttgacctctctcatttcctttccatatgggcttctccatagggtggctcacaacatggcagttggcttccttaagaaggagcargcaattgaccgggcgcggtggctgacgcctgtaatcccagcactttgggaggctgaggtgggtggatcatgargtcaggagatygagaccatcctggctaaaacggtgaaaccccgtctctactaaaaatacaaaaaattagccgggcgtgattgcgggcgcctgtagtcccagctacttgggaggctgaggcagaagaatggtatgaacctgggaggcagagcttgcagtgagctgagaccatgccactgcactccatcctgggcgacagagcgagactccgtctcaaaaaaaaaaaaaaaaaaaaagcaggcaatagatagcatccaaaatggaaatcaagggttttgttaactaatcttggaaatgactttccatcacttctgtgatagtctagtcgtgagaagcacatcactaaaaccagcctgtactcaaggggaagaggttacctaagagcatgaataccccgaagcagggatcattgggggttaattttagcagctacctgctgcactacataaggtcaatatcattgtgaataattaattcattggtaatccaactctactatttggttggttataagtattgacttcaaaactatgaaagttactttaattggaagtcttatatcattgtttgtttctctttttctttattttccagaataacctgggtatcttgtggtctgaaagagaagaaattgaaactgcacaggcttacctagagtcatcagaagcactatataatcagtatatgaaagaggtatgttacatgtcagatgagttttaagttttgattgaaactagttaagaattgatagtaagaatccctcattcgtaatattggtgtractcttcactgtgccctagaacttctctatagagccatctgggaagtcacctcatagctgaaattattgcatattaaagacttcagggttttaaaaaaataatccttgtataggacataatggccacctagtctaaatacaattataaaggaaatattattctagtgttatcctaaaatactatttgcatgtttttgtatttataatctaaacattctattttagttttccatgaaaatagcactacttgaaggaaacaagaactactttaacaaaacatctgaaatctttgaagcaatggttctcaaatgttagcacccatcaaaatctggagagctcatgaaagcacagcagactgggcatccaggctctgatttagtagttctggggtggggcctaggaatttgcatttttaataagatcctgcctgggtgatgcttaaatgctgctggtctaagtactatactgtactttgagaaccactgcttcagggcaatggtttttcaatgattttttttttttttaacccgtgaaacccttctgaaaatgcagcatataaaaattgattgagttactctggttaagcaggttagaaggacccagagcccactccactacagattcttcctcctccccactgcagtagcacaaaagagatgctgtagaacttttaggggtctggggagccaacattgaaaactctcactttaggggtcacagcctgcaaaggtgacaagccactgtgttaccatctgtttccttaataaacttttttttaatatgaaagggaaataatcaggcacaatattttcttgtggattactatttgtcacagctatctgctttaaaaatccattaatacggctgagcatggtggctcatgcctgtaatcccagcattttgggaggccgaggcaggtggatcacttgagatcaggaattcgagaccagcttgggcaacatggtgaaatcccatctctactaaaaatacaaaacagcaggcatggtggcgcacgcctgtagtcccagctactcaggagactgaggcaggagaatcgtttgaacctgggaggcagaggctgcagtgaactgagatcacgccactgcactccggcctgggcgacagtgagaccctgtctcaaaaaaaaaaaaaatccattaataaagtgcttttataacattaaaaaagttgaaataacattagatatcacataaaagagactaaacatacaaaattatgtttgctaaattcatgcgtcagaatgcttgactgcaaaaggatataagaagcttggtatgcctgtaatcccagcactttgggaggctgaggctggaggatcacttgagcccaggagtttgagaccagcctgcgcaacacaggaagacctcatcactacaaaaaattaaaaaatttgccagatgtggcacacactgtagttttagctacttgggagattgaggcaggagggtcgcttgagcccaggagtttgaggttgcagtgagctatcatcgaaccactgtactccagcctgggtgacagagcaagattctgtcttttttttttttttgagatggagtctcgctctgttgtccaggctggagtgcagtggcgtgatctcggctcactgcaacctccacctcttgagttcaagtaattctcctgcctcagcctcccaagtggctgagattataggtgcccgccaccattcccagctaatttttgtatttttatagagaccgggtttcaccatgttgccaggctggtctcaaactcctgacctcaagtgatccgcccacctcagcctcccaaagtgctgggattacaggcataagccaccatgcccagcctcgtaccttggcattttaactttcttcctgaagtactaacaagagcagagtgccacaaaaccaaatagagatattagtctaccctttcttgcttttaggctcacagtcttatatgtgraattgttaatttaaaatgtaargtctgaggccaggcacagtggctcacgcctttaatcccagcactttgggaggctgaggtgggtggattgcctgacytagaggttcaaagatcagcctgggccacatagtgatacgctgtctctacaaaaactaaaaaaaaattagctgggtgtggtggcrtgtgcttgtggtcccagctacttcgggggctgaggtgggaggatggcttgagtccgggagggcagtccaggaggtcaaagcagcagtgagcgaggatcctgccactgcacgccagcctaggtaaccaaataagaccctgtctcaaaaataagtaaaataaaatgtaaaagctgaacacggtgacttacacttataatcccagcactttgggaggccraggtgggaagattgcttgatgccaggagttcaagaccaacatgagcaacaaagcaagaacccgtctttacaaaaaaaaaaaaaaaaaaagttactaagcatcaatagtatttcattaaaaatagtatttgtatggaaacataacacatatagtgaaattccttgtgtttagttgtacctctrtttcagttaagagactratttgactgtattaatattacgtatgatgtgtgaaagccataacagtgaagtatgtacataaaataatatattgattaattcccctcatctagacaggggtaagcatggtaagcagccctcggaattgttgaagagttctctgaagaattacttatctattgtgtttgccttgggccttgcttcctgtcttagttgtttttactttatgtgaatcctgggagcccacgttgtgatgcttttagtgtttacatccagaatgtaaaatcatatttttatgaaagacgttgttcctttttgagtttaatgaattcagttaaaagcaagagtgtgtttctagatgggactatcctcatagaagtagaatgaggcagaggttaggtagttctgttttggaagacgtaagagggggttgtaagtgatttataaatattacttaatcctcatgagatagatactgttattacccttattttatagatgactaaacagaagcacaagagatcaagtgacttgcccaaggcaataaataatggaatctggttttaatgtccctgtattgaaagggggtaatacacttttgttatttccttgagaaaaaaatattagaataaatattaaaatctctcatttgatttttattagtggtcagtttagaatactactactgtagaaatatatacatttttcctatttgttttgcttatgcatgtttttaaaagagcccttttaccagacaaaattgccatttgaaatacttaaagaggggtcgggcacggtggcttacacctgtaatcccagcactttgcgggggccgaggcaggcggatcatgagatcaagagattgagaccatcctggccaacatggagaaaccccgtctctactaaaaatacaaaaattagctgggggtggtggcacgtgtctgtaatcctagctacccaggaggttaaggcaggagaatcgcttgaacccgggaggcggaggttgcagtgagccgagatcgcaccactgcactccagcctggcaaaagagcgagactccatctccaaaaaaaaaaaaaaaaaaaaaaacttaaagaggctgggcaccttagctcatgcctgtagtttcagcactttgggaggctgaggcaggaggatcactggaggctaggagttcaagaccagcctgggcaacagagcaagacccccatctctaaataaataaataagaattaaaaaaagaaaaaatacttcaagaattatatatgtctaaaagcagattggtggattttttgcatatttgcagtttaactgcaacaacagtaaaattttgtcaaatgtgaacttttgacatttggttaaaacaaataaaagggtatcttttatttgtttgactcagattttatggttaagaaaattacttgttgaggcgggtgcagtggctcacgcctataatcctagcactttgggaggccaaggcaggtggattgcttgagcccaggagttttaagaccagtctgggcaacatagcgaagccctgtctctacaaaaaatataaaaattagccaggactggtggtgcacacctgtggttccagctactcaggaggctgaggtaggaggattgctygaggtgggaggatcgggagacggaggttacagtaagccgagattgtgccactccactccagcctgggtgacagagaccctgtctcaataaataaataaaaatttaaaaaacagaaaattacttcttgagtaacataaaaatgaactaggaaaaaatgaaatgtatttggcttgtagaagttgatttctccaggtcctccagaagagggcacttggtgtttacagtttaaaactttaaagagcttttgtttttcttaattgtaggttgggagtcctcctcttgatcctactgagcgttttcttcctgaagaagagaaacttactgaacaagagagatcaaaaaggtgagtaggtatagaaatcagcccttgcaaatatttccacatatcatagattagtgattgttcaaaaagtcacttataaaggttatagaatgtggattctgacaggagtaaaacctccatttaccacttacttgttatttgaccttgttcaaacctgagactcagtttccttatctgtcaaatagatacaataaacaaatccaactcaaakggttggtgggataatcaaaataaatatatatgaaatttacttataaaacgtaaaccatggtccggacacggtggcttacacctgtaatcccagcactttgggaggctgaggcgggtggatcacaaggtcaggagttcaagactggcctgactattatggtgaaaccccgtctctaccaaaaatacaaaaattagccaggcatggtggcaggcgcctgtaatcccagctactcgggaggctgaggcaggagaattgcttgaacccaggaggcggaggcagtgagccaagatcgtgccactgtactccagcctgggcaacagagcgagactctgtctcaggaaaaaaaaaaaacaagtaaaccattacacaaatattggtttattttttctttacagatttgaaaaggtttatactcataacctatattacctagctcaagtctaccagcatctggaaatgtttgagaaggctgctcactattgccatagtacactaaaacgccagcttgagcacaatgcctaccatcctatagagtgggctatcaatgctgctaccttgtcacagttttacatcaataaggtaagcttcttgaagtagttatctaacagagtaccaatagtgagtataaaaatagaaccagtagtaccttgaaaatactatcttttaaaaacaggtagcttgtattttatgatgtacaactgaagccgaaaatgcagcccagtttgcccgtgtactaaaattttgtagctttttgttgtatgaattattttgagttttaaaataccgagttttatcattgttttacatgttacctaagaccaattctttttttaacataggcacgctatctcaactcattttagtgagatattaccttaaattgcagattttaccttgtagatatagctttatctttacgtaatggtaatctcataactctgagaatttgactgaggaagttgactgttaaatgtgggctttgataaaagcatgtgatgcatttcagttatttttcagaattaactctgtaataattttttaatgttggaaatatgtctgctgagttccaaagttctaggtctttataccatacttcttttggattgttacacagggacaatgtttttgagcttcttagttgtttatcagaatttctcataaaaatttaaaaaagcattgctcacatcatgttggtgtactcttaattgacccatttattcctttaatccttgagagtttttaatgctaaaataattttacaccaccttttctaaccagattttcctattaatccttaataagacatctcagcaatataaattacttttatttatatttcgaattcgcaagcctctctgaaattttggtagttctctgcttatcagagttccttctttcatctctctggtaacccgctgccttatccttgggcctttatcctttttgagcatttcgttagcgttggttctgtaaatgcgcccgatgattaaagtattgtcccacagaatttcattcagaaaagctattagcaggagagaaagggctgtggtgactgcagcatcgcttctaggactttggtctaagatcaagtgtgtaagtaacgctactgcatatatcagagcattcagttaactaattctcatgaatccatttcattgtcctcatccaaagtgttatccagtgcctccgcttgtgacatcttttttacagctgttggaggycccttattcattctgtttagcaactttaaaattacatattcactgtgactttaatttatacttaaaactccatggaaattggcagtactaagatatctagatattaaagtgtgattaaaatttaaagttgttaagcattacttatgtggagcatgcagtaattttcatgagacctcccacaccctgcacttttatttttttaccaaaatcttttttaagtttttgttaaaaccaactaagtcgtattgcaaaaagagggatttgaaccatgtttttaaaaatgcaattgtcatttatatcattgtcatcttcatctgattccagtgatgaggttttgctacwtggtgaatccctacctggcagctgctaaagtcccacatttaccagccacctagagggcataagacactcactgttctagcagtggttgctcacagggagccaatctggacaaagctgaaatgacgataaatgttaagggattggattatagagagataattaaagtttcattatataaactctaactttcttttggcttttaagatttaacacatttttatctatagatgttgctgggctaatactrcacgtgtccagctattctcaagatggcttctgaatttgccataatggaaagatacatttaatgctgcaattttaaagttatagccaaccatttaaagcctttcaggtattactaatattaagtagacattctatttaatgagggtggcttccaactaaaagttggactttaactttgaacttctgctgggtggtcctttgacttacatgacaaatacaaaatgtttctattaacaaggagatcttctctaattgtttgagaagtttgccatgcccggaattgaattatgaagtcttcaagagtgttggtaaagcagttccataaggttcatctgtagaagtctgttgactttaaaacttggtgggaagccttattgtatgtaaagtttaaagattttagaacacaggaatatcttcttacctgagtttatcctatttgcctttgtatagtaggatgtaaaggggctctctaaacctaataaaaattaaatcctcaggctgggcaaggtggcttacatctataaccccagcaccctgggaggccaaggtgggagcattgcttcaggccaggagttggagacctgtttaggcaacatagagaaaccccagaattagtcaggcttggaggctaaaggtgggaggatcccttaagaccaggaggttgaggctgcagtgaactatgattgtgccactgcactccagccttgggccagagtgagacccctgtctcgtaaaaaaaaaaaaaawawawatatatatatatatatatatatattcagtcttctgacacaatgtaaatagtctaagaatttattgtgcatgggattttggctacttagactgaacctaaaggagtttttgagacagtttaagtctaggatgacagccattcctgtatatctattgattgtataaggagagctaactttcagttggcagttgtctttcaatccgagtggattattattaagagtttgggggcattaatattttaacctttgaggttacattttaaccagataatatgataatatatcttttgtaccttctgaatgatctgcaactctacagggcctcctttgtagtatttttatctgattttataccttttcccatattaaaagaaattatgcaagtatcagttgcaaataaagctgtgtgatagttgcattcactgttgtttatttccccaatagctatgctttatggaggccaggcactgtttatcagctgctaatgtcatttttggtcaaactggaaagatctcagccacagaagacagtaagtttacctttgcatgttttacatagcttttaaaaaaagttttattttgaaattattttaaacttttgaaaagttgcaagaacagaagagctatcatatgcccttctaaatgcaccaatktttagtattttcctcgcttggaatcaaattttatttttctctctgaaccattggagagaaggttacatacattaggctcttttaccctttcatactttagtatatatttcctaagaagaatattttcttacataatcatagatcatttatcaaattcaagaaatgtaacattggccaggcatggtggcccacgcctgtaatgctagattttgggaggccaagatgggaggggccaggagttcaagacaagcctgatcaacatagtgagaccccatctctatgtttttaaagaaattaaaaaaaaaaaagtaacattgatacaattcttttatctacactgcatatttctatttcatcagttgttgccataatattccttctagcatttgtttgccagtactggattatacagttcaagattgcataatgcattcagttgtcacatctcttcaggcatttttcgtctggaattgttcctcagcctttctttccctttcatcacttaatattaagaatataggccagttatttcatagaattactgccagctggggtttgtgtgatgtttccttatgccatgattcagatgatatatttttggttggaatactacatgcataagcgatgttgccaaatacccatctttttaagtatagtgtttcctttagtcttagaaaatcacagttaacatgtgtctttgagtcatttaacaggttttttaataagttcatcattttctttaaaaatagtttatttttaaaaatagtttgattctattrctcactgttgaacagtttccaaccttcttaygatgttttagattttgaaacatcatgtcttccttacaaatggacattctaattgtggatctgaaaaatgcagagactcttaagagctaaaggaatgtacattatcaaagtaaatagttgctttctcccctaatatattaactacattaattatagattagttgaagtctaagaggcacttgtctcaaaaaatgaataaaaactaaattgctgagatattatttaataattcactttatttaaagtaatatcgtgagatattattttgtttttactcttcataatagctgaaaaaatgacagtgaccagtgttttcaaaatgttcttattgagcattctcatatattgktggttggcatatttgttgaaaataatttggctgtatgttgtgaattatttaaaattgtgtaaactcttttactcagtaaattccacttctaggaatctgccctaaggaagaaatccaaaatccagacagatttttgcacaattatactcatgtttcaagtttaaaaaaaatgtgtgtatgtgtataaactttacaaagctttgtgttgacagctgactttgtagattacagcaagaaagctgctctgctatgtatgacactctgacccagaagcaggtcatctgaatagtttagcaccaggttctccacaaccatctgttgtgtgacatagacgtttttgtgatagtaaagaattggaaacaacaaattccaggttagaattagaagaatggttaaataatagaatatctatttaattgtatataatggtgtacttaaaaatgaagctaagagttgataatgatatgagtaaagtgtttgtggtgcgagaaagaaayatgcaaaaataatagtgagtgcttctgggtagtaggatttggggggggatctttcttcccttttccccaagccccctgcttcagtaaagatctgttacttttatagtcaggaaaaagtgatattaaaaaaattacagtacccaatgaaaattacagttgtgaccattaacttaaacaaatcacatgtatattttagctcctgaagctgaaggagaagtgccagagctttatcatcaaagaaagggggaaatagcaaggtgctggatcaaatactgtttgactctcatgcagaatgcccaactctccatgcaggtaatgcagtcagaagctgcctttttctttcttaaatgaggaaattgtaagtaaaaactcatagtggggattgtgctcattggggtcacattgtgtttaatatgaaaggtgtgtagaatgttttcgtaaatatttctttcttggttttaaatcgtattcttcgaattgcttgaatccgggaggcagaggctgcgtgagccgagattggaccactgcactccagcctgggcaacagagcgagactccatctcwaaataaataaataaataaaataaatcttactcatcattcaaggcctatcttaaatactacctcttccttgaagacttttctttggttagaatataagcttcttgagagctgggaacgatatcatattcttttttttttttttttttaracaggctctcgctctgtttcccaggctggagtgtggtggcrtgatcatgggtcactgcaaccttggtctccccggctcatgcagtcctcccacctcatccttggagtacaggcgtgtgccaccatatccagttaatttttaaattattttgtagagactggctctcactgtgttgccaaggctggtcttgaactcctgggctcaagtgatcttcctgccttggcctcccaaagtgctgggattacaggtgtgagccactgtgcctaatcttttttttttttttttttttttttttttgagacggagttttgctctgtcgcccgtgctggagtgcagtggtgtgatcgcagctgcaacctctgcttcctgggttcaaaggattctcctgcctcagcctcctgagtagctgggattacaggtgcctgccaccatgcctggctaatttttgtctttttagtgtagatggggtttcaccattttggccaagctggtctcgaactcctgacctcaagtgatccatccatctcggcctcccaaagtgctgggattacaggtgtgagcaaccacacctggccaagcccttactaatctttatatacttcccagtgttatcttacacacagcatggacttgataaaatctaaaagggtagacttttaagaaatagctcatgtaatagttcaaaaatagaagcagaactgatggcagtgaagagcatggactygaaatacactaggtaggtatgaactccagctctgccgcttcgtagctatgtctttgtggcaatttacttaatatatttttgcctctatttcctcacaagtaagttggagataatagtacttaatactgttgttatgggagttaagtcagtatatattaaggcctcggaaaagtgcctgagacatactaagtccttaataaatgttaactaccatcatcattattaatttatgcccaatcctagtttctaagcactagggaggataataaaattaatcatttagatgcaatatactaagtgtagatacataggaagmtttcctgggggattcattgtgcttttatttttttatattgtgtattaaagtatgataattttttttttttacatgggactctgcttgataaaagtataataatctttagtggttgtattagtctgttctcacactgctataaagaactacttgaggccaggtacagcgcctcatgcctataatcccagcactttgggaggccaaggtgggtggatcacttgagcccatgagtttgagaccagcctagacaacatgttgaaaccctgtctctaccaaaaatacaaaaaattagccaggcatggtggtgtgcacctatagtcccagctactggggaggctgaggcaggagaatcacttgagcccaggaggcagaagttgcagtgagccaagactgcaccactgcactccagcctgggtaacaaaacaaaagaactacctgagactgggtaatttatgaagaaaagaggttaattgactcacagttcctcaggcttaacaggaagcatgactaggagccctcaggaaacttagaatcatggcggaaggcgaaagagaagcaagcatgtcttaccatggcaagcaggagagagagagagggcaaagggggaaatgccacacacttcaaaaccatcagatctcatgagagagctcactcattaccacaagaacagcaaggaggaaatctgcccccagtgatccagtcacctcccaccaggtccctcctccaatttaatgtgagatttggccagggacacaaatccaaaccatatcagtggtaaataatatagaaccttgtgaaactactaaacgaaagaaaaccaaacaaacaaacctcaacacatcagaagcataggtcttgaaaagatgaagataattttagaggtcagagggtaaagaggaggcatattaaggaaagacaggaagtagggagaataactgtggggctttatgtgtagagaatttggagccaggaagagctgtcaagtttattctggtcaggtaaagaaagctggaaaaggagggttgcagggactattggagcaaaacagtaggctaatttaaataagcatcctagagagaacatgtaagtaaacaagcagcccaagaaggaaggaagtatacaagatttagagacttatgatctacatttgaagtaattgtgtcaagcaaatcgcactatgatttgacccttacctttcatttagttgatgtttctagtctgggaacttaaaacttcatcacttggttagtttaaactcacatatttgccatgctactaaactactcagattttccttaaacccagttttgttttttgagatggggtttctgtcacccgggcyggagtgcagtggcatgatctccactcactgcatcctccacctccctggctcaagcagtcctcctacatcagcctgccaagtaactgggacaacaggtgtgtgccactgtgcccggctaattctttgtatttttgttagagacgatgttttaccatgttgcccaggctggtcttgaactcttgagctcaagcgatccacccacgtcggcctcccaaagtgctgggattacaggtgtgagccactgcgctcacccctgactttattttttaaccttaacttcatcctttatcatctgtatatttatctgaaagaccttcttcagttcaagctttaagacatacataaatttattcaattaagtatttatttatgccaaccctgtgctagtcattggccaaggatactatgatgaacaaaaatgaacctagcctttaacttcatgtaaaagtacaattttgctaagttccacaaaggagagacacatgwtatgagaaggcacaataggaggaaataacaagcaagctctggggatgagtaagtaggagttacctagactgaagaaaagaaggcacaccatgtcaaggagctgaagcarcatgtttagaagttctgtggcgtaagggaggatgatatcagaagggatggagcaaaggctgtgaggttggagctgagggagagggagtgtgatataagctaaagttagagttagaaaggggctggagcaatcaaggctttgaagcattgttgtcttcatcttctgagcatttggaaaccttgaagggtttgtggaaagatcattggtgagacagtgtcaagtgaaaagaagaaaaggccttgggatctattatttatttttattggccaagaagagcttaccctatttcttaaccaccttagttattctttctttttttatttgcccccccccacccccaagaggtagaggagataaaactttaactaggaaggtagatttaactctttgttcactttgatgtctttaagagacctagagcatttctgtctgatatatttcactaaataactaatagcataaacatggtagcattaatcttaatggcatccttgtgaaacatttttatgatgtagattacagtctttttgtttgtttgtttgtttcttgagatggagtcttgcactgtcacccaggctggagtgctgtggcgcaatctccacttactgcaacctctgcctcctgggttcaagcgattctcctgcctcagcctctcaagtagctgggattacaggcgcctgccaccatgcctggctaattttttatatttttagtagagacagagtttcactatgttggccaggctggtcttcaactcctgacctcgtgatctgcccgccttggcctcccaaagtgctgggagtaatgtatcacatatatataatgtttcacaattctcaaagtacttttacaygtagcatttatcttattggaaggagtaactgtaaataaatttcagttcctcagaataaatgatatgtaagcagcttgtcyatttaaatacttttttttccacatttcttgagtttttaatataatcggaagaaasaaagaagttttcaaaggtgtttaagattatgatacccttctaaaccaggctggaaagtaagagacttctcttctaaaaaactctgaagtttgctttaatattatttaacagcaggaggtgagtgtcctacttaaccataatttatttttttttccttcaggacaacataggagagcttgatcttgataaacartctgaacttagagctttaaggaaaaaagaactagatgaggaggaaagcattcggaaaaaagctgtgcagtttggaaccggtgaactgtgtgatgccatctctgcagtagaagagaaagtgagctacttgagacctttagattttgaagaagccagagaacttttcttattgggtcagcactatgtctttgaggcaaaagagttctttcagattgatggttatgtcactgaccatattgaagttgtccaagaccacagtgctctgtttaaggtgcttgcattctttgaaactgacatggagagacggtgcaagatgcataaacgcagaatagccatgctagagcccctaactgtagacctgaatccacagtattatctgttggtcaacagacagatccagtttgaaattgcacatgcttactatgatatgatggatttgaaggttgccattgctgacaggctaagggatcctgattcacacattgtaaaaaaaataaataatcttaataagtcagcactgaagtactaccagctcttcttagactccctgagagacccaaataaagtattccctgagcatataggggaagatgttcttcgccctgccatgttagctaagtttcgagttgcycgtctctatggcaaaatcattactgcagatcccaagaaagagctggaaaatttggcaacatcattggaacattacaaatttattgttgattactgtgaaaagcatcctgaggccgcccaggaaatagaagttgagctagaacttagtaaagagatggttagtcttctcccaacaaaaatggagagattcagaaccaagatggccctgacttaatccttgtttttaaagaaaggaaatgtgcaatattgaagtgatctttttccctagtcagacaggcccaattccattgtgatgtttacctttatagccaggtgagtgcagtttgaacttgagatacagtcaactgagtgtttgctaggatcctaaggaacataaagttaattaaaaacttacacctaattatgtaaattgccttgttaaagacatgtgatttgtattttagatgcttgtttcctattaaaatacagacatttctaccctcagtttctaaatgtagactatttgttggctagtacttgatagattccttgtaagaaaaaatgctgggtaatgtacctggtaacaagcctgttaatatattaagattgaaaaagtaacttctatagttactccttctaaaatatttgayttcctamattccccccacccaaaatctttcccttttgaaaatactaaaaactaagttatgttattataaagtgtaaaatggtttgtcttaattataggagaaaaaggccttgttagaaataaaataaactgacttatttcactaatgaaaacttctgtttcctttttgttttcttgtgagcactgatacctcaatacattgatacctcaatacctttgaggtattttttgatacctcaaagatactagcttatttgaagctagagaagaatatttcttcaataacattgcacagttagaaaacattaaaatatcattcatgggccaggcaccgtgtctcatgcctgtaatcccggcactttgggaggctgaggcaggcggatcacaaggtcaggagatcgagaccatcctggctaacacggtgaaaccccgtctctactaaaaatacaaaaaattagccgggcgtggccgcgtgcgcctgtagtcccagctacttgggaggctgaggcaggagaatggcgtgaacccaggaggcagagcttgcagtgagccgagattgtggcactgcactccagcctgggtgacagagcgagactctgtctcaaaaaaaaaatatcattcatggctgagtgtggtggcttatgcctgtaatcccagcactttgggaggctgaggtaggaggatcacttgaggccaggagttcgagaccagcctgggcaacatagtgagacccccatctctacaaaacatacaaaaattagctggggcatggtgccacctgtctgtaatcccagctacttgggaggctaaggtgggacgattgcttaagcccaggaggccaaggctgtagtgaaccataattgccactacagcctgggtgacagtgagaccctgtctcaaaataaaataaaatattcacttagtgaatatttattgagctactactgtgtcccaggaaacctcactgactgatttctcatcagaggatcctggcatgtttataaacttttaagcactgttgagaaaggatatatacgtcataattaaacctcgttaatatgtgttagtcatgttaagaaatgcaggaatggagttcctatccggtgtattgtcaagatcagtcgtaacatttaatatagagaatagctctgtgctttagcctgcctgttactttgcttctcaaagcctaggtctggtcaacactaagatcctgtaacatttatgtaaaaacacacacacacacatgtgaaaatcaccttgctttccctttgagatcaattttccaggaagaaaaatctttgagtataacagtcagaaatgtgtaattcactcaatatttaactgatgtttattcaagtctttactaaggtcaggccctgctctcactcttctaatcatagaggatatggtgataaacaggataaacaaggacctgttctcacagagtgaataaacaactaagaaagataatttcgggccataaatgctgttaagaaaggaaaactgaaatggtaagctttttttttttttttttgagacggagtctcactctctcgcccagactggagtgcagtgccgtgatctcagctcgctgcaacttctgcctcccggattcaagcgattctcctgcctcagccccctgagtagctgggattacaggcgcacaacaccacacctggctgattttttgtatctttagtagaggcggggtttcaccatgttggccaggctggtcttgaacttctgacctcaagtgatccacctgcctcggcttcccaaagtgctgggattacaggtgtgagccaccacacccagcctgaaatggtaaacttttaatggaaggggtgctgtcttagctgtggtgatctggaaaggtctttgagaaggtgggaggtgacaccgagctgagaatgaaatgggggaagaaagcagccaagtcatctttaggtagggtgttcccgggaagccaggctggaacaagctcaggaaggagtttggcatgagaaagaccagtgtggctggagcagataagggtgaggagtgggggcagcagtggggagtccagatggagagggctttgtagatcagggtaaggagtttggattttattcgaggtgcagtgggaaacttcatggaattttaaaaagggaagcagcatgatctgattggaatttcttttttattttattttattttatttttttttttgagacagagtttcgctctgtggcccaggctggagagcagtggcacgatctcggctcactgcaagcgccacctcctgggttcacgccattctcctgcctcagcctcccgagtagctgggactacaggtgcctgccgccacaccaggctaattttttccatgttagccaggatggtcttgatctcctgaccttgtgatccggccgccttggcctcccaaagtgctgggattacaggcgtgagccaccgtgcccagccaatctgattggaatttttaagaaactactctggctcttagggcaaggaagggggaagggacagtcaagaaccagaggaagaagagagacaagtgagatcctgttaagattaatccaagtgagagatgaaagtggtttggaataggatgagggagtagagatagagaaaagtggataaattctggatgtgttttgaacacgctagaaggtaaagtgtagagcatgaggggaaaagaagaaccatgttaagttgaggaagtatggatgcaaagcatgtttttatgggggatacgtggatttagaattaagaattttgtttaggtcatgttgagtttaggatgttaagcttgagatgaaatgattgctatttaataatatctgcccatcagactttaaaaggaaagcgaggaggatcaagaggaggcaaagaagggagggaagtttcttgaggatagtgatatatggcacttcagctctcttgagaactgattctaagacaaatccccctgttaaaagccttccttcatgtagccattttcctctcaaccttaatcaacttcataacttcatttatatatccattcatttatttaagaagtacttagctctttttttccccacaagtatatccaatgtgtatctttatttgtaatggaagataaaaaatattggggagtaaaaaacaggtctgggccgggcacggtggctcatgcccataatcccagcactttgggaggctgaggtgggtgggtcacctgaggtcaggagtttgagaccagcctgaccaacatggtgaaacctcacctctactaaaaatacaaaaaaaaattggccaggcctgatggcaagcacccgtagtcccagctactcaggaggctgaggcaggagaatcgcttgaaccagggaggcggaggttgcagtgagccgagattgcatcagtgcactccagcctggtgacagagtgagaccctgtctcaaaacaaaacaacaacaacaacaaaaaaaaaacaggtcttatattaagggggataaagatagctatatcaatacaatggaatattatatagatttgtacatattacagcatacaagtacaagtaattataaaatgtaaaagcatggaaaatgcatggctaaatgtcaagaggatagcaacatattaatttatagatatacatttaacatctaatttcaacaattaaaaatgtatatttagcagggggtggtcatgtgcatctgtagccccagctactcaggaagctgaggtgggaggatcacctgagcctgggaggttgaagctgcagtgagccggccgggcacggtgtctcacgcctgtaatcccagcactttgggaggccgaggcgggcagaggtcaggagatcaagaccatcctggtcaacatggtgaaaccccgtctctactaaaaatacaaaaattagctgggcgtggtggtgcacacttgtaatcccagctacttgggaggctgaagcaggaaaatcacttgaacctgggaggcgaaggttgcagggaggcgaaggttgcagtgagccgagatcgcgccactgcactccagcctgagcaacagagtgagtctccatctcaaaaaaaaaaaaaaaaaaaaagctgcagtgagccatgattgcaccactgtacgttagcctgggtgataaagtgagaccatgtctctcaataaataaataaatatttaaaaatataaaaatgtaaggccgggcgtggtggctcaaacctataatcccagcactttgggagaccgagtcaggcggatcatcgaggtcaggagttcgagaccagtctggccaacatggtgaaacctcgtctctactaaaagtacaaaaattagtcaggcatggccgggcgcggtggctcacgcctataatcccagcactttgggaggccgaggcaggtagatcacgagggcaggagatcgagaccatcctggctaatacggtgaaaccccgtctctactaaaaatacaaaaaattagccgggcgtggtggccggcgcctgtagtcccagctactcgggaggctgaggcaggagaatggtgtgaacccaggaggcggagtttgcagtgagccgagatcgcgccactgcattccagcctgggtgatagagcgagactctgtctcaaaaaaaaaaaaaaattagtcagacatggtggtgcatgcctgttgttccagctacttaggaggctgaggcaggagactcgcttgaacctgggagatggagactgcagtgagccaagatcgtgccactgcactccagcctgggcgacagcaaaacactgtctcaaaaataaataaataaaataaaataaaaataaataaaaatgtatacttagtcagaggtggtgtcatgtgcctgtggtcccagctactcaggaggccgagacaggaggattgcttgagcccaggatttgaggtcagcctgggcaacacagtgagatcctatctctttaaaaaaaaaaaagatatacctgttagtggaaatgtaaaaaaaatggaaatagtcatattgtaatggaattataaactttgtttttaagatggaattttgctctgtcgcccaggctggagggcagtggcatgatctgggctcactgcaacctccgcctcctgggttcaagtgattcttgtgcctcagcctcccaagtagctgggactacaggcatgtgccaccgtgcctggctaatttttgtatttttagtagagacaaggtttcaccatattggccaggctgatctcgaactcatgacctcaggcaatctgcctgccttggcctcccaaagtgctgggattacaggtgtgagccattgcgcccggccacaattaaaagcattttgttattatttccttaatattgtgatctttatctttccaatgaacatttgaaaattctcagacaacacactaggttttcattagaggtttttttaccgagcactttttgtgtgctaggtaccttgaggacatgatctctaagccactgtctcttaaaccttagcttttattcttcttgactgtgttattcaacttgaattcaaaagataacattcaatcggctgggcgcagtggcttacgtctaatcctggcactttgggaggccgaggcgggtggattgcctgagctcaggagtttgagaccagcctgggcaacacagtgaaaccctgtctctactaaaatacaaaaaattagctgggcatggtggcacgcgcctgtaatcccatctactcgggaggctgaggcagaagaattgctagaacccgggaggcagaggttgcagtgagccgagatcgcgccactgcactccagccagggcgacggagtgagactccatctcttaaagaaagaaacaaaaaagataaaattcagaccgccaagactacatctgccccacctgcacagagcctcgccctcgccactccacagccggtccgcatgtgccgccagctcaccagggtgatatcactgggctccagcaagggcaaggccagcttcgcaggtgacgatgccccgtaggccgccttcccctccatcttggggcgcccgcgacaccagggcatgatggtgggcatgggccagaaggactccaatgtgggcgatgaggcccagagcaagagaggcatcctgaccctgaagtaccccatctagcacggcatggtcatctactg

SEQ ID NO: 96865 - DNA, 38422 bp, Homo sapiens
gagatcaccttggcaagccaacctctaataagggtggtaagatgggctctataaagattccagtctcagctgggcgcagcagctcacgcctgtaaccccagcactttgggaggccgaggtgggacaattgcttgagcccaagaattcaagaccagcctgggcaacatagatcccatatctacaaaaaaaagaaaaaaaagaaaattagctgggcatggtcatgcacacctgtagtcccagctactcaggaggttgaggtgggaggattacctgagtccaggaggttgagactgcagtgagctctgatggtgccactgcactctagcctgagtgacagagcaagatcttgtctcaaaaaaaaaaaaaaaaaaaaaaaaaaaatcagccacaacctcacttagaccacctgagtctcagcctgacgtctctgttctgcgtcctgtggctcagtcggggaggtgcctttgctgggccggagcatcttgcagtcggtctccttctttttcgcagtctgtactctggtggcttccagtggaaaaggcattttggaggcaggtaagggctgattccgctacctcattttctacccctgcttgactcttattctccaggcccagcctcctctctacccctcgtacatccaggaacactgagtttcaaagaaggataggggaatatcagggaaagcgctcagcaggcctgtttcacctgcccgaatcctgtttcctgttacccatccatttctcccttcagcctcctgtagtctcttttttctgactccgaccactggtcactcacccggctctcttccagctctcttgctccatctagtggtaaaagctgaacgcgggcgccctaaacctagcctgcctccgacttaatgcgctcccggaagcctgtctcacttaatcctggctgtcagcctgcaggtcctggctctggcatccgagagagactggagcacccagtgttacacgtgagctggaatgacgcccgtgcctactgtgcttggcggggaaaacgactgcccacggaggaagagtgggagtttgccgcccgagggggcttgaagggtatccagatgataaggcgattttcctttattcttctccccatcctgcccagcatgaggggctttaaagggtggaaaggggctgggcgcggtggcttatgcctgtaatcccaacactttgggaggctggggcaggaggatcgcttgaggccaggagtaaaagactagcctgggcaatatagggagaccctgtctctccgaaaaatacaaaaatgagctgggcctggtggcatgtgcctgtagtcccagctactcaggaggctgaggtgggaagatcctttgagcctaggagttcaaagctgcggcgagctatgatcgcaccactgctgtctggcctgagtgacagaacaagaccctgtctcaaaagaaaaagcggggggatggggcaggaagggtctgtgttccctagagcagtgcttcttaagctatctgtggtggaggaccagtgttttttttttttttttaatttctagtccatctcagactgatataaaataccataaaaattaataactggaaaattgaaagaacagacataaaatattttattggaaattccacagacatgttacatttcaataaatataactagagcaacatagcataaggaaaaagaattaccaagactacacacttctgcctctggggtacagagattaatgttaagagtcactgtttgcggccgggcgcagtggctcacgcctgtaatcaaagcactttgggaggccgaggtgggtggatcacgaggtcaggaggttgagaccatcctggctaacacagtgaaaccccgtctctactaaaaatacaaaaaaaaattagctgggcttggtggcgggcgcctgtagtcccagctacttgggaggctgaggcaggggaatggcgtgaacctggcaggtggaggttgcagtgagccgagatcacgccactgcactccagcctgggcgacagagtaagactccgtctcaaaaaaaaaaaaaaagaatcactgtttgctcctaactcggtcatttgtcattctgcaatcctaattacacaaaaagttaggacagcaaaaagcaactccgcacattaaacccctctacacaatctttcagtgaacaccaggtacatcagtgatcaaagttttttgttttttgttttttgttttgagacagtctagctctgtcgcccaaggctggagtacagtggcacgatctcagctccctgcaacctccgcctcccgggttcaagggattctcctgcctcagcctccctagtacctgggattacaggcacctgccaccatgcccggctatttttttttttttttgagacagagtgtcgctgtgtcgcccaggctggagtatggtggcgcgatcgcggctcactgcaagctccgcctcccgggttcacgccattctcctgcctcagcctcccaagtagctgggactacaggcgcccgccacctcgcccggctaattttttgtatttttagtagagacggggtttcaccgtgttagccaggatgatctcgatctcctgacctcctgatccgtctgccttggcctcccaaagtgctgggattacaggcgtgagccaccatgccctgcataatttttgtatttttagtagagacaggatttcactgtgttggccaggctggtctcgaacccctgacctcgtgatccatctgcctcggtctcccaaagtgctgggattacaagtgtgagccaccgcgaccagccagtgatcgaagtttttaatatgacctgtgaggttgcctctggctcattcatttatgcaatctaagtccaatttcaagtttctcgatttctgtacttttctcaacatgaactgataacagatgctttataaactggctcaggtcccagaaccatgcttaggattacattgccctggagcacatgaggaggccagggccctctaatgcagttcagcgagtggagaggatgggcatggcaaataaaagcaggtcattcactcttttttctcatcaccctctaacttccttttgattccctcactctttctgtgttcttttttccttccctaattcttcacctccccctcctctgctgcctccttgctctcctcgcaggtcaagtttacccatgggggaactggttccagccaaaccgcaccaacctgtggcaggtaagacctacgttcctcctttcaccaagcattgacagagacctgctggaggctgggcactgtgttgttaggccgcggcatccagaaggcttgggttctaatgcaactgatgactcataagctggtaaagcaaaagacaatgggtcataagtgctttctttttttttttttttttgagacagagtctctctctgttgccccacgctggagtgcagtgagctaccactgtactctagccttggcgacagaacgagaccctgcctcaaaaaaaaaaaagtgaataaaaaataaaactaaaataagcaaataaaaaagcactgtcctgagaaggccagcaggaataggctgcagtgctcaggcatgagacatgggggcaggatgcagaggatcctgtcttcttgaggcactgtggcatgtggggttccaggcagagggcaggatgttgctgagagtggagaagtcaggtgtgggctgggcttgacctggagccctgtgggtacaggggaaacactcttcctaatccagcagtgggggtcaccctggggatgtaaggtgatgggtttgggagctctagataggaatcttaggtcaccgccccgtgcccttccccttccccagatgcaacagcaagacgaccttggttttcctctggataggcatgaggacctgctttgggacaggtggtaaatcctttacccttcctttctcccatcagggaaagttccccaagggagacaaagctgaggatggcttccatggagtctccccagtgaatgctttccccgcccagaacaactacggtaagagctgtcttgggcttgcggctgtgcccatgaactggctgttgggaccatcatgtctgagagaggaggcagagggaagcacctcccttctgccatttggcccccaggacctcagagggtaggcggggtggtcggcgggtcccagcctggcctgacccgccggtggggctgcagggctctatgacctcctggggaacgtgtgggagtggacagcatcaccgtaccaggctgctgagcaggacatgcgcgtcctccggggggcatcctggatcgacacagctgatggctctgccaatcaccgggcccgggtcaccaccaggtaaggggcttggtcccaggcaacacggggccttgtagctgggggctgatgtctgaatcccggtcccagagtgtccctaccttcacaccaccaaccgtctgtgtgtgatgagctggtcccagcacctccctgagcctgtgcccagttgtgggtacaaaaaagaaagccagcagcacttgctatgaaaagcaaagggacccaggacaccttgtgactctcctgccagctcttggtacccagggagactgtgtgtggcatcttaattatggggtttctcctcttgtccttaccactaggtgggcaaagggagggaagtagaatgaccacaccagtaggtcattactggtggtcatggacttactgactcttcaaactggtgggcacacgaaaaatcttttttttttttgagacagagtcttgctctgttgtccaggctggagtgcagtggcacagtctcagctcactacagcctcaaactgccaggctctagcgattcttccacctcagctcctcaagtatctgggactacaggtgcagctaatttttgtagagatgagtttttgccatgctgcctaggtttgtctcatactcctggactcaagcaatcagcccgccttggcctcccagaatgctaggattacaggtgtgagccactgcacccggccgtgatattctcattgcttgtggacaggttttctctactgagctgttgtcaactgctaacatagaagttagtcactgtcttttctgctcttcagtgctgtctcttggggccactgtccctccccctactcttgcaagactccttttgtcccaaagccccttcttgtcccctttctcccaggactggcacaggctcaggacctgtcctcacaccaggcttctttccagaccatgctctccccagccctcatgctccctgatcatggccggccctgcggatgaggcaggcaagatgggtaagccctaggcctttttctcaggacgtgtctgtcctctctccccttctctgctggcaggatgggcaacactccagattcagcctcagacaacctcggtttccgctgtgctgcagacgcaggccggccgccaggggagctgtaagcagccgggtggtgacaaggagaaaagccttctagggtcactgtcattccctggccatgttgcaaacagcgcaattccaagctcgagagcttcagcctcaggaaagaacttccccttccctgtctcccatccctctgtggcaggcgcctctcaccagggcaggagaggactcagcctcctgtgttttggagaaggggcccaatgtgtgttgacgatggctgggggccaggtgtttctgttagaggccaagtattattgacacaggattgcaaacacacaaacaattggaacagagcactctgaaaggccattttttaagcattttaaaatctattctctccccctttctccctggatgattcaggaagctgacattgtttcctcaaggcagaattttcctggttctgttttctcagccagttgctgtggaaggagaatgctttctttgtggcctcatctgtggtttcgtgtccctctgaaggaaactagtttccactgtgtaacaggcagacatgtaactatttaaagcacagttcagtcctaaaagggtctgggagaaccagatgatgtactaggtgaagcattgcattgtgggaatcacaaagcaaatagtactccagaaagacaaatatcagaagcttcctattctttttttttttttttttttttttgagacagggtctttctctgttgcccaggctagagtgcastggtgatcacggctcactctagccttgaattcctgggcccaagcaattctcccacctcagcctcctgagtagctgggactacaagtgtgcaccaccatgcctggctaattttttgaatttttgtagtgatgggatctcgctctgttgcccagggtggtctcgaactcctggcctcaagcgatcctcccacctcgacctcccaaagtgctgggattacaggtgtgagccacctcgcctgggcccccttctccatatgcctccaaaaacatgtccctggagagtagcctgctcccacactgtcactggatgtcatggggccaataaaatctcctgcaattgtgtatctcagacatttgtgtctttgatcctcaccctgtgaccctaagggaagaaagcctgagtgtcagtaactctgggcctcccctaaagagaaatggagatggtggctcatctaggaagtagaggagcagggggttcctggttctcaggccacgtgtgatctctgcccacccagggcctgccccagcctgcaggtattgctgtgtggtgggaacacccacttcccttgtgcacagcctttgagaggggatcgtggcctcagttccaggggttcctggccagggccaagtgctccttctgcagaggcctgcacgcatctcacccctttgacttgtatttccatggcttcccctccccacctgccccctagccctccctgactggccagcccctcagtagtcctcctcggccagggagaggagcacggccttgggtgtgttctcgaaaagggctgcccggttctgctgctgccccttcttcacccagtggccatagattcggaaagcgtaggcgtcgatgagccggcgcagaggccggagggcataggggtctcggatgacgatctcccgggtcacaggcttcacccggcggtactggtagtagatccgcactgaagccagcacggtcagagcgatcacctgcagggccaggcggagaagctgggctgcagcccccgccctgccaggccctgcccctccagcacagggacgctctgggctygtttgccacgaagccttgggtggcttctgcggggyyttcctagtgtccccyacttcccacttggccagcatcctcagggaccgagccagtgggctgacacctgccgtctttgaagccatcacagggcagctgggaggggagggatgggtactctggaaattcacggggtgtaaggactcctgggagaggagggggcttagaggtttgcacttagggagctggcgggcctggatcaggacgcttagtaccttgaacttcccccgggggctgaagtgccgcacttcctcyaccaagtactgctggaagaaggggtgtgccaaggcctcttccgctgtrtagcggttctggggttgcaccaccaggaatcgggagacctgtgagaggaggagaggggaaccgagmatgtcaaggcaggtcccctccagcatgtcaggaaaggcagggcctccccgggcaggggcgcctggcatcgcagccctgagcccaggagccagttggcctggcctctcaccaggtccttcacggtgtccgagtaatcatcccactcgggcgagccaaactggtagttgccgctcatgatcatcctcagcatcagcatctgcttccggtgccagaagggcggggagccggccagcagcgtgtacatgatgacgccagtgctccacctggacatgcgagggcccagggccacttacccagcgccaggggcaccggcccagccctgcctacttcctcccttgcccagcctagctgggtgctcctcctttcccggygcactcacatgtccacctctttcccgtagcccgggtggtcctcattcatggagcactcgataatctcaggggccaggtaactgggggtcccrcagacctctgcaggaacagtcatcatcagggcaggtcagcagggcactcagaagaggaagtccaggctggccgcagtggctcatttctataatcctagcactttgggaggccraggcaggtggctcatctgaggccaggagttcgagaccagcctggccaacatggcraaactccatctctactaaaaatacaaaaattagctgggcgtggtggcatgtgcctgtagtcccagctactcaggaggctgagacaggagaatcgcttgaacctgggaggtggagtttgcagtgagctgagatcgccccacttcactccagcctggtgacagagtgagactctgtttcaaaaraaaaagagaggaagtccaaagagacaatggagatgatggaacagaaatggcgctsgggctgggactcccccaacatccaccaacttcagggcccagggcagggcgggatactgcccacagggccaccagctcatggcccattgcttccctggtcacttctagccatcctggcctggaacaagggtaatgggaacctgggagaggacttacctgaagaaatgcctagccctgctgggcatggtggctcacgcctgtaatcacagcactttgggaggccgaggcgggcggatcgtaaggtcaggagttcgagaccagcctgaccaacatggtgaaaccctgtctctactaaaaatacaaaaattagccgagcgttgtggcgcgtgcctgcaatcacagctactcaggaggttgaggcaggagaatcacttgaactcgggaggtggaagttgcagtgagccgagattgtgccactgcactccagcctgggcgacagagtgagactccatctcaaaaaaaaaaaaaaagaaagaaaaagaaaaaaaaatccctagcccttgaaatggtggaatttttattccagggaacaattaagttaggggagaaacccagaccatctctattctgcagatggttgattgagcacccgaggcctggacgtgggccaaggccatgttaccagacctcgcagcctctctcccggctccagctggcaggaaaagccaaagtctgtgagcttgatgttcatgttgtcatccaagagaatgttctcgggcttcaggtcccggtgcacgatgttgagtttgtgcaaggtgcagatcacctccagcagagctcgcatgatctttctagggtggggcacacacttgttactcttcctctgctcagggtcaggtaacaggcagggagacacagctcacatttcagccacactgcaagggagcagcacacacgcycagcccagacatgtgcacgccctgcctcccctgagaccccagtgcctgtggccctaagccacgtgggagggagcggagagaagggcaaagggaccctcacctggtttccttctcactcaaggtgaccttctcagtgaggtagtcaaagagctcccctctcttcatcctgtggaaacagagggttgatagctggatcggtcccaagaccaccactgcccttaccctgctcccagagagctgccttccrccctgatacctctagaagctaagtgggccactctccrtggagarccacagtctggggagaggagcyggggaagtgagaagtgttctggaagaactgggagaaaagcagaggaggctggagaggtggcccacatcaggggctcaggctctcatcaaccctccgaggaataggcctaggtttctcccctgactgaatttttcccctggaaaaatttttcccaccatttcatgaggtaggcatttcttcagctaagtcccctccccaggttcccattaccctagttccaggccaggatggctagaagtgaccagggaagcaatgggcccsgagctggtggccctgtgagcagtaccttgccctgccctgggccctgaagttggtggacttgggagagtcccagcccaagcaccatttctgttccatctccattgtatcagtgtcttcccatctgtggaagtgacagtgtggactgggatgtatcggggcctaaatgatggctggaggctgaaagaggggactatgaaccactggcccaggaccccagacccagatcagaaggacgtgagtatcccgatttttttttttttttttttttgagatggagtttttgctcatcacccaggctggagtgcaatgatgcaatctcggctcactgcaacctctgcctcccaggttcaagcaattctcctacctcagcctcccgagtagctgggattacaggtgcccactaccacacccagctaatttttgtatttttagtagagacagcgtttcatcatgttgcccaggctggtcttcaactcctgacctcaggtgatcacccgtctcagcctcccaaagtgttgggattacaggcgtgagccaccacgcctggccgagtatcccgattttttcccaggaaacaaatgggaagaatcggctgtgcaagagttgcaggagcawagtttgccaattacaggattaagaattgaggttcaatcttcttacctcctgggatgatctagaaaggactctgctagaacaatctagttataccctggagggctcctcagggcagcattaaaaatagcttcccccagcaacttcttcaaaggttaaagacatttgagctgtccccaagggctatacaggacagtgccacagagcagtcgagacagctgcagctggtgagtctggaggggtccgagaaagtcttcctctgttgcccaggctggagtgcagtggcacgatctcagctaactgcaacctctgcttcctgggttcatgccattcttgtgcctcatcctcctgagtgactgggattacagatatctgtcaccatcctgggctaacttttgtattttttgtagagatggggttttgccatgttgcccaggctggtctcgaactcccggcttcatctgatccgcctgcctcagcctcccaaagtactgggattacaggggtgaaccaccatgcctggccttaattttatatttttttgtagagatggggtctcactttgttgcccaggctggtctcaaactcctggcctcaagcaatcctcccaccacagcctcccaaagtgttgagattacaggtgtgaggcactgtgcctggcccatgataagtctggaatttgcatttcacagagcactttgtattgttcacatttgatgcttagaaataaggggctcatcttactaatcctattgatgccaaagcaggggcatgatgatggtgatgatggtggtgatggtgatgatgatattgatctttggaccacaccccagatgcaacctctaccacctgcctctctcctcaatactgctggcctccctttttccaatcccgcctcattacagtcgtccctagatagtcagtgagatcttttcaaaaggaagtcagcctgggcgcagtggctcacgcctgtaatcccagcactttgggaggccgaggcgagtggatcacttgaggtcaggagttcgagaccagactggccaacatggcaaaaccctgtctctactaaaacagtacacacataaaaaatttgctgggcatggtggtgggtgcctgtaatcccagctacttgggagactgaggcaggagaatcacttgaacccaggagacggaggttgcagtgagccgagatcgcaccactatactccagcctgggcgacaatagcaaaactctgtctcaaaaaaaaaaaaaaaagtaaatcagatcatgtcaccctcccagtcttgaccctccaaactccttactatggctaaaatgcctgcaggacctggtctttggtgctgaccgaccttacatcctgccaccctctgcttgggtcacttcctggacatgctttcctgaccactcggtctaaggaagcccctgtctcttgctaaccccttgttctactttatatatgtctacagtcatccctctttatctgcataggatatgttccaagacccccagtggatgcctgaaaccatggatagcactgaagcctatacttactatgtttttcctatatgtacatacctaagatgaagtttataagttaggcacagtcagagactaacaaccaataataaaatagaacaattatatcactatactgtgccaggcacggtggcttatgcctgtaatcccagcactttgggaggccraggtgggagaatcacgtgaggccaagagttttggggttttttttgttttgttttgtttttgtttttgagatggagtttcgctctcgtagcccaggctggagttcaacggcgtgatctcggctcacttcaacctccgcctcctgggttcaagcgattctcctgcctcagcctcccgcgtagctggggcctcagcctcccaaactgctgggattacggttgtgagccactgcgcccgcctgtagctaataattattagtattcacactatgccagtcactgtgctattatcactcccataatactgatgagaaaaccaagatttaaagaaatgatccagcccacaagtggtgaacccaggtttccaaagccggcagcctgaccccaggggctgatctgtctaaacaccgtgattgtatttggcatcctcagcgcaggagctggctgtggtctccaggcagccctggggttggggaggggacagcagtcggaggttctctcaggtgtggcttgctccagtgctgggtacttacaggtcaaacaccaagaagaagaaagtgttggtctcataagtgtccttcagctgtactgaaatggaaatggctagcttgtctcaagtagcaggggagcccaggcaggggcagccggggcacgggggtcagggaccgaggctgctgtgggctaacttcaaaagctgacasgggaatcaggagggtgctcaaagacgtcaacctgggatgtgggcaggcccagggactttattattattattattattattattattattattattattattagagacaggatctcactgtctcacccaggctggagtgtaatagtgcaatcataactcactgcagcctcaaactactgggcttgagtgatgctcctgcttcagcytcccgagtggctgggattacaggcatgcaccagcatgcctggctaattcagcccagggacatcaaacccccattcccctgcctgcatccatccctgcctgggaccccttctatcagagcagtgagggtggagctgggagccttgagcctgggtggttctagttggctgtgcggtggggccacaytccctggcttgggctgtcagggcagaatcacaggggggcaccctgccgtgtggcttggggccatcactcactgatgttggggtgccctgagaccttgcgcaggatgtccacctccttcagcgtggcttctcgcagctcccgcacctcctccgggctgaagctgcctccaccggtgacgtcgatgaccttcacggcgtactcctggctcgtgggcttgtggatgcatcgcctgaccacactgctaacgcccctgggagtgcagaggacagatggcctcggggggcccctcaccccatggggggtcccagattagaggctgcagcagagatgtcctgcccttgacagagatttacactttcccccaacttcctctgagcttttggaaatggtggatgaataaatacaggcacagacaggtgatttgcccagaactggtgagtaacaagcctgctctcaggccgtgtgactcttttttttttttttttttcctttttgagccgttcagtgctttttttttttttttttttgagacggagtctcgctctattgccaggctggagtgcagtggcacaatcttagctcactgcaacctccacctcccgggttcaagcaattctcttgcctcagcctcctgagtagctgggactacaggtacctgccaccacacagagctaatttttgtatttttactggagatggggtttcaacatgttggccaggctggtctcaaactcctgatctcaggtgatcctcctgccttggcctccctggtattgcaggaagtgctgctattgcaggcatgagccactgtgcctggycccccctttttwaaaaaaaaaatagagatggttagccagacctggtggcacatacctgttgtcccagctactagggaggctgaggtgggaggatcacttgagcctaggaggcagagatcgtagtgagtcaagatcatgccactgtactccaacctggatgacagggcaagaccctatcttaaaaaaaaaaaaaaaaagatacggggtcttgctatgttgcccaggctgatcttgaactcttggcctcaagcaatcctcccacctcagcctcccaaagtgctgggattacaggtgtgagccattgcgcctgcccctgggaactttttgctgggagaggtttctcttatctgtcctggcttcaggagggcaggaccccaaacaaagggtttctccaagtgaacagcactttggggatgaaagtggcgttagtactcggggtggagcagagctggctgtagcccacagggtctgctggagcctaggacagcacttcgtggggaaagcttgggctttacctgcccaggatctctttgggctcataattctcatagaagtcctgtgcagaatgagagtccggcagtgcctcgtcccgggtcatgctcagatcttcagtgagggaactctgggtggctctgagaggggaaaagaaagaagctgtcagccttcctgacccaggggctgttctccttggggtctggaactgtttctcactcatccttacatctcctggcactacactggcctatagtgaatgttccaaataaatgtttgtgaattgaggccgttcgtggtggctcacacctataatcccagactttgggaggctgaggcagatagatcacttgaggccaggatttcgagaccagcctggccaacatggtgaaacctcatctctactatacaaaaattagccggatgtggtggcacacgcttgtagtctcagctacttgggaggctgaggcaggagaatcgcttgaacccaggaggcagaggttgcagtgagccgagatcgcatcactgccctccagcctgggcgacacagccagactccggctcaaaaaaaaaaaaatctttgtagagatggggtcatgctctgttacccatctctgtaccagagtgcagtggtacgattatagctcactgccggctcaaccacctgggctcaagcgatcctcacaccctagcctcctgagtagctaggactaaagtatcccccaggctggagtgcagtggcacaatcttggctctcagctcactgcaccctccacctcccaggttcaagcgattctcctgcctcagcctcccaagaagctggaattacaagcacctaccaccacgcctggctaattgttgtatttttattagagacagggtttcgccatgttggccaggctggtctcgaactcctgacctcaggtgatcctcccaccttggtctcccaaagtgctgggattaaaggcgtgaaacaccatgccaggccctaatatttaagttttttgtagagacggggtctccctatgttgcccaagctagtctcaaactcctggcctcaagcaatcttcccgcctcagcctcccaaagagatgggattataggcatgaaccaccactggacctggccacaatttccttttaaataggccactcctgtagcctctccttatctccccttgttgtgactgtgttctctgaaaacacacccccttctaggacaggcttcctgcactccatcccactgctccttcctcatgtttttttgtttgtttgtttttgtttttggtgttttttgtggagacggagtctcagtccgtcacccaggctgaagtgcagtggtgtggtcttggttcactgcaacctccacctccaaggttcaagcaattctcctgcctcagcctccagaatagctgggattacagacatgcaccaccatgcctggctaatttttgtatttttagtagagatggagtttcaccatgttggccgggatggtctcaaactcctgaccgcaaatgatccacacaccttggcctcccaaagtgctgggattacaggcatgagccactgcacctggcccttcctcatgtattctatccataactgggactttcataatcactcactcactcattcattacatctccattctgcagacactgaacacccactctttgccaaccaccatgctgggtgctctgagggatggagagctgggtgggtccatcctggtccgcctctggtgtcacttgtcagtgtatgctgtcacctcccccactagattatcatctctaggatgtcctagccatctctgccccccatacccagtgcaggtgtccggcaggggctataccttgaatgtgagtcaagggttgggcaggtacccctttggctcagggtcctgctggaagaatgccccatgtcctacttaacaatggccagtgagccctgaggggtcctgctgcaggatagaggcagtasagagccaggacactcaggcctgtacacagaggcgctgagctaccccgctttgtgtcaggaacatggaggcycctaccagggaactcaactcctgcttcagatgtaggatttaggcgtggcgtgatggctcacacctgtcatcccagcactttgggaggctgaggtgggcagatcacttgaggtcaggagttcgagaccagcctgggctacatggcgagaccccatctctgcaaaaaatacaaaaattagccaggcatgatggctctcgggcctgtggtcccagctacttggaaggctgaggcaggaggatcacttgaacccaggaggtggggttgcagtgagctgagagtgcaccagtgcactccagcctaggtgacggagtgagtgagactctgtctcaaaaaataagacaaaacaggctgggcgcagtggctcatgcctgtaatcccagcactttgggaggccgaggcaggaggatcacgaggtcaggagatcgagaccatcctggctaacacggtgaaaccctgtttctactaaaaaatacaaaaaattagccgggcgtggtggcaggcacctgtagtcccagctactcaggaggctgaggcaggagaatggtgtgaacccgggaggtggagcttgcagtgagctgagatcatgccactgcactccagcctgggcaacagagtgagactccatctcaaaaaaaaaaagacaaaacaaaacaaaatcagatgcaggatttgaggaatgcagaaaaccaacagggaaaagggcagatagaaaataggcccaacctgccactcagcagtgccaaagctgcctccaaccccctttcccccactgcttctgggcctaagaaggcctggtctcacaaaggagccaatttgctgaccagccaacagcagctctggctgcctccgggattgggcaggctgttccaggaatcctggtggccccactactgggtgcctggttaccagaagaaggtttagaataacaagtcccctctgctggtgccaggcccctgggctgctcacacacaggccttctctgcctgccccatcagcaacttggcggagcccgggactgtctgtttcccataaaaacaagcccatttgctggtaagtcctaagtcctcacaatgggcacctttgcctcatcacctcccaaagctgggtagcgctagctctctcctctcccccagccctccatgagcagaaagtacacttggacccccatatgagatgccagcctaggcgcaagcctccagtccttggcacagccagcttggccaacttgtggctgcactcacctttcctggggggctgaggaggcggttatcttgccccagccccagctctgactggggccaactttgtgcctctgtctactgccccacccacccctcacacctttcccaagacccctgtggacagggtcaccacatgggagtaggtggcccagtcctttttttagacagaatctcgctctgtcgcccaggctggagtgcagtggtgagatctcagctcactgcaacttctgctttccgggttcaagcgattctcttgcctcagcctcctgagtagctaggactacaggcacgagccatcatacccagctaatttttgtatttttagtagatatggggtttcaccatgttggccaggctggtcttgaactcctgacctcaagtgaccctcccaccttggcctcccaaagtgctgggattataggcgtgagccatcgcgcctgcctggcctggtactttttggcacataacttccctcccctgaactctgagtccaaaaaccagatcagtcccggggacctcttttctgtagaaaattcctgcagatggaggtttcaagggtcaatgctgccactctccctggtccatccgccttcagaaaagagacatggatggaatggatgtgggggtttctatcttctccacccccagtcctccccgctccctgcctatcacctggcttttgtccatcactgggctagctactcacggttaagtgcttgcaggctcttgaaggagcttgacaagaatcccaaagccccccggggagaggggaccacagagggctgaagccgtgtcccgagcagacacttggaagatatcatctgctgttgttttgggttttgctatttgatgaccggaggctaacgtgccaaaaataaatcacaactgcaaacccgggaggcaggccaaggctccgcagggacagggcatggagcccagtctccgggcggraggtgggggacctctggtggagggtgagggaagcttgtgtggcctgagaccaggccagacaggatgtaagagtgatcagtctcccctctggagctcccttggcctccaggcccagagaacgtaaatccagccttgtgcggagggcacttgcttctctgggagcaattttgatttccacgtatgctgagagcactgccctggagrctttctcratgcatgactgcagcagctgactgcccgggctgtcgcagggacagtgtgcatgatcaccctacataatgcagacctgtacaggttagggaggccgggtgcagtggctcacacccagcgctttgggagaccgaggcrggaggattgtttaagtccaagagtttgacagcagcctgggcaacaaagtgagaccctggctctacaaaaaaattaaaaaattagccaggtgtagtggcacacacctgtggtcccagctactcaagaggcttagtggggaggatcacttgagcctgggaggtcaaggcttcagtgagctatgatcatgccactgcactccagcctgagcaacagagactcagtctgaatcaatcaatcaatcaataagggaccttcccctgcaggaatccacctctgatctaccctccataatttcatctaaaaagccttcctttaaggccaggcacggtggctcatgcctgtaatcccagcactttgggaggccaaggcgggtggatcacctgaagtcaggagttcgagactagcctggacaacatgatgaaaccctatctctacgaagaatacaaaaattagccagccgtggtagtgcacacctgtaatcccagctactcaggaggctgagacaggagaatcacttaaacctggaaagcggaagttgcagtgagccgaagtcatgccactgcactccagccaggggtgacaaagggagaccctgtctcaaaacaaaaaaaccttcctttaatcttacatcagatgtgtgggtttttaaaattatttatgtgttttatttattttattttattgagacggagtcttgctctgttgcctgggctggagggcagtggcatgatctcggctcactgcaacctctgcctcccatgttcaagcggttctcctgcctcagcctcccaagtagctgggattacaggtgcccgccaccacaccgagcaatttttgtatttttagtacagatggggtttcgttcgccatgttggccaggctggtctcgaattcctgacctcaggtgatctgcccgccttggcctcccaaattgctgagactacaggcgtgagccaccacacccggcctattttatttttttgagatggagtcttgctctgttgcccaggctggagtgcagtggtgtgatcttggcacactgcaacctctgcctctggggttcaagcgattctcctgcctcagcctcccgagtagctgggattataggcgcaagccaccatgcccggctattttttgtatttctttctttctttctttttttttttgaaacagagttttgctcttgttgcccaggctggagtgcaatggcgtgatcttggctcactgcaacatccgcctcccgggttcaagcaattcccctgcctcagcctcccaagtagctgggattacaggcatgtgccaccacacctggctaattttgtatttttagtagagacggggtttctccatgttggtcaggctggtctcgaactcctgacctcaggtgatccgcctgcctcgacctcccaaagtgctgggattacaggcgtgagccaccgtgcctggcccttttttttgggggatggagtctcactcttgttgcccaggctggagtgcaatggcacagtctcggctcactgcaacctccgcctcccaggttcaagcgattctcctgcctcagcctcctgagtacctgggattacagatgcttgccaccacacctggctaatttttgtatttctagtaaagacaggatttcaccatgctgaccaggctggtctcaaactcctgacctcagatgatccactcgccttggcctcccaaagtgttgggattacaggcgtgagccaccatgcctggccttttatttttattattttattttatttatttatttattttatttatttatttttatgagacagagtcttgctctgtcacccaggctggagtgcagtggcacggtctcggttcactgcaacctccgcctcccaggttcaaatgattctcctgctttagcctcctgagtagctgggattacaggcacgcaccaccacgccaggctaatttttgtatttttagtagagacggggtttcaccattttggccaggctggtcttgaattcctgacttcgtgatccgcctgcctcagcctcccaaagtgctgggattacaggcgtgagccaccacacctggcctattttatttttttgagatggagtcttgctctgttgcccaggctggactgcagtggtgccatcttggctcactgcaacctccgcctctggggttcaagtgattctcctgcctcagcgtcccgagtagctgggattacaggcgcaagccaccatgcccggctaatttttgtatttctttttttttttttttttttttgagatggagtctcactcttgtcgcccaggctggagtgcaacagtgcgatcttggctcactgcaacctctgcctcccgggttcaagcgattctcctgcctcagcctcccgagtagctgggattacaggcgcaagccaccatgcccggctaatttttgtatttctttcttttttttttttttgagatggagtctcactcttgtcacctaggctggagtgcaacggtgcgatcttggctcactgcaacctctgcctcccgggttcaagcgattctcctgcctcagcctcttgagtacctgggattatagatgcctgccaccatgcccggctaatttttgtatttgtagtagagacagggtttcaccatattgaacaggctggyctcgaactcctgacctcaggtgatctgctcgcctcagcctcccaaagtgctgggattacaggcgtgagccaccatgcccagccttttacttttattattttatttatgtatttattgaaacagagtctcactctgtcactcaggctggagtgcagtagcgcaatctcggctcactgcaacctctgcctcccgggttcaagcgattctcctgcctcagccacctgagtagctgggactataggcacgtgccaccacgcccagctgatttttgtttttagtagagacgaggtttcaccatgttggtcaggctggtcttgaacccctgacctcatgatccgcctgccttggcctcccaaagtgctcggattacaggtgtgagccaccacccccagccctatttttatttttttaaagaactttccttacccatttcattttcagcctgcagtttctattgtgaggagtttcatatgccaggaaaaacgtggtctctcggtgcatgtgacttcctgccagggtcctcatcagtatgagtctaccttacagggagttgacaaaactggcagcactgtgcagcatgcaggcacacagtggacacttagttttcattgttccctctcattctaaaactacctttttccaaactcctaatattccaaattgatggcagggggtgaacgtaggggagacagtgctttacccatgatctgagcccacaaatatgtttttaatttttttctttttttttttttttgaggtggagtctccctctgttgccagggtggagtgcagtggtgagatcttgtctcactgcaacctccgcctcccaagttcaagtgattcccctgcctcagcctcccgagtagttggcactacaggcgcgtgccatggcacctggctgtttttaattttgtatgtatttttaatttttaaaatagagatgggagctgcgtgcggtggctcacatctgcaatcccagcacttcgggaggctgaggtgggcggatcacctgaggtcaggagttcgaggccagyctggccaacatggtgaaaccacatctctactaaaaatacaaaaattaggctgggcgtggtggctcacgcctgtaatcccagcactttgggaggccgaggcaggtggatcacgaggtcaggatatcgagacaatcctggctaacatggtgaaaccccgtctctactgaaaatrcaaaaagtagccgggcatggtggcagatgcctgtagtcccagctactcaggaggctgagtcaggagaatggcgtgaacccaggaggtgaagcttgcagtgagccgagattgcgccactgcactccagcctgggcaatacagygagactccgtctcaagaaacaaacaaacaaacaaacaaaacaaaaattagtcyggcgtggtggtgggtgcctgtagtcccaggtactctggacgttgaagcaggagaattgcttgaacccgggaggcagaggttgcagtgagccgagatcgtgccactgcactccagcctgggtgacagagcgagactctgcctcaaaaaaaataaaaaataaaataacaagagataggggtctcacgatgttgcctagactggtctcaaaattctgggcttaagcaatsctcctgttttggtcctcccaaagtgctgggattacaggtgtgagaaaccacrcttgaccacagatacctaattgatacacattttacaaagcacttcatacagtttcacttggacaacgaaaccctggtattaagccaattttagagagattgtgacttggtcaaggttgccaagtaggtgagtcagagagcctagattaaccccagatgttgtgggcgccagcagttccttataatgctgaccatctggctgggtgcggtggctcacatctgtaatcccagcattttgggaggctgaggtgggcggatcatgaggtcaggagattgagaccatcctgtccaacatggtgaaaccgtccctactaaaaatayaaaaattaactgggcacagtggcacatgcctgtaatcccaactactcaggaggctgaggcaggtgaattgtttgaacccgggaggcactgcagtgagccgagatcacaccactgaactccagcctggtgacagagctagactcggtctcaataataataataataataataatgctagactctgtcccaaaaataaaaaaataataataataatgctgaccatctatttctttcactttggggaaaatttttgttgaattgtttacatacaaaagagctgaaaaatacttcagggaatgagtgctaagcataaaarcctccaacttactgaaatgcaacacattgaaacacaaattctgcaaggttttaaatacctggaactctttaacttactgttttctcttttttttttttttttgctttttatacagggtcttgctctgttgcccaggctgcagtgcagtggcgcaaacatggctcactacagccttgacctcttggactcaagagatcctctcacctcaggctcctgaatagctgagaccaaaagcgggcaacaccatggccagcaattgttttttctttttttttgagacagagtttcactcttgtagcccaggctggagtgcaatggcmcaatcttggcccactgtaacctctgcctcccgggttcaagcgattctcctgcctcagcctcctgagtagctaggattacaggcgtacgtcaccacacctggctaatttatttttatttttagtagagatggggtttcaccatgttagccaggctggtcttgaactcctgacctcaggttatctacccacctcggcctcccaaagtgctgggatcacaggcatgagccactgtgccaggtctaatttgctttttttttttttttttttttttgagagaagagtctcactstgtcacccaggctggagtgtagtagcacgatcctggctcactgcatccagggttcaagcaattctccttgcctcagcctgagtagctgagactacaagtgtgtgccaccaggcctggctaatttttttttttttttttttttgagacagtcctgctctgttgcccaggctggagtgcagtggcacaatctcatctcactgcaacctctgcttcccaggttcaatcaattcccctgcctcagcctcccaagtagytgggattacaggcacccaccamcatgccttgctaatttttgtgtttttagtagagatgagatttcaccatgttagctaggctggtctcaaactcctgaactcaggtgatccgccctcctcagcctcccarcgtgctgggattacaggcatgagccactgcgccctgcctaatttaccattaaaaacctattttctccctcacatttctaagctacagatttgactcttgctggtttctaaggtatcttccaagattggttccaaggctcctatggataacaaaaatccacggatgctcacatcccttacataaaatgccacattatttgcatataacctatgcatttcctgctgtatactttaaatcatctctagattacttataatacctagtataacataaacaggatgtaaagttgttacactgtattgtttagggaatgacaaggaaaatagtctacatgtttcctacaaaaatgaccatgaatttttccaaaaaattattttgagacagggtctcactctgggctggagttcagtggtgtgatcatagatcactgcaaccttgaactgggcttctgtgatcccacctcggcctccctagtggctgggactacaggtgcatgctactgcacctggctgakttattttttgtagggatctcactttattgcacagacttcaaatattctcaatcctcgattggctgaatccatggacaccaaactcagggaattggagcgccaactggacaatcaatgaatgcatcacaaaatcctttctgactttagggcaaaaggccagtgcacctagaggattattccacacctttctccttgtagcaatgactcctaccagggagtaggcctggccagtcacgcttacatttcgtcatttttctttgattcaatttatttgaatcaccactacacctggacacgagggacatctgagcattaacactacagactcacagaggtcccgagcctccaggaaaattagcaaaagtgtcttctataaacccaggagggaatatgccrgggaactggccaggagtgaactgtgctgagaccctctttctgaaagggagcctctttcaggaactgaatgtttaggcactccaggaacacagctgataggaggcgagacagcaactggctaattccctcaatcaccagcatttcactcacctggcagtgatgcagggctctgaaactcagaaaaaaaatcagaaaacagaacctacggaggccaggtgtggtggctcatgcctacaatcccagcactttgggatgccgaggctgggggatcacctgaggtcaggagttctataccagcctgatcaacatagtgaaaccatctctgctgctcacttcaaaaaaaaaaaaaaaagacctgctgatccttttgtagttaagtgtgatgacagggttttcacactcatgaagtgtgcctccctcaaaactggttgcattgacacactacccatctgacatgaaaaaagtggcctactccaaattgaattccatccccttaaagttcttccctagcacggagtgggggatggcagttagcctgagtgttttaggaagaggaggctacaacaccttaaacagagcaaaagcaccttcaggggaactgcatatattaagaatggytttttatcttcaatcaggggcgtccaagggagagaatgcagtcatgggtttagttacagtttatggttaggccagtaaaaccccttcctcatcgctcttttccacttatcactagagacaaactataactccaggctgctaaaagcctaaagcaaaagaaaacagaacaaaaggtgggttgcacaagcttgcttggaaacagtagaggaatagtgatacgcagtgctgacctagccacagggaacccaccccaaatagacctattcctgtttcctttatcattcacctgattaaaacaatgtattttttttttttttttgagacagagtcttgctctgtcagtgagtgcagtggcatggtctcagttcactgcaacctccacctcctgggttcaagtgattctcccgcctcagtctcccaagtagctgggattacaggcacatgccagcacgcacagctttaaacaatattttaagcagagtttcctgctactgctcagcttacataactccagacccacagcagcyagaacctttgaattgagcagcatgttatgtttgcaagtgagctactccttatataacccctcagggagctgtcagatctgggaggatgctaatttcataaccagagactatagactaaatgaaccataccttggaagaaaatgactttattctaattaactcacaaagaataaaatcataacataacagctagtttaaggaggccacacaaacatttgcccagtcccagattctacagagtagggacacccccacttccatttcaattctgaagcaaggaagcyaggaatgacaggagaggtttaactgatggttacactttataccctcactatcaattctatttttatactaaattaacttagttatgagagctgattttccatctctccaggttgaacttcttcattaggccaatcctgcaaacagaaaagattaagttagaagaatgctagcttcgtatactcaataaaacagaagccttccaaattatgaaagcagcgacaaaaggccaaggctatgggttttttgttttttgtttttttttgataaaaaatagagatgaggtcttgctatgttgcccaggctggtctcgaactcctggactcaagcaatcctcccaccttggccttccagagtgctgggttccaggaaggttatggttttgtttgtaagctactgaaggcatcctacaactaacaagacaccctgaatctccggagttcccctgaggaacttaattaactcctttcactcaatgaggtacagataccaggtatcagtctttttgtctattcctggattttggtgaaaacagaatctaatcttatattcgcagccttaaggttagaaggtcacttacatccagtaatcacagtaagatctggcatactgatttataccttcttttttttttttttcttttaaatttgagacagtgtctcccactggagacacccagttgcccaggctggaatgcagtggcaggatcttggctcactgcaacctccgcctcccgggttcaagcaattctcctgcctcagcctcctgagtagctgggattacaggtgcctgccaccacacccagctaattttttgtatttttagtacagatggggttttgccatgttggccaggctggcctcaaactcctgacatcaggtgatccacccgtcttggcctcccaaagtgctgggattacaagcgtgagccactgtgcctggcctataccttctaaaggaagaaaattcagaaaattactcataaaaatgactagaaacctccggcccagttgttaggagttaattctagagaaatttcaacaaagtcttctctaatttattaaacacagattaccctaagttctacaggatccaggaattccactgtgaattaagcagatgtaaattggacaaattacctaccgtttgcaagtcggcactgtttcagcacctcattgaaaccctcacagagcttgatgtcaccctggttctgggcacactccagaaactgtttgatctcatagaggcaaggctgctgctgctgtgctggctgggttccctgaggctcctgcaaaggcaaaacattcaacattgctgagaaagaaaatcatacttatgcctagacaatgaagagtatccatcctctttgaggttaatggaaaatggaactagcaccagatgctaattaaagtttccaactattaacatgggaagtgaaaacatttaaatcttcatttacttaaaaaatattttaggccaaacatggtggctcacgcctgtaattccaacactttgggaagccgagaagggtgaatcacttgaggtcaggcgtttgagaccagcctggccaatatggtgaaaccccgtccctactaaaaatacaaaaattagccaggcgtggtagcaggcacctgtaatcccagctactcgggaggctgaggcaggagaatcgcttgaacccgggcggtggagcctggataacagagcgagactccacctccaaaaaagaagaatttaaataaatatttttagtaaagacagggttgcgctatgttgcccagcctggtctcaaacttctgggttcaagcaatcccttcacttcagcctcccaatgtgctgggattataggcatgagcctccgttcccagccaaaagtgaaaatatttaaaagctgaaagccaacagttttaacaaaattccaattacaaccagaaagattcctaaataaagatgcaaataaagtggaattattatcttgttatcaagactaaatggtttactgaagcttcagggaggaaaaatggtactattatagaaaactggatggagcagtttcaagcacaccggaaatayaagagtatacacacctatgctcattagactagaaagcccacacacatcagaaagatgggtaatggcaaacatcacgtaaaagaacacacagctatgcgagatttttgatttgttaactaagatcaagacaagattagtaggaagtgtcactgggatgaaatattcaaagggaaaagtggttgttttacagtgagtcaagtggactgttgtaagtctcctccttgggaagaaacacaatttgtacagtacttgttggtgctggcctaaggcagtaactcaacggccaaatgtggctttaaaacccattgtctattaacagcacagtgggttctaaaatcaaagacaattcctacacttaaggaacttacaaacgtctggcttttctcataaaatccacccatggaagggaaatgctgcctaaattcccacctggtaagtgatgtcaggcctcgcaggctcagcattacttcctccactgaagcccccagtaatggcgtgacccaatgtgtgccccacagcagagcccacagccacgccagctgcagtggttgccatctgggccatcagacctggctgccggggcgcagcagcagaagagccaactgcagatgggggtgccgctgctggtggctgagcractggtgctggcctgggtgcagctctcatctgaggggcccggctgtgaaagaaaagaaaaaaacatcaagttcccaattccaaccagttttggaaattgtcaacttaaaataacttacatattaaaatggacctcaagattttcatttcaaattatttacatcattttctctcttcaatttttttttttttgagatggagcttcgctcttgttgcccaggctggagtgcaatggygcaatctcagctcactgcaacctccacctcccagactcaagcgattctcttgcctcagccttccgagtagctgggattacaggcacccgcgaccacctccggctaattttttgtatttttagttgagacgaggtttcactatggtgaccatggctggtctccagctcctgacctcaggtgatccacccgcctcggactcccaaagtgctgggattacaggtgtgaaccaccacgcacggcctaattttttttttttttttgagacagggcctcactctgatgcccagactggagtgcagtgtcacgatccaatctcactgcaacctctgcctcctgggttcaaccgattcttctgcctccgcttcccaagtagctgggattacaggcgcgcaccaccacacctagctaatttttgtatttctagtagagacggagtttcaccatgttggccaggctcgtctcgaactcctgacctcaagtgatccacccgcctcgacctcccaaagtgttgggattacaggcatgagccaccacgcccggccactttaatcttttcttataatagtaatagcctaggacatactagttttttctgcttctttgcaacaatttccatgtattcggatagcccacagtatctttaaagacatatccaacatgtcataagaaatacagactactaaaagttagaaagattcttacaggattcattcattcaagtattaggtaactacaaggcgctggtaatgtaactgtgaacaagagacaaaaatctctgcattcatggagtttacattttattgacggatcaaataattaacataggctgcggagtggtggctcttgcctgtaatcccagtgattagggaagtggaggcgaaaggatcatttgaggccaggactttgagaccagccagggccacataatgagaccctgtctctgctaaaatataaaatagaataaagtcgccaagtgtggtgcacaggtggcgcatgcctgtagtcccagttactctggaggctgacgtggtagaatagcttgagcycaggaagtcaaggctgcagttagccatrattacgtcactgcactacagcctgagttagactctgactcaaaatataaataaataaacattctaattaggacttaaagatggtcaactggggaaataatctagtccaattccttcattttacacattacaaaacaagactggccaaagtgactcgtctgaactattataccaaaagcaacttcaactattcstcatctgttcaacgttcagatgctttcaacaatttcgagaccccttctcaaataacaaaagactaattatgtcctgcacgtatttaaaaatcttcatatgtatcacgctccctctgaccatttccggattatttccttgggtgctcttttccccgaaatcaagctaggtcaaaatttatgccttcctaccacctggccataacgttatgcctttcccgttgtttggataggaagctttttccgtaagtgaattccctccccacactcccctaacataggctttacgttcaatctacccccgcctggcagaggcgagcccacgccgcagccgaccttagttcrcccccgcccgcggcctccctctgcgtcattgccccagtagagtccggacggccgcgctttggtctcaaaccctgcgatggtctcacctggccggaggggccatgcgggaggtgcggcttcggcttccacgcggcatcctaggtamgcgacggctaggcctccggacgtgkgacaaccaccgaagagctaagcgacttctgmggagaccggaagatgggaggcggggctggcctcaacgcgcaaccaaccagcacacaggcagagaacttccgttctccgtcgtctccgcaggcctgaagttcattggaagagcaggacgtcacggggacgcctcgtccttcgcggtcaacgccctgaacttggcgccaggatctttaaaacccggaagttcctgtggttcatccgcgaaccttgtcctccggtcctcgcatcagagcacttagcattttgcttccctagggcagctggcctgtcgctccgtccttcaaacatttgtattaaatccaaccttaagagtgactcacatctctggctggattgccaggggaccttgggcagatttcttagcctttctgagcattcagttataagggcaaatatttttggaggcacagtgtggacgcgtagtatgaactgaatgaaagaaatcggtttcgtcaaaaataaacagagttgaattagttgtatttggtatttctctttcttgtctgtggatccagtcagcaaaagttaaattcaggcagcaataatgttttacatttatgtattactatatattttcagctccttttcatatgtattatagaatttgtgtccagaattgggacagtaaccatacactggtaaattcaacaaaaatttactgtctaactgggttatggagatactgcaccaaatcagataagattctaccttcacgaagttaagtttcaaggaggggagacacaaacgcctacgtaaatcaggtggtggtgacatgaaaagagaggaaggagactggaaattagaggttaggcggggcgggggggagtcatttgaacggagcccttgaagaggtggggaagcaagccatgtgtttatgaagataagaacactacaggaagagagaacagcaattgcaaaggccccaaggatctgtgctttagtgatacttggtgtgaaatgctttttttttttttttgagacggagtctggctctgtcgcccaggctggagtgcagtggcgcgttctcagctcactgcagcctccgcctcccggattcaagcgattctcctgcctcagccttccgagtagttgggattacaggcgcacgtcaacccgcctggctaattttttattttagtagaaacagggtttcgccatgttggtcaggctggtcttgagctcttgacctcaggtgatccatctacctcggcctgcaagggctgggattacaggcataagccaccaggcccagcctgaaatgctttcaacagttacattaaacatcgctaaaataaggggaaatttggctagtggcatttcataaggggctcatgggaaagtcccttgcggttggagtgaggtttattgaggagaggaagcacacatggaaccatttctgcttgatgtcaatcagaaatttctcccttccatcagaggaagtagagtttaaaacagccttcctgtgtcccagcaacagcagaatgtacttggaactaaagggtgaataatgtggcagctaagctatgaggatgcaaaggcaaaagaatgatataatgggctctggggatttggagggatgtgctaggtgggtaagggataaaagactacactgttgagtacggtgtacattgctcgggtgatgggtgcatcaaaacctcagaaatcaccactaaagaacttttccatgtaaccaaacaccacctgttcccccaaaagtattgaaataaaaagatttcaaacaataaaaagggtgaattatataaaaatcttttgtaaaaaacaaagctttatttttacataacttcttaaaagaatgaatgctttacaaataataagactttttacttgcttttagataattcaaaagcagagatgaagaaaagcagtcttataaaggatacattctggcacaagaagggtttagagtgaggagaactttggacagttcaagacagaaaggaatccagaccagaacaggcaccattttactcaaacgtggctaagtcattcattcctaaattgaaagactattagatgttcacacaaagttattttgtgttggtaagggattggagaaaacctaaattcctgccaatagaatattggttaaaaaaataatggcaggctgggcgtggtggctcacgcctgtaattccagcactttgggaggccgaggtgggcagatcacaaggtcagcagattgagaccatcctggctaacatggtgaaaccctgtctctagtaaaaatacaaaaattagccgggtgaggtggcacgtgcctgtagtcccagctactcgggaggctgaggcaggagaatggcgtgatcccaggaggcagaggttgcagtgagccaagattgcaccactgcattccagcctgggcgacagcaagactccatctcaaaaaaaaaaaaaaaaaaaaaagacacattcacataatatgcaactataaaaaaagaatgaggaatcttctctgtatattgatgtgaaatgatttccaaaataaactacaagtgataaaaaaaaggaaggggtagaattgagtacagtgtgctattatttgtgtaaaacagaaaagaccatattggatatgcataaaatatctgaagttgataacactggttgccttcaggcagtgggactgggtgtctgtggtgcggggggcagtcagtagcttttggattttgaagcagttaatctattctatccaaaaaacaaattaagaaaaagttaattaaaacaaagaacaaaaaactcagaatggaaaataccagaattctgctatataccatttatagtttgctgggacagatgtgtgaagttcactctgtttttttgagacagagtttcgctcttgttgcccaggcgcaatcttggctcgctgcaacctccgcctcacaggttgaagcaattctcctgcctcagcctcgcaagtagctgggattacaggtgtgcaccaccatacctgactaattttgtatttttagtagagatggggtttcaccatgttggttaggctggtctcaaactcctgacctcaagtgatccacctgcctcggcctcccaaagtgccagaattacaagtgtgagccactgtgcctggctagttcactctttagtaaaatttctatagcaacttctcatcccatagtgatttcagtcactctcaacaaatttacttacagttattaatatccgaacttttgcaggttttatcatagatatgacattggctgaatggactcttgaatattgtagtaaacattctgctcaaattaggtaacaggtgtttgaagttttaaaattatgcaaactgtattccagaaattttacttctaggaatttaagaaacagtgaagattgtacaaataaatgtgtcgtagggatgtttatttaacaaaatgtgtaaaacaggaaaaacttgtaaacaacctaagtgtcctataatagaattcgttaaataagttatgatacatacatatgatgaaatgtatgcagccattaaaaaatattatgaggggctgggcacggtggatcaaacctgtaatcccagcactttggggagctgaggtgggtggatcacttgaggtcaggagtttgagaccagcctggccaacatggtgaaaccccatctctactaaaaatacaaaaaattatctgggtgtgggtggctcatgcttgtaatcccagctacttgggaggctgagacaggagaattgcttgaacccgggaggcggaggttgcagtgagtagagattgcaccactgcactccagcctgggcgacaagaaggaaactccgtctcaagaaaaaaaaaagttaggaaagaatatttgacgtgaaaggtatttttacaatacatacaatacattgtgtgaaagagaagattacacaatagtacacagtgtgtttatagtttgagaaagtaaatatatattttgaatattggaattatatatacccaactagtaatgtcatccattgagtcatggaattataagtgactttttttttttttgcttgtccctattttccagtttttctacagtgaccatacttgccataattaaacatagcatggtagtttaaaatatgtccacaaattctttgatattctcttcaaaaggtggagcccagtccctatccccttgagtgggggctgggttaactgattcccttctgacagataggaaaaagcaaaagtgatggtttgcaactttgcaaactacatcataaaaggtactgtggcttcctccttgttcactctttgattactcacttgggaaagccagctgtcacaccatgacacctaagcagcctgtagagaggctcatgtgacaggaagtgaggcctcaggtcagcagtcaccttaagtgagccaccttggaaacaggctttaggtgactgcagtctcagtcgacagcttgactgcaatgtcatgagacaccctgagcccaaatgacccagctatgtcactcctgaattcctgacccacagaaatggagatctaagttttttttatatttatttatttttgagacagtctctcactctgtcacccaggctggagtgcagtggtgtgatcttggctcactacaacctctgccccccgggctcaagtgattctcctgcatcagcgtcctgagtagctgggaccacaggtgcgcaccaccatgcttggctaatttttgcattttctgtagagatggagtctcatgatgtcgcccaggctggtcttgaacttctggacttgtgatctgcccacctcggcctcccaaagtgttgggattacaggcatgagccactgtgcctggccctaagtatttattttaagccactaggtttggagtaatttgttacatagcagtagataagtaatacacatatttcctacagtgaccacatttacaatttaaatttaattaaaaaggccaggtgcagtggctcatgcctgtaatcccagcactttgggaggctgagtctggaagatcgcttgagcccaggagtttgagaccagtctgggcaacatggcaaaacccctgctctacaaaatacaaaaaaaattagccaggtgtggtggtgtgtacctgtggtctcagatacttgggagactatggtgggagaatcacttgagtccaggaagttgaggctacagtgagctgtgactgtgcaacggtactttagcctgtgggacagtgagactctgtctcaaaagaaaattttttttggccaggggtggtggctcatgcctgtaatcccagcactttgggaggccgaggcgggcagatcacaaagtcaagagatcgagactatccttgccaacatggtgaaaccccatctctgctaaaaatacaaaaattacctgggtgtggtggcatgtacctgtagtcccagctacttgagaggctgaggcaggataatcacttgaacccagtaggcagaggttgcagtgagccgagatcacaccactgcactccagctcaacaacatttttttttaaattaaaaagttctactagctaaataagcaaaatcaccaggtgcagttgatcacacctgtcatctcagcactttgggatattgaggtgggaagaacatctgacgtcaggagtttgagaccagcctgctgtgagcagagattgcaccactgcactccagcctgggagacagagaccccatctcggaaaaaaaaaaaaaaaaaaaaaacataaaaaaccaacaaatgcatttgaaaagaacagcatcagccaggcacagtggctcacgcctgtaatcccagcactttgggaggccgagggtagaggatagctgagcccaggagtttgagaccagcctcggcaacatggtgaaaacctgtctctacaaaaaatacaaaaattagccaagtgtggtagcatgcacttgcagtcccagctacttgggaggctgagggggaagggattgcttgagcctgggaggtcaaggctgaagtgagccatgattgcaccaccacactccagcctgggcaacagagcaagaccctgtctcaaaaaagaaacaaacaaacaaaaaaaacatgtaaaaacaaaacaaaacagaacagcatcatttccttatcat

SEQ ID NO: 96866 - DNA, 24303 bp, Homo sapiens
gaccatcctggccaacatggtgaaaccccacctctactaaaaatacaaaaattagctgggtgtggtggtgcatgcctatagtcccagctactcaggaggttgaggcaaggagaatcgcttaaacccaggaagcagaagctgcaatgagccaagatcatgccactgcactctagcctgggtgacagagcaagactttgtctcaaaaaaaaaaaaaaaaaagaaagaaacaagtctcctgtgtcagagacaaagaactttattgcttacagcacagcaagcagtgtgggcagtaggatatttgcatcagttcccctttccctccaacttccatggggtaacacaatgtggcccagatggatgcctcaaagatggtgggtttggatcacagctaaggaacactcagctcggggaatctattgcttttgttgttgttgttttattggtttttattatttatttattattttttagagataaagtttcactcgtcgcccaggctggagtgcaatggcgctattttggcccactgcaacctctgcttcctgggttcaagctattctcctgcctcagcctcctgagtagctgggattacaggaatgcaccatcatgcctggctaattgtgtatttttttagtagagacggggtttctccatgatggtcaggctggtctcgaactcctgacctcaggtgatctgcccacctcggtgttttattgttttatttttgtagagatggggtctcaccatgttgtctaggctggtcttgaactcctggcctcaaaggatcctcccacgttggccttccaaagtgctgggatggctttgcacggtggcttacacctgtaatcccaggactttgggaggccgagggggcaaatcacctgaagtcaagggttcgagaccagcctggccaacatggtgaagccctgtctctacaaacatacacaaattagctgggcatggtggcgggagcctgtagtcccagctactcaagaggttgaggcaggagaatcacttgaacccagaaggtggaggttgcagtgagccggtatcgcaccactacactccagcctgggcaacagagtgagaatgagcagagtgagactccacctcaaaaaaaaaaaaaaaaaaagggctaggattatagacatcagccactacacccagctgaaatctattgttttcataccaagtagtgagtgggcaagcctgctctttgtccaggaagaaacattaacttgtctctgaagattagcaactgtataaacaaccctgagaaaagccccagataaagagcattcttgggccttgcattcttggcacacacagcaagacatgtaagcacacaacagatccatggaggactttcaatacaaagatcacagtaataattgtttcaggcaaaaattattgatgggctgggtacagtggctcacgcctgtaaccccagcactttgggaggctgaggcaggaggactgcttgagcccagaagtttgaaactcacccagacaacatagcatgaccttctctctacaaaaaaaaaaaaaagttttaaattagccagccatagtggtgcacgtctgtagtctcagctactcaggaggctgagataggaagctgagcccaggaggttcaggctgcagtaagctgtgtgattgagctactgcactccagcctgggcgacagggtgagaccctgtctcaaaaaaaaaaaaagaaaaaatggatgcttaaattagtaggcattgttatgatgaaaaacagaacagtcacatattttcccataagatgcttattaaatgcttattaaatacaaagaaaaactactaactttaaagtagagcaatctggcaaatattaaccaagtgaacaaagttaacatcaccaggaatgagaaaaactgacatcatgtgactcttcctataatgccttgaaaaggacacgttaatttctctggtgttcttgccaaaaatgaataacctgcttttttttttttttttgataagagcctcgctctgtcacccaggctggagtgcagtggcgtgatcttgactcactgcaatctccacctcctgggttcaagtgattctcctgcctcagcctactgagtaactgggattacaggcgtgcaccaccatgcccagttaattttttgtatttttagtagagacggtgttgcaccatgttggccaggatggtcttgatctcttgacctcacgatccgccggccttggcctcccaaagtgctgggattacagttgtgagccactgtgcccggccataatctgtatttaaacataaggaaacatcaggccaggcgtggtggctcatgcctgtaatcccggcactttgggaggccaaggcaggcagatcacctgaggtcaggagttcaaaaccagcctggctaacatggtgaaaccccatttctactaaaagtacaaaaattagcccggcatggtggtgggtgcctgtaatcccagctactctggaggctgaggcaggagaatcacttgaacccgaggaggcggaggctgcagtgagcagagatcatgccactgcactccagcctgggcaaaagagcaacactctgtctttaaaaaatttgaaaaaaaaaaaaaaaatcataaggaaacatcaaataaccctaaagtaagggacagtctgtaaaataactggccagtattcaaaaaaatgccaagatcattaaagactgaaaaattgcagaactgttccagactgaagaacatgacaactaaatgtgaaatgtaattttggataaatagaatcctgggccagagatagaagattcatgacataattagcaaaatttgaatgaaatctatagattggatccggcatcactgtaatttcttattcctgggttaaatgtgatgtttacactgggggatctgtgggtagagtatgggaattcttcttactgttttttacaaattccttccatttttgagacaaggtctcactctgtcgccgagactgggagtgcagtgctgtgattctggctcactgcaacctccgcctcctgggttcaagcaattccacctcagccacacaagtagctgggattacaggcgtgtgccaccacacctggcttttttttttttttttgctttaagttcagggatatatgtgcagaatgagcagttttgttagataggtatacatatcccatggtggtttgctgcacccttcaacccatcctctagggtttttttggtggttgtttttttctttgagacagagtctcactgtgtcacccaggctggagtgcagtggctccatctcggctcactgcaagctccgcctcttggattcatgccattctctcacctcagccttcccagtagctggaactacacgcacccgccaccatgcccagctaatttttttttttgtatttttagtagagacgaggtttcaccgtgttagccaggatagtgtcgatctcctgaccttgtgatctgcccgcctcggcctcccaaagtgctgggattacaggcataagccactgcgtccagcccccatcctctaagttttaaaccctgcttgcattaggtatttgtcttaatgctctccctccccttgctcccaccccctgacaggtcccagtgtgtgatgttcccctccctgtacagacccatgggaaatgtttcaaaagtgagaacttcttatacatgttatttaaattgttttttccccttatcaagaacacctatttatgtatttaatatgcttccatcagatgtcgcctgggagacaagtctcgctgttgttgcccaggctggagtgcagtaatgcagtctccgctcactgcaatctccaactcccaggtttaagtgattctcccgcctcagcctcccgaggaactgggattacaggcagccgccaccatgcccagctaatttttgtatttttagtagagacgggtttcactatgttggccaggctggtctcgaactcctgacctcaggtgatccacccgcttctgcctcccaaagtgctgggattacaggtgtgaatcactgtacctggcctttattattattattattttttttgaggaatctcgctctgttgcccaggctggagtgcagtgacatgatctcggctcactgcaacctctgcttcctgagttcaagcaattctcatgcctcagcctcccaagtagcttggatcacagatgcacaccaccaggccaggctgatgtatttttacagagacggggtttcaccatgttggccaggatggtcttgaactcctgacctcaagtgatccgcccacctcggcttcccaaagtactgggattacaagcgtgcgccaccatgcttggcctcctcataacatttttaacagcagttataataaatccgcatgcacaccgtgtaatgcctatggaactaataactagtcttctatcgtgcagtgctactagtcacatatatagatgtttttgtgattctcaaatacacaaacccacctaagagcatcatatacccagatattcactgcagtctgaatagcagactgtgaacaacttaaacatcagtcagtaggtgaccggttagttgtgtcattctttttgagaaagggtcagctccgtagcccaggctgaagtgcagtggcaagatcatagctgactgcaacctccacctcccagattccagcaatcctcccacctcagcctcccaagtagctgggatcacagacgtgcaccaccacgcctggctaatttttgtatttgttgtatagatggagtctcgctatgttacccagactggtcttgaactcccgggcacaagtgatgcccccgcctcatcctcccaaagtgctgggattacaggcgtgagccacccagccctggcccctagttgagtcattcttacaaagaacatcacgctgctgttaccgaggacttcccattagtcttgatatggcacaatctccaagacacttaaagtataacacaccctgcagtgtgtattatgaattgccatttgtgtggggaaatgattatattcatatgtaagtttataaattcagaaagcattccgaaaattcatagagtacccaggggtaactttgcttgtctctagtgttgaactagaagtgggaggaagatttaattttcactacatgccctttggtgccttttgaattcagaacaatttccgttatttattaaaaataaaatacagccgggcgcggtggctcacgcctgtaatcccaacactttggaaggccgaggcgggaggatcacttgaactcaggagtatcacttgagctcaggagtttgagaccaccctgggcaacatagtgagaccctatgtttacaaaaagaaaataaataaagtaaaataccacgtgttactgaatccctggtatttggcgggacactggatactggaaacaattgtggagctctttggaaatttaccttaaaagggagtccgctcaaaggcaggaatgactctacaagggtgaattttcaaatctgccataggggcctcgggcctcagcagcatccagagccctacggacgggcaggttcttacgtctcaactcccatcgcaccagtcctgcagctttctaaaggtatccagcactttctaccttgcattctatcttcatcttcgctaggcctcacagcaccgcatgattccgggggagggtgcttatcagactcgcgtgtggccccacggcacctagggcaccgtcgagcacacggtccgggaagctccaatgaaacggaacaaaccgcgagatcaggggaggtaggaggcccaccctacgccctgcccccgcggagcacaagccccgcctgcgtcccgagctcccgggtccgcaaagctgggccccaaagagctccaacgccggaaccaaggagcacggaatgccgggaacaagctcctcccgtgcgcgatgacgacaaggccgaggcgcgaagggtgggaccgcaggagccgtgcagccgcggaccaatgagcgggcgccggacgacctgtggcccaatggcggcggcgcgcgggcacgctgggggccggccagacgggccgacttttccagaagacccggatagttcctcccggccacgccgcgccggctctgggcactcagcatcgtttccttttcctccgctggagcagctatggcggcggtgaagaccctgaaccccaaggccgaggtggcccgagcgcaggcggcgctggcggtcaacatcagcgcagcgcggggtctgcaggacgtgctaaggaccaacctggggcccaagggcaccatgaagatgtaaggcggggctgaaccggagggccgggcgggcaccgcgcgccgccgcgcwcctggcgggcccgggaccgcggactggagcccgccgcctcggggctgcgcagccgtccttctcggcgtcctccggggtcggtcctgtgtccctcctaagccccaccgtcccggccatttcttcccgcatcgatgcagtctccgcggagaacaaagcggctctagagcgcggcgttccccgccctctggggcttccaggcaccctgaggactcgrcacaatctctgcggggacggggtgggcactacacctgtcctccatcctgctggacataactagccccacatccctggctccctaaaatctgggaaaagcccgttttctaatgggacttttagttatcgttgaaaaagtcatagtctggttcatttctgtcctttaaacaggctcgtttctggcgctggagacatcaaacttactaaagacggcaatgtgctgcttcacgaaatggtgagaggtgctctgggctaggtcagaaaggtcttgattttccgtagaatgttttctttgtagraagatttgcagtgtccattttcaaggtaggagaacattcagaagtggcgtgtaatcagtaatagtcctgagtgcctggagtctgacagccctgcctttgaatccctgcttttttgccattcacagtccgggctaaagggctgtaattgtatattaaagttaattattttaaaacttgaaaaattaagagaggttgacacaatcacatgggcaaaatgcatgaggatgatttttcttttcttttytttttttttttttttaattagacgaagtctcgctctgtcgaccagcctggagtccggtggcacaatctcaactcactgcaacctctccctcccgggttcaagcgattcttctgtctcagtctcccaagtagctaggattacaggctcgcgccactacgcccagttgatttttgtatttttagtagagacaggatttcaccgtgttggccaggctggtcttgaacgcctgacttcaggcgatccccccgcatcagcctcccaaagtgctgggattaccaggcccgtgcccagctgggttttctctttttaaaacagcagtttctctgttaggtctcatctctatctccaactggaggggagataaatctgtctctttgcaagtcttagggatggaraatattagattattgaggggagtatgctttttactcatccctaaattcccaaaacttagcagttcaaatccaagaaaaggaaattatttcctgctgatttgagttcagaataatatgtagggttttgctagtggtataccatgccatcaacatccagatgaaatatctttagtaaggacttgctaacctaggaggtgtagtttttgtttttagtgggctcagtggtggcccgtgtttgaaaagtggagccacagttaaacttgacttcagaattgtttgggggctaggtgtggtggcttatgcttgtaatcgcagcactttggcaggccaaggtaggtggatcatttgaggccaggagttcacgaccagccctggccaacatggttaaaactccgactcagctaaaaatacaaaaattagccgggtgtggtcctgcacgcctgtagtcccagctgcttcagaggctgaggcaggagaatcgatcgcttaaacctgggagactgaggtttcggtgagccaagattgtgccactgcattccagtgtaggagacagagtgagggtatctccaaaacaaaacaaaaaattatttgggttttagtgtgtgagaaatacagcgtaggtagagagaagcacattgaacatttacaatttaagaaataattataaaatggacacacacaaccaccactgtagctaataaattgttgctaccacctcagaagtctcgtcccattggaacctctctccaatctccagaagtctgtttttcagttttctttgaaaaaattacaaacctacaaaaataattataatgtgtgtgccctttaggagatacctggcttattctcactagagctctacacttgccataaagaggcaaggatgtacaattatgtgttactgttaactggtagctctgtcatcttgagtaaacttctactgagcctcaagcttcctcatctgtaaagtagagataacctgggaaataaattacacatgaagacgtttcaatcattataattgcatgtgcatgatagttaatcgaagtaatttgtagccaacatttgggtagctttttcaagtagatagcactcaaagaggcccttcctgcattttgtctgtggtatatttagactgcttcatattgttttaagtgattcattctttttctacttwcagcaaattcaacacccaacagcttccttaatagcaaaggtagcaacagcccaggatgatataactggtgatggtacgacttctaatgtcctaatcattggagagctgctgaaacaggcggatctctacatttctgaagtatgcacaactcttgtttctgtaatttttttttgtatataggaagtgtctgatatttatacaaattgatgtgctgttaatagtagctgaggtcatacagtagaattagggggcttaaatctgggtctttatcctggtctaaaacaaattgtgaccttggacaggttatagaacctttcttggcctgaaaataattttgtaatcaagttgcattgcctrtgtgatttgcatctgtctttagtgtagattaataattgagatctaaaaatggaatgtttaggactaggcatatttgttaggaaaaaggcaaccaaaagcttatatttggataaattccacttttttagccctgactagttccaaggttaaagcaaacctcagtgaatatgaatgtattgtcagaatttcctggagaaagagaacagtctttatttttattagtaaatgatgtgagttagtttgagattacctatagaaaggatagaatagtccaggcgcagtggctcacgcccataatcccagcactttgagaggccgaggtgggcggatcacctgaggttgggagttcgagaccagtctgaccaacatggagaaaccccgtgtctactaaaaatacaaaaattagccaggcgtggtggtgcatgcctgtaatcccagctacttgggaagctgaggcaggagaattgcttgaacccaggaggtggasgttgtggtgagtcgagattgtgccattgtactccagcctgggtaacaagtgcgaaactccatctcaaaaaaaatgaaagaaaataaagataggataatgctaccatctgtgagttgttgggacacagtgttggttttgaaatgattcagagtggtttgcacagtgaacacccaagtgtgctttatagttcccttggctttgaccctgtgctagagcattcattacctgttcatctgctctgcattgaaaggaatatttgtccttttaaatgtattcagaaagccagcacattatattacctcgtgttcaaaggtatgatgatccagaacactccttcaataattacctgaactttatcatgaactatggttgcacctaattgaagatgcaagtgttaatgtgtgtttattttagggccttcatcctagaataatcactgaaggatttgaagctgcaaaggaaaaggcccttcagtttttggaagaagtcaaagtaagcagagagatggacagggaaacacttatagatgtggccagaacatctcttcgtactaaagttcatgctgaacttgcagatgtcttaacagaggtatgtattaaattttgtctatgtctggtatagtatacctatatagaaaatctctgatagtagaaacatgaatatgattaccaatttcaattacaaggtgctgtgtaggttcatttttgtggcaatgatacctaatctgtgtctctaaaaatgaggaaattaaaataatagtatacctaaccaggttataaaagtaaaattgaagctttcattaaaaggtttataaagtggagatttttttattagaaagcttccagttaccagtatttttaataaaacgaggaatgttaatgttaattaatgttaatgtttgggaattatagatggagatttcagaaatgtaaatgacttcagctgttgccttttacatataatgtattctatttgctgatagaaaaagacttaaatcagtgtagaattgtaaaatgaaactgcctactttagccttctgaaaagcaacatgtttctgctgcaaattgaatttacttaacggttatgctcctccaattgcaggctgtagtggactccattttggccattaaaaagcaagatgaacctattgatctcttcatgattgagatcatggagatgaaacataaatctgaaactgatacaaggtaggtggtagaagactgtgaaatactaatgggcatggaggctcacacctgtaatcccagcactttgggaggctgtggtgggcaaatcacctcaggtcaggagttccagaccagcctggccaacatggggaarccccgtctctattaaaattacaaaaattaaccaggcgtgccgggcatgactgtaatcccagctactcgggaggctgaggcagcagaatagcttgaacctgggaggcggaggttgcagtgagctgagaccacaccattgcactccagcctgggtgacaagagcgaaaccccgtcccattaaaaaaaaaacaaaaacaaaaaataaactgtgtttagaaatttaggggtgctttgtacaatatagatagttggctttttttttttttgagatggagtcttgctctgtcgcccagcctggagtgtacagtggcatgatctcggctcactgcaagctctgcctcccgggttcacaccattctcctgcctcagcctcccgagtagctgggactacaggcgcccgccaccatgcccggataatttttgtatttttagtagagacggggtttcaccatgttaaccaggatgatctcgatctcctgacctcgtgatccgcccacctcggcctcccaaagtgctgggattacaggcgtgagatggcaattttaaaaatatctttggatataaaatgttatatatttacctgaagatataagttggataaactgctaggagaatattgtttttagtaatattttctcctgaaataaggtgaatgttatgtttatggttagaatgattctgaaaagtgaacaacatcagtcatttggcatttattgaattgctaggtacaaagcataatgagaagtagtagaggaatttaaaaaaatatttttttcaaagagttagttagaaaacatgtttgttttccctttggggtgtktgtgtgtgtgtgtctgtgtggagaatggagtctccctatgttgcccaggctggttttaaattcctgggattaaggtgtcctctcacttctgcctccgtaagtgctgggattacaggtgcttggtagaaaacatgtttttaaaggacgtcatcacagtttgacagcctaccagtgagaccatctctgcagacttttctgtacagcgtaggatcttcaggtaatttaagaaataggccgggcgcagtggctcatgcctgtaatcccagcactttgggaggccaaggcgggcrgatcacgagatcaggagatcgaaaccatcctggctaacacggtgaaaccccgtctctactaaaaatacaaaagaattagctgggcatggttgtgggtgcctgtagtcccagctgcttgagaggctgaggtaggagaatggtgtgaacccaggaggtggagcttgcggtgagccaagatggcaccactacactccatcctgggcaacagagcgagacttcatctcaaaaaagaaaaatgtgactgcgtgaaatatcaataccttctcatttcagtgtttaatatattaaatacccatctgaaaatcaataaccataattttgtgtgtgtttaaacagcttaatcagagggcttgttttggaccacggagcacggcatcctgatatgaagaaaagggtggaggatgcatrcatcctcacttgtaacgtgtcattagagtatgagaaaacgtaagtttatagccccttaacagtgaaatggagaagcttcgtattttaggcgagttacttttttgtgaaactttgtttcccactgtaaggacaataatgctcaaattggtttgggggagctataggaaacagtctctgaagatgcataaggggcaggattggagctcagtgaactgttaaatcttaggactaatccagtttcagaagctgctttcttaatgtttccctgctttctgtaacttttttttttcttaatagagaagtgaattctggctttttttacaagagtgcagaagagagagaaaaactcgtgaaagctgaaagaaaattcattgaagatagggttaaaaaaataatagaactgaaaaggaaagtctgtggcgattcagataaaggatttgttgttattaatcaaaaggtgagaatgaaaactcaatgtataaactaaatagtacgtatcatcctttttacttttaaggtgaaagatgttgaaattaatttttatttttgttacagggaattgaccccttttccttagatgctctttcaaaagaaggcatagtygctctgcgcagagctaaaaggagaaatatggagaggtatccgagtaatttgacttttactcattttgcaagtgaattgggattatttctttttccttatactttatttttgggtttttcaactgtatagttaattggcattaactatattcacattgtgcaccccgtcagcactgtccatctctaggacttttttcatcatcacaaactgaaactgtatacccattaaatagttactccccatttctccctcccccttgccccttgtaaacattattttactttttgtttctgaattcaatatacttttttccaaagagctccccacaataaaaagcttttttwaaaaatttwttattattattttttgagacagtcttgctctttcgtgcagtggcatgatcttggttcattgcgactaccacttcctgggttcataggattctcagcctcccgagtagttgggattacgggtgtctgccaccatgcccactgaattgctttgtgtttttttagtagagatggggttttgccatgttagctaggctggtctcaaactcctggcctcaagtgatccacccacctcarcctcccaaagtgttgggattacaggtgtgagccaccatgcctggctaataaagagctcttgtccaccttttagatttcatttgctaacttggggagagtggtttaaatggagggttaagagaaaagactagtttttagctggttgatggcaaatggaaaggcttaaagtacattttaaaatttaattttgtgtgtaattctgaaaaattccttcctaaaaattactggtcttatctttgaaattcactggtaacgttgcttatccatctcccttaaaatgctatttcaggctgactcttgcttgtggtggggtagccctgaattcttttgacgacctaagtcctgactgcttgggacatgcaggacttgtatatgagtatacattggtaagtgtatttttttcttaaaggtaatagaaccttttagctcgtgaattatttttgtttgtttgtttgaggtggggtctcactcctgcccgggctggagtgcagtggtgtgatcacagttcactacagcctcatcttcctgggttcaagtgatcctcccgcctcaggcttctgagcaggtgggaccacagacgtgtgtgctaccatgactggctaattttttttttttcttggtaatttttgtagaaacaggttcataattgtgttgcccaggctggtcttaaactcccgggctcaggctgtccttcaccctcagcctcccaaagtgctgagattacaggcatgagccaccgtgcctggttcatgaagtctttagcagaaaaattaattgaaattcaggatcagatttttgtttatatacattttgaaggtttatgtgtagtaatgggaagccattgatggggaaaatcacatttcttttatgtgatttttcaaaaggagataatttgctttaatgtgatcaagtttgttccttattaatatgctacttgtcattctctgtaagtccctcttctctcttcactctgcacaaatcctgtttttgaaaatcatattttttctacacatagggagaagagaagtttacctttattgagaaatgtaacaaccctcgttctgtcacattattgatcaaaggaccaaataagcacacactcactcagatcaaagatgcagtgagggacggcttgagggctgtcaaaaatgctattgatgatggtaagatcctcactgtatttcaattcttttatattgttttgctggtctgaaaggcatggccgaatactgtgtttttatcagtagtttacacagccagacaccatgcaaaagcagtcttccctttagaatgactgatggtatgctaaggtttttcatagcatatcattattaaaggtgaatacaaataaatgaactaatactgatctgttgaaagctgccagtggctagtgaagccattctggttgaaccattctcctatttggtatgttagtcacttgtattttgtcatagtaaatttgtaagaaattaatggctttcatatgtatattttgttattcataattagttctgcagttttcttagcatttttccttttcccccatccaacaggctgtgtggttccaggtgctggtgccgtggaagtggcaatggcagaagccctgattaaacataagcccagtgtaaagggcagggcacagcttggagtccaagcatttgctgatgcattgctcattattcccaaggtgtgcatgcttttaacagtcaatcttccaaaagattcagctgatcaaacctttctgataatgtaggatttattcataaagtggattttggataagcaagtttgatcagttttctttctgactctagaacaggtattcctcatcatccagatatatttggtttctctgggaagcctgaatagctgacattgcagatggcaagagataacctgtagtttaatatttgcagtattaggggttatacttgagtacaaacttgctttttgcttttgttttaractgatatcattgttttctattatataccagttttgatatataatttatgactggtgtattgctgctgggtttggggtagttgagagagttgatcagtaacttgtgtctggtattctctgaagggaacataaatgttctgtctttatgcaatgagtttttttttttttttttttttgagacagttttgttcttgtttcccaggctggagtgtaatggtgcgatctcagctcactgcagcctcagcctctcgagtagctgggattacaggcacctgccaccacacccggccaggtttttttttatttttagtagagatggggtttcaccatgttggccaggctggtctcgaactcctgacctcaggtgatccaccttccacggcctcccaaagtcctgggattacaggcgtgagccactgcaccaggccgagattttctttttcttttttctttttttttttttttttttttttactatcagttattagttcctgttttctcaagaattaaatttgtttactttaggttcttgctcagaactctggttttgaccttcaggaaacattagttaaaattcaagcagaacattcagaatcrggtcagcttgtgggtgtggacctgaacacaggtaagagaatgcaactgttgtagagggaaaactagatgtaatacgtgtgagttgaagccaggaaagattaaaaatgttttgctttgcaatttgacaccagtgctgttagggaactctgggttctaaaatgggataaaataggatattaataaaaaatggaatgactaggtataattaagggacgagtagacatgagtaatttggggatacaattttggagatgttgagtggtggtagatggttcagattaatgttgaaggattttcatattgcatttgccttactcagtttttaatcaagtactatgataagaaaatagatgtggtgattatattcatgggtgaaaaccagctaaagatagcaattaatgccagaaaaggggatgtagaaatctagtgaaatggtgacagccctgatcttaggttcctgtaacaaaacaacacaaattaagtacaaagtaggagataacaggtacctccatgcagtatgtgcaagacctattgtcaacattaatagaaaaggtttctggaatgagggaaatgatcagtccattttagtcagattatagttgaagtgctatacttcagtatgagtaaacagaaatgtatccagaagaagagaggggtgttcaggacttctaagtataagtcagacattcatcaaatattgtggacgggggtcatggtttagagtagaaaattgggctaacagagaagctttgaattctcatagttaatactggaggaaatgagtcatcagtgataagcaaagctgcacacartattgttggttcttactgactgaayttattttaagatttggttgccttttaggtgagccaatggtggcagcagaagtaggcgtatgggataactattgtgtaaagaaacagcttcttcactcctggtaagtttgggaaaatgaaaactaaactgttagagaatcatacttttttcatttggtgttctctgtttagtygctcctttcccccatgaataatgtgatcagctggaagtatggaaacygaactmgccctctgatgtgtagaggggaagggggaaatttaattggatgtaatgtgtgcagcttggttggaagtgggaagttgagtcgaattagggctcctaatcatctgagccatcttatttttgtccccctttcagcactgtgrttgccaccaacattctcttggttgatgagatcatgcgagctggaatgtcttctctgaaaggttgaattgaakcttcctctgtatctgaatcttgragactgcaaagtgatcctgaggawtacagctgtggaatttttgtccaagcttcaaataattttgaaagaaattttcccatatgaaaaaaggagagaacmctggcatctgtkgaaatttggaagttctgaaatyayagtatttttaaaaattgcacwgaagtgtatacacataaagcaggtcttttatccagtgaacaggatgttttgctttagcagcagtgacataaaattccatgttagataagcatatgttacttaccttgttattaaatatttcttgaaaagcaaattttaatggtttaattttatgtggacgtatgttaaattatccaactaccctattgttaagcatttggttttaaaatttttatgctaatataaatgctcaagtaatttaaaatattgaaagcatccctgttggtataaatttctgagtaaatgcattggatcagttggactttgaacgcctttgaaatggctttgctaaaatgctcccgccacaaagttgtaggaaatgggaagaggagtcaactagaggcaagggagttgagagagctgcaactgtaaagggcaagaacaggcagaggtaaaaagatgatggaaggtgtggtgactaagggccacggttattgggtgaaatttgagattgtaggccaactgtattttcaagcttctgaacttaggcaaaatattcatcgcaaagtctctagcgtcatatttttctcacccaaattacgtttccacgagattatttatatatagttggtctatctctgcagtccttgaaggtgaagttgtgtgttactaggctgtgttttgggatgtcagcagtggcctgaagtgagttgtgcaataaatgttaagttgaaacctcctttctgttcttgcaatggtatgacgcacaaaagcaatcttaaggggaatgaaaactgtccaaaggttcagaaaagtagtgaaggggcctctggaacggccgggaccctcaacgtggttttccttaattccctgggcggtcctgaaggtggtgtggccagtcctccgcctcgctccgtcagtttccccctgctgaactattgggtgcggggcgggtggtggcgcagcctgcgcatgtgcataggggtcgactgccgctgcggtgcatgagggcgcatgcgcagcggggccgtgggtgtacgcggcgcagcgcggcagtcctgatggcccggcatgggttaccgctgctgcccctgctgtcgctcctggtcggcgcgtggctcaagctaggtcagtgaaccggccgtccatcctgggggcgctgggaaggggatggggcgctccgccctgacgggagagagccttaggcccttctgccggcttccgggatgcggctgcagcggcaggctggggaggtagctctcggtgcgcgtggcgcctcaccgccttatacttttcaacttcttgttgtggaatctttcaaacctaaaaaagggaaagagaggccgggcgcggtggctcgagcctgtaatcccagcactttgggaggccgaggcgggtggatcacttgaggtcaggagttggagaccagcctggccaacgtgaaaccctgtctctacaaaaatacaaaaacaaaaaaacacaactatccgggcgtggcggcgggtgcctgtaatcccagctactcgggaggctgagacaggagactcgcttgaacccaggaggcggaggttgcagtgagccgagatcgtgccattgcattccagcctgggcgacagatcgatactttatctcaaaaaaaaaaaaaaaaaaaaaaaaaaaaggccggacgcggtggctcacgcctgtaatcccagcactttgggaggccgaggcgggcggatcacgaggtcaggaaatcgagaccatcctggctaacacagtgaaaccccgtctctactaaaaattcaaaaaattagccgggcgtgatggcgggcgcttgtagtcccagctactagggaggctgaggcaggagaatggcgtgaaccccggggggtggagcctgcagtgagcggagatagcgccactgcactccagcctgggcgacagcgagactccgtctcaaaaaaaaaaaaaaaaaaaaaaggaaaaaggagaatataacgaggaacgacccccgcccccacgtactcggccagcttaaatagctgccagtttgtggccagtcctgctcctgcggaatcgcacactccccctctcctggagccatttggaagtgggtccagacattatcccattttattctagggatttattaagcttgaatagtcaaaccgtttctcacctaaaaaattgacagtgcttcttaataatatattcagtctgttcagattcatctattatctcataaatggtttttaacgtttgctggctgaattagggacaaaataaagctcatacattgcaattgtatgttatttcttaattccgattcaatctgagatttccctacttactccttttatttatttatttatttatttttggtggggcggggggcaaggtctcgacgtgttgcccaggctggagtgaatggttccatcatagctgactgcagcctcaagcaatccctgcctcagtttcccaaagtgctgggattacaggcgtaagccaccacgccaggatgatccgttttttccctttgcaatatatttgtgaaagaaactgaaaatgggccaggtgaggtggctcacgcttgaaatcccagcactttaagagcctgaggcgggcggatcacgaggtcaggagttcgagcagcctgcccaacatggtgaaaccccgtctctactaaaaatacaaaaaaattagccgggcgtggtggcgggcgcctgtagtcccagctattcaggaggctgaggcgggagaatcgcttgaacccaggaggcggaggttgcagttttccgagatcgggccactgcactctgaccgggacaacagagcaaggctccgcctcacaaaaaaaaaaaaaaaaaaaaaaatcaaaaacaaaacaaaacaaaaaaaacgaaaaactgaaaatggatgaaatcactgagagtgtgtcagaataagagatccaaagataggatcttgaggaacatcaaaagacaaggactctgccttgaaagaagttgtagtgcttagacatcctttcttggaaagacactgtgaagtggtgcatcagctgaagcagtatggcttattggaaacagcaccgtaaagagacctaaatctagtcctgtctcctgctaaccagctctttaagtcatatttcttttttggatcttggtttgctcctgtggaataaggaggttgaagcaaagatccttttttattttttatttatttatttattttgagacagagtcttgctgtgtccctccaggctggagtgcagtggcgcgatcttggttcactgcaacctccgcccccccaggttcaagtgattctcctgcctcagcttccggagtagttgggattacaggtgtacaccatcatacctggcttatttttggttttgtttgtttctttgagacggagtctcgctcctgtcgcccaggccggagtgcagtggcgtgatctcggctcactgcaacctccgcctcccgggtgcaagcgattctcctgcctcagcctcctgagagctgggattacaggcacctgacaccacgcctggctgatttttgtatttttagtagagatggggtttcgccatgttggccagactggtctccaactcctgacctcaggtaatctgcccgcctcggcctcccaaagtgctgggattccaggtgtgagccatcgcacctggccagtcctttttaattctatgattttctgaggcattcatacaagtctaaaggtgctcattcaactatttggcaataattatgcacttatggcagaggccagggatatactgtcatatatgtattatatgcttctcttctggctcatataatggtgagaatcactaagaactgataagagttcagtaagtggagaggaagaggcagagaaacagcatgagcagaaggatggaaagaaagtgctagatgtattttaggatagagtgtctaaattcacctagctgggacaagggcttgtgtagaggaagaaaaggacttgtgtagaggaagaaagaggtaagtgcaaatctaccatgtgttcaacatttcacccatgctatcttattgttattattatctttttattttttattttttgagacagggtctcactctgtcacccaggctggagtgcagtgacacaatgatagctcactacaaccttgaactcctgggctcaagcaatcctcctgccttagcctctgcaccctgtctctgagccattgctcctggttccatgttattttaattgatacagctgctacctaagagatagtgagatattatccctatttttcatacttattttttcttttattaataagctatggtcgtccatagatatccccatttttcagatgaagaaattgaatctcagctgggcgtgctggctcacacctataatcccagcactttgggaggctgaggtggaaggatcatttgagctcaggagtttgagaccagcctgggcgacataacaaaaccccatctctacaaaaaatacaaaaattagccaggtgtggtggtgcacacttgtggtcccagctactcaggaggctgaggtgggaggattgcttgagctgacgggggcagaggttgcagtgaacccagagtgcaccactgcactccagtctgggtgacacagcgagatcctgtcacgaaaaaaaaaaaaaaaaagacaagaaattgaatctcagattaagtaatttgcctaaggtttcccagcaaattaagtggcagaacaagaatgtgaagccaaacaaacaaaacgcaaaaggaattttctttttttctttctttttttttttttttttttttgagacagagtctcgctctgttgcccaggtggagtgcagtggcacactctcggctcactgcaagctccgcctcccgggtttacaccattctcctgcctcagcctcccaagtagctgggactacaggcgactgccaccacgcccggctaatttttttttttgtatttttagtagagaaggggtttcaccgtgttagccaggatggtcttgatctgacctcgtcatctacccgcctcggcctctcaaagtgctgggattacaggtgtgagccaccgtgcccagcccaaaaggaatttaaagccagatttttaagcctccacattttttgttgtgttttgttataccatcatgagtattgcatatgatccaaatattaccacttgttttatatatatgcatgtattactggtaactctcttttttctctgcaggaaatggacaggctactagcatggtccaactgcagggtgggagattcctgatgggaacaaattctccagacagcagagatggtgaagggcctgtgcgggaggcgacagtgaaaccctttgccatcgacatatttcctgtcaccaacaaagatttcaggtacatcaggtattcttccaggaggaatgaagaccctctctaatctcattcttttttctttcttttttttttttttgttttttgagactgactccctctgtcacccaggtgctggagtgcagtggcgcaatctcgctcactgcaacctccacctcccgggttcaagcaattctcctgccttcgcctgccgagcagctggaattacaggtgttcaccaccacgcccggctaatttttttttttttgtatttttttagtagagacggggtttctccatgttggccaggctgggctcgaactcctgacctcaactatctgcccacctcagcctcccaaagtgctgggattacaggcatgagccactgcacttggcctcattcttaatatctaaaggaaaactaacttgttcactgtcacgtgtcatctttgcagtgtactatgggatatgttattcagatgaagaacctgaaatccaaagaggtttgactgactctctcagttagtggatgagcttggcctggaactcaaatccctgggctcttgagccagtgcattttccattacactgggcatagcactgagaaatataagcaaacgccagtcactcaacagaaacctcttctacatggggaagggattgggagaagggacatcatagtagagagtcctttaaattccccttataggccaggtgtgctggctcacacctgcaatgtgagcactttgggaggccgaggtgggaggattgcttgagctcaggagtctgagaccaggctggtaacatagggagaccctatctctgctaaaataaataaataagtaaataagtatataaatatacatacacacacatatatatataaatacatatatataacaatccatcttaccctgacagtctgccccctgaaacttactaaaccataccaaagtatatgaaaattcattttattattattattgttattgttattatttttttgagacagggtctggctctgtcacccaggctgaagttcagtggtatgatctcagctcgctgcagcctctgcgtcccaggctcaaaccatcacctgggactacaggtgcgcactatcacacccagcttattttgttttgtatttttggtagagacagggttttgccctgttgcccaggctggtctcgaactcctgggctcaaatgatccttctgccgtggcctcccaaaatgctgggattataggtgtgacccaccatgcctggccttgaaaatccattttatttatttgtatttatttatttatttagagacacagttttcctcttgttgcctaggctggagtgcaatggtgcgatctcagctcaccacaac

SEQ ID NO: 96867 - DNA, 104224 bp, Homo sapiens
tcctcatcaccacatcaccccttctgccattttattgtaatcagtctgagactaggcctgcttagtcataggcttgtctagaacctgggcctcctgcaaaaggcctgtattctttttattctttttttttttttttttttttttgagacaaggtctcactctattgcccaggctggagtgcagtggtgtaatcacggcttactgtagccttgacatcccaggctcaagtaaccttcccacctcagcctcctaagtagctgagaccacaggtgcccaaccactgcacctaactaattaaaaaactttttttggagagatggagtctcactacgttgcccaggctggtctcaaactcctgcgctcaagtgatcctcctgccttgacctcccaaagtgttgggattacaggcgtgagccactgcacccatccaattatggcttttatgtgagagtaaatttaacatgctaggagatgcattcagattttttttttttttttttttagaatatcctgcagcataccatggccacttaaaataacaagatttttcaaaagtatatgtgaaatctatgaaacatctttttgtttttttcccctagaacacactgtggaaagtcataaaaagaaagtggctttggttgggcacattggctcacgcctgtaattccagcagtttgggaggccaaggtgggcagatcgcttgagcccaggagttcaagagcagcctgggcaacacaatgaaaccctgtctctacaaaaaatacaaaaactagccaggaatggtggcatgcacctgtagtcctagctacttgggaatctgaggtaggaagatcccttaagccagggaggcagagactgcagtgagccatgatcacgccactggcactccagcctgggcaacagagggagatcctgtcttaaaaacaaagaagaagaaaagaaagagaaagaaaagagataaaagaaagcagctgtcaagttctttaacctgtgccaacagaattacacaggggctcaaagattagccacctgctgctgctccctccagtgccttacagtcttgtactgcttggagggctggctggccactggtaagggatttaggcttctgcctggtaagctgagcctgatcttttctatatacccagcacagagccatcactcagggtcaggctcaaacctatcaacctcagagactaaacaataaaatcagtatgcacaattatttactctgagaatcgaaaaaagcaaagtggatcagtcagtggcatgtttgccctatagaatgcaatacatgaagccaaatatgccatgcaagcatagaatcagaatgggaagaagaaggtacataaaggcaactaaaaggaaacccatcggttttcttaacacagtacccccattcacagttctgctttccagtttcagttacccatggacatccgaggtccaaacatattaaacggaaaattcctgaaataaacataagtttgaaattgcatgccattctgagtagcataatgaaatctctcaccattttgctctgttccacccaggacgtgaatcatccctttgcccagcatcttcacactgtagacgccactcgccccttagttacttaggagctgtcacattgatcagatcaaccgtcactgtattgcagtgcttatgttcaagttacccttattttacttacgactggccccacagcacaagagttgtgatgctggcaatacggatatgccaaagggaagccataaagtgatcccttatgagaaaaggttaaagttctccaactaggaaaagaaaaaagactgtttgccgaggtgactaacatctactactgtgcctaattaataaattaaactttattataggtatgtatagataggaaacatcatactgtctgtctattgtctgtctatctatttagggtttggatctatctaatctatctatctaatctatcttatctatctatctatctatctatctatctatctatctatctatctatctacctacctacctacctacctacctatctatctggggtttggaaccatttgcagtttccagcatccacaaggggtcttggaacatattccccacagataagcgaagatgaccaaacaaccaatctcagattctccaaggttggacacaaggattctctaagagtataaaggcagccagacctggaagcccagaccattggcttccaagacttacctttctctcaaagacttcttagtttcatccttgtgtaaggaaagaatgaacatattctagaagttcccatcttttaacaaacgagtctcaagtgtgattaatcatccactcagtcctgaaggcatcttctctcttctttctcatctccccttccctctcatctccccttcccactctttcctcaactgaagaaacaactttcttgattcttaactgaaagtctgtaattagaggtcctttgtaactctaaaggacattggccaccatgttcttagaggcagagatgggctctcctgtgatataatgctttaatcccaaataactttaaagatgaaattcaaaatcctcagcttagaatactgaacccactcagccagctggagagaaatacctacttggctttctctacagtgaacgattttggtgctacatactcacttctgttgtttggggcttcataaaagttccaccctaatcacagtaactcaacatattaacgaagagaaaaataaggaagcaaaagcagatgactgggtttaagaaaaagtattaaaataaactgccatggtcagtgattctgttttgtggggatgaatgcaaatattttaaaatctgaggaaaacatcagagatgtactatacttcagctggaaatcaatattttttttaaaaaaatggaattttgtccagagctagaagaaccaagtcttcctttcttcattcattgttcaggttatggtaaatgttttttataattacacttcttttctagaggctcaaatacaataaattgttactatgaagtaataaaatagtacacacacatacacatattcatgtacatatttttaaaaacatgctttgagagtgattatttccttttttgccaaggaaagttcaagaaacagatcaacagtctccaaaatactaactagtttttatttgcctttatcatgatcccttcccttttcacttgttgtgggtctgctctaatatttctggtgtcacagatggcattcctgagaaagtcttaaggaaaaacccttaagagtgtaaagacaaatgacaggctgtcagtggatctgtacctttacaaggactaacaaagattccctgcacttctggcaacaccgtacctgtcctaacacttccagtgcgacccaccacctccactcttcatttatcaggagagaatggatttttaaatgtttcctagctggattctctacatactgccatggaaatgtccaaaatttcctaaggcaaaagatggtcatattttttgtgaaaggaaagctgtatatataagtacacatcagcatctcttacccctctctcccacacatgtacactttctataatcatagtatatgcatagaaaaatgactgaaggacttttaaacaatgtggtgcattgagctgactcagaaatgacacacagaaatgaagaacgctggccgggcacggtggctcacgcctgtaatcccagcactctgggagtccgaagtgggaggaacacctaaggtcaggagttcgagaccagccaggccaacatggtgaaaccgtctctactaaaaacacaaaaatcagccaggtgtagcagcacatgcctgtaataccagctactccggaggctgagacaggagaatcacttgaacccaggaggcagaggttgcagtgagccaaaatcatgccactgcagtccagcctgggtaacaaagcaagatgccgtctcaaaaaaaagaaatgaagaacgctacaattctagaaaacagtaaatgaagatttttccaaggcattcggaaatcgttacaccatttggtagggggaaagagataacgacgacgttaaactttgttgagtatgtgtgttaaaaattcagaagtaactgttaaacgattaatgacagaatgcataatttccaaactcactggagagggaagtgggaagataaagaaaaatgaattaacctaataaaaggcaagaaaggaaaagagaccaaaaaaaagaaatagaaaacacaaaataagatggtagaattccaaatgtcagtaatcacaataaaagttaaattaatttcacatatagaaagacaataatagcaactaacatttatcgggtatttactatgtattaagcactgttctttatatattcactccattaatcctcatatcaaatgcataatatagataccattattatctgcattttatgtatgataaactgaggctgataaaatccccagctggtaagtggcagagcaaggactttaattattgaagtctagttttcagcgctgtactctaataggctgggagcttattagaagttccatctggtacacaagcacattataatcttagtttccattttgctatagtgttcttcttcttttccctttctccctcccgcctctaatccatcctcccagtctctgcaatctttctccattctcatacaaatatttaaacatacttgcatatgggagggagtgttttggtcagggtttgcttttacaaaaatggaaacatattatactataatatatgcacttctctgcaatttgcttttctctcaagaataaacattagacgtctttcctgaagaagagacataaagctaacttacccttttgaaaaaaactacttcgtggtactgcatagtttgtatgagcacaatttattcaaccgcctttcagacagaccagttacagagctggtcctaggatcgctgcaacagtccgagggcatagcttccctaacttcattttcaccaatttcaaatcaactttagtttacatttcctggcagaatgcttcacatacatttatttttaatcattacaacactccagtgattcaggtattatcgtccccattttgcatgagaaaacagggtctctgagttattaaacaagttgcctagggtcatatagccacaaagtagttgaattcaaaactcctgttctaaatctttactctgctttataagcccatttatcacccctaaatgggctgtctctggaaacacctcggctaagccaataagcctggatttatctttgctccatgggccatctccatggccccagacctccctaggcacctggctcagagattgaagacggtcccaccctcccatgggcagttcggaataaaaacttcctgaaaactctacctttcagcagaggctagtcgaaaggggcccttttatctcagaggtgtcggcgacgctcacacgatttatgagaatctgaacttacagaaaccaatccaccaggacaccctgaaaagggaagcagaggagacatggcgggagtacaatcaccgttactgcaacacaaccaggaagcgtctggacgcgacgtgactcatccatctctagcagctcccacaccagcagggcaaaggggcacttacctgccaacaaaccattcgactctttcagtcttcagacccctcaaactcctcacagttcactaccacgtgttgcaaaattctctgccccaaaatcactgcctccagtgcagagccaatcagggagtactgcgtcatcactgggcgccagaaaaaaagcaaagccgacattcaagcgagccttgatgacggcaagagcgagggacctctgccgttgctatggtaactgagccaacgcgagcggcctgcgcagagcctcgtgggagtggtggttcgacggtgtcctatgcctgctttccttgcgggcggaggaactacaattcccagcgtgacccggaggcagcccgggcagaagggcggttgctgcagctttggccgaggttcgggctcgaacttggaaaatgctcctggcgcctcagggaaggtccttctcaaagaaaaggatggggctgaatcgctggaaacggttcacaaggaagccgagtcccaaggtgatcccaatcgagagctttggagggcggggactttcccaaggcgcggcgcagtcaggaagccagtcgcggcccgtctgtgcttcctgcctcttcatcctgagctgacacgcccctgccttgaccgccccaaagccagcattaccctgagtgaaatgctctaggagctctggggtctgggcacattacggctttggtgggcagcatcgtggaagaactgtttgtaacgcttttctaaaaccggaggtgtctgctaatgcccatcggggtgaaaggagtttgcaaactccgttccccctaccttaaattttaggaaacttctcgcacatttctttctttttctctctctttttttttttttgcaaatcttggggtaattgatctttattaacgggagagagcttcacattaaataccctgcctatattcctgccccttcacttttacgtaaagtatctaaataaactcaggagtgcaaatggatattgaatacattaatacttgattcacatagtaatttctaaattcaaccaactttcaaaaaatagattctctccgtatctatcacccatttggatgcattagcacctgaagataagaaaaaaataataaccccattttaaacttgaaacatatgtgacatgtgcaaagtcacagttgcaccgtgtgctttccacagactacctttttaacagtccccaaaaagatgcttaaaatctaaatgagagtactaaaatggagaagcttctcagctttcagctacagagcagtttcaccagctgttttcacccttaagttatactttcctaaataatattctgtagatgtatgtggcctttttgarggccccargcgattgttcttgcgatttattctaaatttaccagctaaatgcattggacatattccacatgacaaatatgttgccctagatactagagggcacagactgaagcatcagggagacttggaaactgaggctgctgctatttcaatacatcagttgcataatgtattggatccaagataggatatagatatggacttgatgatgaaaggtaaaaatttagaataatttcttaggactccaaaaggaaggatttttgctgctagtgctcattattactgcctagagaaaaaaaggtaaaaacatagggcttcttcaagttcagttgtattttaattagatcagctctttctttgttgcagtgacaaaattattaagcagtacagctgcgttagttatcagtaagatgctttgaaggtaaagtgttaggtaagtgaaagagtattatatttttcccacctccatgtgtcagtatgctagtttagatatccccttattttattattattattattattattattttaaagagtatatttgagtaagaagcaattcatgaactgggaacgccaaaccaaaagagatttagtgctccaatgacaaatcatcaggatatccccttattttaaaaacacacctgaatttttagtgaagaagataactctatttgttaagtgactattagagggaattctgcaagcttctgggagtttcagaggttgaagaaaggaaatgtcctgatagttttacttctaatttcagattaatacctgactgatctgggtggaaatttatattttctgctttgtaaaacagtaaaagtcagattgattaaccctcgccccattccccagtttttgttgttgttgttgtttgtttgtttgtttgtttttgagacagagtctcgctctgtcgcccaggctggagcgcagtggtgcaatctcggctcactgcaagctccgcctctcgggttcacgccattctcctgcctcagcctcctgagtagctgggactacaggcacccgccaccacgcctggttaattttttgtattttttttttagtagagacggggtttcaccgtattagccaggatggtcttgatctcttgaccttgtgatctgcccgccttggcctcccaaagtgctgggattacaggcatgagccactgctcccggccaaaacacacctgcatttttggcaaagaagataactctatttgttaagtgactattagagggaattctccaagcttctaggagttacagagagtgaagaaaggaaatgccctgatggttttacttctaatttcagattaatacctgactgatctgggtggaaatttatattttctgctttgtaaaacagtagaagtcagattttttaaccttcagtttttattgggccaaacaagatccctgatctgggtaagatgagaaagcctcttgctacaggctacttatgaaaggagtaaggagaggaacacacccttctttaagctaaagattacttggataatctggctaattaatcagtgctttttttttttaatgagtagctttatatttagcatttctatatcttgactcttaaccctaaggaggtttaaaaaaatagcagtgccagggtcctatcccagaccaattaaatcacaatatcaaggtggacctagacaagaaataaaaacaatcagtgtcccaggaaggcttcatgttttctcctcatactgctattctgtgtcttttattgctaatcatgctgaactttctaatgaaatgctttggggaaataataaaggacactgttccatatgctttagtcagaaggatagatttaaatggcaaagttgataaagatattgctgcgtattgatatcatatatatgttatctacagcctacttttggtcctgacagtgtggaacactggataaaggtaaggatatttcaaatttagaataaaaagagtattaagagtcaagcataatcagatggaaaagaaatatgaatagatctccactttgcacatactctgctatttttattcccgtgtgactatgtaagttgccttaattttatactttttagtattttttttcataattctgttgcctctcatgataccatttaagtaggaatgacaagaaaacaggtgtgtagacttcgtttcaaatgccatgagtatcacatgaagaggattaaaggagttgtgaaaagaagccttgggagaggatatggtggccttcctcagatgttggaaagactgcactgtagttacaatgacctagggactaatgggtgaaaactacgtgtgcatcacaaataagaattttctaatgactagtccatccaaaagtggactgggtgttcttatagagatgtgttttctaccactgaagctattttaatggactctaactggtcacttaatgttaggctaatgaacaatatgtttgaggattcagtgaaggggagattgtgttagataacctctgacatctcttccaggcctgagatatgtatttttgagtctgagtaccatttaatttgaaagtgccattaaatcatttcaggtgtgtgcttctgcgtgtcagtttagcaacttgccatattcaattcatcgtgtaccacatgtttcaaaatcatgcagcattttcccgggaaaagaccattctgacagtattttgaagagtgattactcatctaaattgacatgcatcatgagcaccagatcccagatagatataatagatcctaggccagatgtaataatttttaagcatttatttattcagctggtatttgagtgcctactaagtactagcccactgtgttgggtgttggagctaaaacagagcaggtacagtccctgccctcccagggtttacagtccagtggagaataaacaacttactaaagctcatgagagaattaaagatgtaatggaagtatgtggtgagaggcactaatttaaatggagtcaggggaagcttcctggctactgcagaaagcctaacttagatgacgactaaagtggatctaccatcatgaatgctagtctctaggaaggccactcctctatctagtaagactagcttgcatgtgagtgttgagagtcccagtgccaagtccctgcagggcttagtcacacagttagttaccatctcttcagaggcaaagatttaactaaaacaggaagataaaattttgctctgatttgtctgtgacattgtccgttttcatatagttttcagccagcttgactcaatttttatcatcttttatcattcctctaacatttctgcattggctctgtctccattatgtcatcaaatctgtcttgaaaaaaaccaataagtctttatttgatcctgtaatctattctgattcctgaacgatttctttttcatatctaatgttttggatacataacctggactccttgcctttgtatttttcttgtcctcttgtgtccacagttattctcctgcgtcctaatttcttaccattccacagaaactgttgtcataaatgacttcctgaccaaatccagtagtcttttgatagtcctcaaactttttcaggttacattgacatagttaccattgctttattctagaaatcctctcctccatggtctttttgtaactgtttttttcctgctgcttctaatacttccttgttcacttctctgtcttcttttcttatttcattgctaactctgggtgtaccctaaacagttataacctctggaccgaagacttcaaagtccacttgagtggaccaccctttcaaaatcagctgagacctctttatgtgaaagaaggggagaatatatggaaagggtatggagtatagtaaaaattgagaaaggcctctcttcagaacagaaaaggaagatttctcagtggcactggggacatggctgaagcagttaaccataattaatttttaaatatatattttaaatagagatggggtttcactatgttgcccaggctagtctcaaactcctgggctcaagcaatccactgggctcagcctcccaaagtgctgggattacaggcgtgagccaccatgcctggcccataatattttatggtactaaaaataggtagatcagattgatccagacttggaggttttctctggaacagccaaggaacaaggggttcgaggatgcagtaagatagtagctgcatatccacactgagtaggaaaggaaggaaccctttcaaggactcaagttagaagagggaggtgtacagtgactagaagacttggttaggtccaacttcagtgtcataggagtagggagaatgaaacagggagatggatcagaggttgatgttggagaaggggttatcagtttggtttgagcaatggaaaatgttgtgaaccatgctttgtgacatggttcggggtcaccatgtcaataggttgctgaagtggaattgaggggaaagctgttggaatacagatgaacaaccaaacctcaaggctgagatgttggtgattcatcttcagggacattgaaatcacctagaatcaggtagatggttgggtaaaactgtgagtcctgcagcaactcacccaaaatgcaacagtccaccatgatttacaatttatcctcatcttgatgagatggactgactcatcttactccagggcattctgtaacttgattgagctttctaaacattttaatcaaatcatttccctactctccaatcatcagttattctatgtgccatcagacgaaactctataaattccagatgagtattgacaaccctctagcagtcaacctataatatcaatttatctgtagcagtccctatactgatcctccatgactcccgtcaagccagtctccttcccctccatcagacaggtgttccttttgctttgactcacgttgatccctcagcctggaatactcctcctctctgagaggccaatccagatccttcccttgtagctcaacttgagatgcctctctaagtggacaaatcccccttacctacctccacctcctaatcccatcttgtactactctttcacctagaattattttggcatttatatacacagatacagcctcaagcatttgcttttgtacaaagtgattaaaaaagaatgggtagcttcaaaaatttattactcacagaactatttattatatatgagcatgcagtatgtcaagaagctcatgtttgtatccactggttttgaggaaatgaaggatgacattgtaactgctgtctctgccatccatgttgctaggctacaaaggatctgtagtggaccatgggattgatgtctgctgtgggacacaaggaacacatattgagcatttataagatcgtgggaataactgagatagttcctttacaagtaatatgtttatatataacatagttactatgatacgcttttgaaggtgttcagtttttcttaaatcaccctgcattgcttcagaactgtccttgagttgtttattgcacacatgatataggaaaccaaaaacaaacaaaaaaagtaagctatttaagaacagaaacttttacttttgtttccacttaatgcccactccagtgctgggaacagagctagccttcaatcaggacttgctgaaagaataagttgttaaattgccaaaatgttttacttaaatatagggtagctctctcctatgtcttacatatttattttgaaaaaaaatattaaggatgtaatgttttaacacaaacaaatatagagattatgtatagtccttagtatcatccagtagttctttctcctcaaatcttcattttaagtgatatcccaaacacttgccttgttaaagccaagcaaacatttgtctttatttccttgtcagtaccagcctctatccttctttatccttcagtctttctcctcttctctcccaacctctctaccctcctctgttaagaacctgtacaaattccaactcaggtaggatgacacataacacataattatttctttcactcaaggcctgaggaactaagtcaagtctacgaatctgtttttgttgctaattttttgtttgtggatttttaaaacactaaagttgatcaatttatttgtacgttatttacatatgtgcatatacgaacacatacagtatatgcaaaattcatctttctgtctcagaatttaggagcctaaaggaaagaccatgtgccaaccatgaatctaatacatgacgtatgctaccaacataaacttgcatgcatcagaggctatcagaaataatatgggaaaataggtctctaccaagtgacttcataaggagtgaatgatattttcttgactctaactctaatgagatcatgttttcttctggctcatgtctttgcctgtatgttctgttttctacatctttttcaaattacccttcacttttcagctttattcctctgcttctgtctgacttaaagctaatgtatgaaacgcacaagaatttggatggaaaagcccatggcaagttttggcagaggttccaccagtctttccataaagggcaggaggaaaagtcattttcagaataggtcaggtgacaatataaatatcggaaagtacagcttttctgaataaagttttcatgtattcattcctttaacaaatatttattggacacctgttgagtgccaagcactgttcttggtgccaggttctccttgagaagaagataagaattcctgccaacattctacctgagggagacaataagtgattaaatatacgataagatggtaagtactatagagacaatcagagcagaggacggggagaaggagagctggaggagagtgtttacagtttcatatagggtagtcaaagaaggccttactgggaaggtgacatttgagcaaaggcttcaggaggtgagggaaggatgcctatgcgtatctgtaggagagcagttcaggcagaggataagcaagtacaaaggccctaagctgggaacacactgagcatatttgaggaggaacaagcaaggaggtccgtgaggctgaagtagaacgagcaaagggaagattagcgagagtcttggaaagctcacaaagggctgcgtggcaggacctggaagcgcattataaggactttgacattaattctgattgagatcaggagccactgaaggcttttgagtggagttgtgacacacattatgtggctttcattttaaaggagtcattcactgctgtggtgagaggctattccagaaaacctgtcaggaaattgttgtgctttggaccaacatggtagcaatggaggtgatggaaaggggtcagattctgtatatattttaaaaatagagtcaacagatgtcctgatcaattatatgtggggtgagaaagagagagatagattggattaaggacgccaaagttttcatcctgaggaatgtagttgtcactatctgagttggaagaaacacagcaatcatgggagaaagcaggtttctgggagggggaagttaggggttaagttataaaataagttttaacattttttttcttttgagacagagtctcgctctgtcactcgagctggagtacagtggcacaatctcagctcactgcaacctctgcctcccgggttcaagtgattctcatgcctcagctgcccaagtagctgagattacaggctcatgccaccacacccggctaatttttgtatttttagtagatacagggtttcaccgtgttggccaggctggtcttgaactcccgacctcaagtgatccacccgcctcggcctcccaaagtgctgggattacagcatgagccaccgtgcccagctttaaaatttatttaattaaatttatttattttgagacagtctcactttgtcacccaggcaggagtgcagtggcatgaacacagctcactgtggtcccaaccctctgggctcaagcgattcctcctgcctcagcctctgaagtagctaggattataggtgtgcacaaccacacccggctaattttttattttttaactagagttggagtctcactaagtgccccaggctggtctcaaactcctgagcttaggcagtcctcccattttggccttccaaagtgctatgattacaggcatgagccactgcacccagcctaatataagcgtttttattctgtgcaggtaaataaaaacactaaggcagtttgtccacttctgctgtttcttcccccaatcctgcaaatttggtcatgtttttactagactcttgctgttgagttaaaacattctagatggctacagttcagtgattctgtttattccaattttattgaacctaatatatgattgcctaatatgagatgggagatttccttcaggagtactaatttgctgaagtgtggttactctacctctggttcatattcatatgcaagtcctaagggcatgaaaactaataaaatataatattttttatttaaagtaaaatatccatgtctcaggatcctatcactaatgccctaaacaaaagttatctaaatcttaataacttttattcaaatatcaaaattgtgaacatctgttagaacttggtaaaatactgcaattaatttaatattatatatgaaacctcccagaatatttgggggtagatgtttaaacctcaagagtttctccaaaaatggaaaaatgaacgaatcttagtaggtggtagaaaatcagtttcttgagtaggagagaaattctctaactgaacaaatttgttgtcatctttatggatttttttttctgttatattgaagagagtggagaaagcctcagagtttgcagtgtcaaatgcattttttactagaaattcagatttacctagaagtccctggggccaaatcacagatttgaaaacatctgagcaaatagaggatcatgatgaaatctatgcagaaggtaagagaatgcattttctgctgcgatgttaacaattcttaaagcataacccatgatgcatttcaaagtagagaatggaagttttcttactcttgttcttaatttccctttctttctactcccctgaaactattttactctggaattaactccaatattacaagtaaggatatacttaagcctcattttgtttcccaaattagaaccacatccagaggtagtttgatacaacagctaattggtgaatgctgtaagatattagtcctgtgacaaagatggtagcatgttaatttgatcagatattatacagataatttgactatagtctataaatcagttttattcctgataaagagaccctaaaaacagtttaaccttcctatgtcccagaagcatttactcttctggaatttggtattttcgttactgatgccctggggaactctaccatttaggtatagaaggaatcaggaaggaccaacaaaggagactgagaaagggaggccactgtggtagatggaaagtcaagagtgtgatgtcctacaagccaacttccatttggatgactcatgtctccagttattccatttatttcttcatttattcaacacacatatactctgtgctaggtacagttgtaggcactggaagtactggttatgaacaagagagacaaagcccttgctttcatgaaatatacatttcttgtgggaataaagaaaattttacagtgatccagtagtaataagtccttcaagttcagacctgagtcagcaaggagcaaggagtcagttgaacaatgtgatgggggaagcatccaggcagatggaaagggagcatgaagtacagacaggcatggtgtgctgcaggaagacccatgtggctggagcttccccacagagagaagctggcgggagtgaggagaaggtatgtcacatagggctttccaagcctggggaaagaatttagattttactctgagtatgacaggatagaattgaagggttttaagcagaggagtaatatgacagtttataaaatatatgaaggatttagcagggcatggtggtgggtgcctgtaatcccagctacttgggaggctgaagcaggagaatcacttgaattcggaaggcagaggttgcagtgagccaagatcttgccactgcactccagcctgggtgacagagcgagactccatctcaataaataaacaaataataaattaaatataggaagaatggattataggggagaaaaagagagaaaagggcaaccagtgggaggctgttggtggtggtctgggtgagcagtaatggtgagtggtttagagtggttgatagtactggagctagagaaaggagattgattctgaaattggcttggctgatcttgcccaccccacctcccaccctgccagtagagatacccaatatactttagcctgttaagggttttgagaagtcctgcagttgaaaagaaatgtttacttgcctcatttcccatgctgcctagaccatgaacctctttttatcctgaaatctgtatattatcctgagaaactagtgattcacattaggaacatggtttggtatatggatagaacaccaatggatagaacatggttttcaaaggtttatatcattttttttctcctatcataaactatactaatattctacaaaagtagtgttctgaggaacatactttgaaaatctgtgctttaaggtagtttgtatacttctcatgtggtctaacacaaggtatttctacagtttaacccctccaagggaagttttatttgtttttggggggcacttcacagtaaatccccatttaccaatgaatgttatttagtaggtgtgaattattttgcatataaattactatacacataaatgtttgaattattatatgcaagggctactcagtaaatatcttctccctttctctaccttcccctgaaagccaatggcatttgttgctagtatgcttttaacacttcgtttatattactctgatttattttttcctattttatctgtattaaatgcctcttggcatcatttaatgtaaacaccccattccctaagaactaactatgcaataatgatcatcataatgatgaaggtaatgagaaaatagacaaaagagctgtttgatagtaataacaatgatgaaagctatgctaaagcaggcattttccccatacctaaataatttcaggaaattttcttaatagcattaagaaagaaatccaaatggaggttagctttcaggatatcacactctttgattttcctcctacctcaatggcctagtcagctttcctagttccaccttctctcttcaaccgctaaatcctggagttcctcagcactcagtccttgaacctcctctgtgtctaccttcctcctttggtaatttcatccacttctatgattttaaatacagtctgcgtgctgaaaacttccacatttatttcttcagcttggacctctcccctgaaatccagagtattgtagccaataccatatttgacatccctatttggatgtctcctaaacatctcaaacctaacatgtctgggaccgaactcctaatcttcctcctcaagcctgctgctatccttggccttccccgtctcagtaaatggcatcatcatccttgcagttgcttaagccaaaaaactcatagatttctttctctcatgtcctatatccagtccattagcaagtcatgtcaactccacctcaaaacattcttttctgtaatctgaccattgttaatacctccactcccagatccaggccaccatcacctctcttttggattattatacttgtttcccaattggtgttccctacctccgtgcttatcccctatagtttattttaacttaatggtcaaagtgattctcttaaaatatatcacctctgtgctcacatctctcctgtggcttcccattgtactcagagtaaaagccaaagtagctagaattgtgtcaagagtgtaagcaagggaatttcagcctcaggactattgacattttgggctagagaatttttgtgggggctgtcctgtgaattgcaaatgtttagcagcatccctggcctctacctactagacagtagtattgcttccccagttatgacaacacaaaatggctctagacattggcataagtccactggggggcaagattgcacctggttgataatcattgccctaaacattcccctaaacctgatctgcacattacccctccaacctcatctcctgctgtctcctcctcacttctctctgaccacactggcctccttgctgtttttccaacactgtagatactcctgcacaggacctctgcatttgctttccctctgcagagaataatattaccttatagatcctcacttctctatctttcttcccttctttgctcaaatatctttttctcagtgaagctttcttttacctcccaatttaaagctacaacacccatcttccatgtcttcctgtccctgccttttctcttatttacttattgtctctcttccccaattggaatgtaagtttcatgatgctagggcttattttttcagttttgttcactgttgtattccagtatctagaacagtacttgacacgataggtactcaattaatatttattgaataaatgaaaacagtgaataaagaaaatctctgaagtaactgaaatacttaacatgtttttgttttattgtagctcaggagctggtcaatgactggttagacaccaaacttaagcaagaattagcaagtgaggaagaaggtgatgctaaaaacactgtgtcaagtgtcactattatgccggaagccaatggccatttgaaatatgacaagtttgatggtaagaacttacctgattgttctaagttttaacatctaatgaatgtgtctaagaagtcttttaattgttttgaataacaaatgatacatatttaagttttctgtgttttttttagtttttattattggttttaatttatcatggttaaatgtaaatttcttatgctatatcttcagtaaattcatggtgttttaaaaattaaaatattctattacagttatccctaactaactgtgaggaattagttccaggaccccctggcccccacagataccaaactcctcagatgttctagtcttgtgcgtatcctctcgcatactttaaatcatctctagacaacttacaatacctaatacagtataaattctatgtaaatagttgttatactgtattttaaaatgtttattattttttattgttgtattgttatttttaatttttttcaaatatttttgaactgcagttggttgaatccaagaatgtggcatctgcagatagggagggccaactgtatttataattctgcttatgattagaatagcaattaatgctgtttcagagtgcctcttcctcatatatcattggactgtttgatgcagactacatttaagtactcatatgtcatttttatatttataaaatgcttcttatttatctgttagttattacttataagggaggttattacttttctagtttttttttccagaggagagaaaaaccactactgtgcacagagccagtgtcagacaatttattacttataagggaggttattacttttctagtttttttttccagaggagagaaaaaccactactgtgcacagagccagcgtcagacaagttagatggctgacgtgtaaggatttatctaatacactcaagggtctgagtattttttccctgagcatagggatagtcatggtaacagtggggcagctccccatacatgactcagatacccttggtgaattcacctgacatcattctccttgtttaggactctgcaaaatccccagcttgaggatcacaaaactatcagcttgtaaaattagaagaatccttcaagactaggtagtctgatctaccctcctcgccaacccagatagagatcttctacagtgtccctaacttgtagtgatgtatcctctgcctgaacaccttccgggattgggagcctacactttgggtagagcccattcaactgctgtgaggctctaattctcatagaagtttccgttagttaggagaattaagattttgtcttcagtaacgttttaccctatggtacaactaaaataacatgttctctctcaagaacgttttattttttgtaggagttgttaccatatttgaccactcatatagttctatgtttccagattaaatagcaccagtactctcaacaatttttttataccacatggtttctaggtcttatcatcctcgttgctgccttctggacattttctagtttattaatgtcattattaaagtgtggtacttcagtacttcatatttgttctgaagcaaatatatggaatctaatgaaactattacttcttttgatatagtactaatagatctaattatatccctttacttagattggttgatatcatctagtgccatgccaggcctcaatcatcgtatgctggtagagttttttttttttaattgaaatattgaacaaatatttatgtaaccattaaaaaggatatttaccaaaaatgttaattaacatattatctcaatagacacagaaaaggcacttaacaaaatctaacatacattcctgaaaaatgcttctcagcaaactagtaatgcaagagaaattcttcaacttgataaaggccatttacataagacatgtagaaaacaaataccaaaatgataagtgtaagctttatcaggaattacattaaatataaatgcatttaattaaacactccagtccaaatgcagagattgrcagaatggattaaaaatacatatgctatctacaagagacatatgttcaatttaaagtacaaataggttgaaaggaaaaggatggaaaaagatataccatgcaaatagtaagcaaaagagagctacagttactatgttaatataaaaataagactttttatttttatttttttctttgatttttaattttcccaaaaatagacttttaaagaaaaaattgttactagaaacaaaaagtgcattttctaacgataaaagagtcaatccatcagaaaaacataacaactataaatatatatacacctgacaaaagactcccaaggtagatgaagcaaaaattgacaaaattgaagacagaaatggaattcaacaataatacaatcatgtgttgcttaatgaagaggataagtcctgcaaaatgcatcattaggtgattttgtcattgtgtgaacattatagagtgtacttacacaaacctggatgatagagcctactacacacctaagctatgtgagataggctattgctcctaggccacaaacctgtactgcatgctacttaatactacaggcaatggaacacaatggtaagtatttgggtgtctaaacatatccaatcaaaaaaaggtacagtacatatgcagtatataaagggtaaaaaatgggacacctgtacagggtataccataaatggagtttgcagggcaggaagctgctctgggttagtcagtgagtgagttgtgagtaaatgtgaagccctaggatattaaaatacgctactgtagacttaaaacactgtatacttagggtacactgaatttataaaaacatatttttctttcttcaataataaattgactttaacttactccaacttttttactttgtaaattttgaattttttctaacattttgactcttttgtaacacttaggtcaaaacaaaccctcaaaatttttttatattctatatacttttttctatttctgaaattttaatttttttttcttgttaaaaaactaagacacaaacacacacattagcctaggcctatacagaaccaggatcatcaatatcactatcttctccacatcttgtctcactagaaggtcttcaggggcaataacaagcatttagctgtcatctcctgtgataatattaccctcatctggatacgcccaaaagacctgcctggggctattttacagttaaccttttttgttttgttttgttttaagacaggatctccctctgttgtgcagtggtgatcatagctcactgcagccttgaactcctgggttcaagaaatcctccagcctcagcctccctagtagctgaaactacaggtgtgtgccaccacacccagctaatttttttttcctcttttaaaagaaacagggtcttgctttgcttctcaggctggtctcgaactcccgggctcaagcaatcctcccatttcggcctctcagagtggtgggattacaggtgtgagccactgtgcccagcccaatttttttttctaataagtaggaatagactctaagataatgataaaagtgtagtatatacataaaccagtaacatagttgttattatcattatcaagtattatgtattgtatataattgtatgtgctayacttttttttgcatagtattcttaagattttttgagggtgctttattttattttaacttttattttaagtccagggtacatgtgcaggatgtaccggtttgttacataggtagacatgtgccatggtggtttgctacacagatcaacccatcacctaggtattaagcccagcatcctattctcctgatgctcttcctccccctgccacccatgacaggcctcagtgtgtgttgttcttcccaacgtgtccatgtgttctcatcattcagctcccacttttaagtgagaacatgcagtgtttggttttctgttcctgcrttagtttgctgaggatgatggcttccagctccatccatgtctctgcaaaggacatgatctcattcctttttatggctgcatagtattcctcaacgatctagaagcagaaataccatttggcccagctataccattactgggtatatacccaaaggaatagaaatcattctattataaagatacatgcaggtgtatgttcattgcagcacacactcttcacaatagcaaagacatggaatcaacccaagtgcctatcagtgataaactggataaagaaaatgtggtacacgtgctatacttttatacgactgttagtgtagttgttttgtttataccagcatcaccacaaacacatgagtaatgcattgtgctctgacattatgatgactacaacatcactaggcaatagtttttcagctccgttataatcttatggggccaccttcatatacgcagtccattgttgatggaaatgttgttatttgacacatgactgtagttagagacttcattaccccactatctttggaacaactacaaaacataatcaaggaagatgttcagtaacattagtcattagaaaactgaaaattaaaactacaatgagttacctctacatatcttaaaatggcttaaatttgaaagactgaccatactgagtattagtaaggatgtggagaaattggaatacttctacactgctggtgggaatgtaaagttgtgtaaccactttggacaacagtttgatagtttcttgaaaaggtaagcatttagctataatatgatccaatcgttccactcctacacattttcccaacagaaaagaaagcctatgttttgtgggttctgcatttctggactcaaccaaccatggatgaaaaatatttgggaaaaaataattccatctgtacttacatgtacagcttttttcttgtcattattccccaaacaatacatataacaagtattaacatagcatttacattgtattgggtatcataagtaatctagagatgatctagagtataaggatggatatagtttataggcaaatgcaacaccatttgatatcatggatttttgaacatctttggattttgatattctcgggaggtcctggaaccaatcccccagagatatggagggatgactgtacacagatgttcataacacctttatttgcaatagccaaaacctggaaacaattcaaatgtctatcaacaaatgaatgaataaacaatttgtggtgtattcatatggtggaatactgctcagcaacagaaagtgataaactattgatacacacaacatgaatgaatctcaaaataattgtgctgagtgaaagaagctaggtcagaaaaaatacagtgtatataagtgtatgatctaatttacataaaattctggaaaatgaaaactaatatatagtggcagcaggtctgtgcttacttggagcacagtggagggcaaggggaggagtgaaaggaagagtttacaaatcagcatgaggacccttttggggctgatggatatgttcattatcttgactgtggtgatggttttactagcatatgcatatgtcgaaatttatcgtaaactttaaatatttgcagtttattatatgtcaattataccacaataaagcttttttctttctttctttcttttttttgaaagcagtagagctctcaagattgtttagattgaagttctcaaggttgtttagattgaaatcttttagatttggcagtgaaggactctttagtgacttgggtgagggcaattcttggtaagtggagcttttttattcttagttgarggtaaytgctgagggctatactcaatcagttgccattatcagttactatttattgaacactcgcagctttgtatttttattgtactaggattctttatgtaaatatgaatataatactaaaattaattttttaaaaaaattcccttttttgttgttctgtttcccccagatttatgtggctatttggaggaagaagaggaaagtaccaccgttcaaaaatttatagaccatctgctccataaaaatgtggtagattctgcaatgatggaagatcttggaaggaaggaaaaccaagacaagaagcagcagaaggatcctcgtcttaccatggagatgagacataagcaggtgggagggaaaaacaaaattaaaatggataacaggaagcagtctttgtgtaacacatttaataagcttaaataaagacataggctttattatgaaaaagggtgccatctgtggtttggttagggagaataaaaataaaatataagaacttcagaagaaaaataattctcataaactgagggtaggaaacaatttatttaagaaatagccaaaaagaaaaaaaagaataattgattttgaccaagagtattgacataaaccttattagtttgaatgtggtacttcctattataaacacgtagattgtgtgtgcttgagtttggttttcaaattgtaacgttaatattattaatattcttgagaatgttacaggataattcttttccagacaactgaaattcactcatttttttattataatttaaaatggaagacagatctgaattgaatcaagttcagctgttttgaattagaaaagcatgtgagaactttcttttctccaaagggaatagtaggttcttgcaaaaaagactggtgtctcaacactttgtaaaggagtgccagagaatccagaactaagactgatccggaattaatatctgtacatgtgtgtgccatctttgtataacactaaatttctgattgccgaatttgaaaataactgctttaaattattcaatgaaggtatatgtaatcagcactggggatgttagagaaatgagtagaagtatgattctagtttggatttatgacaaaagagaggagagaacgttcaataagctatatagtcattgtcttatcagaagacttatcacaactagtgagtaagataagggtaaagttaggtgaagcaggaaggaaaggacctttcctttctcatagctactcaagccctctaaaggattaataggtttgaaaaaaatgaatgtgctttttcatgtttttgatttccaaatatgatccagaatcactgctatatttacataataataatagaaatgaataaagggttgtggtgttcctaaaggcaataaatcactgttctatcattcacagtgtggcttccaaaaaagttctgttctttcttaaattagaatgcagacatgacctaagtataataaaagcagtaatgtacaccttggacaatcttacaagtgagaaatcattcctaaatgagaatccagaacttggggtctgactcattagattctcaacttttctgtgatgtggatcattcccagattatttgagtcatcttcatctgacttcatctaaaatgttatattcatctttacccagtaaacagatgaattcctcctttcctaccaataaacagtggagttctgggccagcatatttcaaactggttgtattctgaacttcaaaatgtattgtaaggcttttcatatccctttctacttgaaaggccacacttcatctttattatatttgctttaaggtaaaagaaaatcgcttaagacgtgagaaagaactggagtaccagagaatagaaaagmccctgaaaaaatcggccttcttggaggctcagtgtctggtgcaagaagagaagaaaaggaaggctctggaggccaagaaagaggaagaggagattcaaagggagatggtgaagctgcggagggagataattgagagragrcgcactgtgaaagcagcatggaaaatgtaagccagtgtgataagcactgtggggtttctctgtttaagcagtcattttagaaatgctctgaagtttttgaagtgcacaaacattcaataacaaaacatagaagagaaatcactcactattccaccatcttaacaaattaactaatttcatatttccatgttcctcctgacgtggtccctttccatacttaattatayaaccataaagtacatttaatttgtaattctgcttgttgtaattaacacattgcctggagtcctgggatgtgtataatactccattgagttcctataccataatttatgtaatgaccacctccccatactggtaaatgtttcagctattttggatttttcaccattataagattgcaatgagcatctttaagcatagagttttttcactcttttgtattatattcttagaataaattcttagcataatttctgagttaaatgacacaggtctttttctgactcttgaaacattgccaaattgctttcaaaatgggttgttttgctgatgatacttgtttactgtatcatcagcagcaggccagtttatcatactcttctcagccttagggagtatcatcattttcaatatttttacacttttaataggtattacattgattagtttgcatttctttggttagataatatttttaaggttgaacatgttcagtaattgtgtcttatcctgttgtgaattgtgtgtcttattttctgataaacatatggaaagtcaccactgccttactaccactgataaagaaaaagaatatctgacataagaggaagatgaaaatagtcctcacaggatgtagtactattatccatcctcatgcagaaaatgagcttcataagtgaaataactaatgtatttattctgagaaacagcactgatgcaggaactgcaaaagccttggaacagcatgactgaagtgtctgactactcgaactgagaggccacaaagacctattagataatcccttccacccccatcagcctacacagctttcccccctgtgctcttgattgctcttattctacccagtttaaaacagctcagcagtggacatgtgctttacttcttcaagtgccaggctgaggcttcctccagatgccattcctttcagaaagcaatcactggtgttttagtgagttctttctaaggtcagccttgcttttcatattgctcccaagccctggaaaaactaggttgacctaaaataaattgtgaaaacaagtaacgtttaatggtagtaggatgctctgctcacagtgggcactcaacaaatgttcactgaccagtcatttattttaaaagttaagatcttatccatggttacagtgagataggtaatatgttctacttctgggtggatgaactgatttaaactttccagaaagcaatttggcagtaaacaacaagagccgtaaaatagtattatcccttgacctaggaattacagccttaggaaaactgccctaagaaaattatcagaaatccagacaaagatttgtgcagaaagataatttaaacaacattatttataataacagactttcgtaaatattggagaaattgctaagtcatggctgtacaatgaaacaggactgactttttttctgggtagaaatatggatggcttttatgggcgtggtggcacacacctgtaaccccagctactcgggaggctgaggcaggagaatcgcctgaacccaggaggcagaggttgcagtgagccgagatcatgccactgcactccagcctgagtgacagagtgagtgagactccatcgcaaacagaaaataaaaaaaaaaaaaagaratatggatgacttttatacttctccagtttttcacaatgagcatatatttcttttaaaatagatatatattctaatgttattttaaaaaatcagtttcatggtattagaactgtatttctttgacaatcactatcacctgtctataaccatgtaatataacattgttatggcattcatagtttggaaaaagtcaataacatttttattgttgataggccttttgaacctatttgtaagctatcttaaatctgcctcattgcctagttttaaagttatctctttcaagatgcttattaatttcaaagggaaaaataataactctatactggagaagccaccttaagcaagtgatgaaggttaacattaccaataatacaacataacactgtgtaccctctgtaacatatatgagaatgagtgagagaaggggtagggtactctggcatctttctccattttagtttccacaactgtgaactaaaagttcaagaaagatcaggtgactagctggtttgtggccagagctcatgagttctgattcctgactaggtgctatgtttaccacatcattaataatatatactttatacacatacatatacctgtgcagttaaatgcactacagtaggaaggccatagctatgagcttgtttgaattggtgagcaaaagagggatggcctggatgaggaagaatagataggtgggcaaaaaagaggatgctcagaaagatgagcaacaaagttactaaaataattctggttacttgcctaaagtccttttcctttttaagttctatttttttctcttttcagctattttaaaattattctagattccattccctccttattcaataacacctgattcttttgttattcctctttctagtaaccttataagaggccttttagtaagaatctcattcctttcttgagaatcctttttttctcgttctatgggagataatttatgtctatattagagactatcttgtagttgttaactctcaaattttgatcaaagtatggctcagtgtkcaactcaataaaaatactaaagtatctataagactttctacttttcaaagtactttataacaattttatttcatttaatctgtattttataaaggaataaaataagtctccaaaaaaattaccctactatgtagttttagagccagatctaaaaatatgtgtattccgaaggagaattcagtgattattctgctacagtaggttgtaattgctcatttttaaatctattgtaaatatacatgtatttttaaattgttattaatagagagaagaaaaggcaagaagagaattctcaaaatagttcagaaaaagtcatgtttcaaagtactcacattcttccagatgaggaaaaaatggtgaaggaaagaaaaaggaaattgaaagaagtattaatccaaactttcaaagaaaatcaacaggtgggaattgcaatgtctctttactcagcattctgtagtataaatgacaaagagctccatcagagatgggataaaataaaaactaagtccagttgaacctcatcacaaataccaaaactgcccacgccatttgttctttgtgcccagctgacctggtatgcagggcagtacacaaatcccctgttctgaggctattctttgtatactctggtgggatcctgggaaattactggggtgaggggggtaaattgtggacttcttcctaaattacctcttcagaatagcatttaactattattaaccttaaactaaggtagctctctggcagtttttgaaatcttggcttccactttgacagttgtaaggaccattgtgttctggattattcagaagatacaagaactggttacttgccttttagtagctctgatcctaaagcaatgatacacttaaacctgtgcttttctttttaatggtctatattttattttaccttttcttcctttctttcactttatctttttgtaaaaattacttgctgatttttaatataaaagtgaatatcctcttcaggttacttaagcagttttcttcaataaagtgggattgataaaagtatgaattttgggattataacatttcaggtaaaaggactgactgggcagatttgtaaatgagagggttagatgagaaaagataaatatgtayattttacatatcctacaacacccaccccagggccttaggcattgctgaaattcagagaaagttaattgaataaatacgtgaatgaatggatttagcaagagaaaagagaatgttaggaagatactgagggagcttggtaaatgtagggatagacttacaaaggtcctggaaatcaataacaggagtttgaatatcatacggataacaaacatatgaaggaaaaagtaaagtagtcaaagtgattttttaaaaacgatagacatatttgatggtgatattttgaactgataagaggttgtaattactcagttattaaccaacaaaaatttggtcagagttttggcttcaggaaaacagaaggaaatgtagtagggagaaatgtaagacttgcagttaacattttgagaaaagttagcaaaggacttagattctgcattcttcatgagacagatggaattagtattcctcctatataataacagttcagatttcaaagagaaaataagaagagaaacgagtattcagggagtcatcttgagaagacataaggaaaaaataccatgatatatttcccaacaaattagagacaaataaagtgtgttttctaaaaaatgcttaaattgtattgaagtccactgtacaatcatatatattttagatggaactgccaaatatgaatgttagacacatatgcagttttacaaaattagtggccaatcgaaaacagattacttagttttaaaatatttgacatggaaaagctgcaaaaatagtgcagagtttctgaataaccttcacccaacttttcccaatgttaacattttacataagcatagtataattatcaaaactaggaaattagcattggtacactgccattaaataccattaactaaaccatagaccctatgagaatatcaccagtttttccactagtgttctttctctgttccaggactcaatccataatttcacactgcatttatttattacatctccttagtctcctccagtgtgtgacatttctttagtctttccgtgtcttttatgaccttgccatttctgaagagaactggtcaggtattttgtagaattgtctctcgttttggktttttttatgttttctcccccttgcttaaggttatgcatttttggtaagaatgctataagatgtgatactgtgcccttctctgtatatcctaacaaggaggacgtaattactgatgttaactttgatcacttggttaagggtgtgtgctgagtttctccattgtagagttgctgtttttccttctccttgtctttcaggagatactgtgaagctatgaaaatattttgtttctctgtaaactgtcacccattaaggttaacatccattggtggctcttgcctgcaacaattgttaatgtatttgcctaatggtgattttgcgtttccctcatttcttctatacttaattgaaattcttctagaaggaaaacagtcccttctccttcatctatgtgtatatgtatgtatatgtgtatttatgtattcattcatttatgcaattgtttattttattcagtatgagctcattgatatttattttattctatgggtcataatctaatattgttgttgtttacttgcttattcagattgtttcaacgtgtctattgggaaacctatcaagttggctcctttgttctttcaacatgcttccatcctattttggacactttcttttttgttggcaccacaagatactttatgcttatcttgtgttttacctgtcctcaccctagaatcaaccacttctacatggaactttgattccttttgttggaaaaacggtctttggaaactaagatctaggcactaagtgtgttcactgctactggagtgtcatttttttctaggccgcctcagcagacagagctaaaatatatataaaatatatatagatatatacatagatatatgtgtgtatgtatgtatgtatactaacatacatatacacacacattatatttatttctgtgtctatctgtatacatattaaaatccatgagttcagcaacacaagggtcatgttattctccttttccttatttgtaactgacttctgtatctatgaatctacatatatatgtatatataaatatatataaaataactgtgaatttataataatattgtcaaggataatccagcaccacaggtttcagtgtagtctttccatctcgctcacttgtaatttctttctctgacactgagaaacctggctctcattatctctattatatttacttattagggtaatcctagtacactataaaaatagttttagaggccgggcacggtggctcaagcctgtaattccagcactttgggaggccaaagcgggcggatcacgaggtcaggagatcgagaccatcctggctaacacggtgaaaccccatctctactaaatatacaaaaaattagccaggcatggtggcgggcgcctgtagtcccagctactcgggaggctgaggcaggagaatggcgtgaacccaggaggcagagcttgcagtgagccgagatcatgccgctgcactccagcctgggcgacagagcgagactccgtctcgataaaaaaaaaaaaaaaaaaaaaaaaatttttagaattgctaacccataccacagtgggaataaattcactaaagcaaaatattgtacggttatttttggttttagctttggaggaatagtattcagtcaaaatattgttttccagagttacttaggtgagttcttttcttcccctcccttttcagtgtaattatgttattcatttgtaatatggttagtagatctctagattttccccagcgtatatggggtaacatggtaaaaatacatctaccagcctcctcgggctcttacatagacttggttatagataggacagtcctccagtaaaggccacaggcataggcaagccttctgggctcattatcttggtcccagttaacgttcagctctaaaggagcctaaagctgccttgagtaatgaaacttggatactcagcagcctaggtatgaccacaggatgaaaacaggaaaatgcctagctgccttgcagggagtgactagataactggaagytcttgtcagcaccctcagaatgtttcactggtacaaaccctgtagaaacagctgtgtagagtatttgcaggaagactttaaagaatctgtttttaggagttgctatagtttaggttcctttaattcctgtaattgtttgtgctttaattctggattttttttctttttttttttttttttttttgagacagagtcttgccctgtcacccaggctggagtgcaatggcacaatcttggcacactgcaacctccacctcctaggttcaagcaattttcctgcctcagctgggattacaggcacacgccaccacacccagctaattttttgtatctttagtagagacggagtttcaccatgttggccaggctgttctcaatctcctgacctcgtgatccgcccaccttggcctcccaaagcatcgggattacaggcatgagccaccacgcccggcctaattctggattttatttgttcctcccagagtatctcttaacatcttatttgggccacattatttaataggagactgagagaaacagtgcaggctctcttatcaaaactcaagttcagatgcagcactattgatgcatcttttctacacatttcatgtcttgtcaaaaacatttgttttttgtgtagaagctttctacttccagcctatcccattttctctttgatcttacagtgaaatctcttgggggagattcagcaattcatgtgtcactgctaattagcagaaacaacaaaggattaactataaaactcttatactatttggaaaatggccttcttcattctcatccagttctgaaatatattttggttttcttaataagattagaaactctatgatctttgctgcctgtgaaaactgaagagaaagataaaatatgggtgacactaacctacatcttaattatttgggggaaggttttagtttgcttatttggttggatttttctgttaaagaataaaataataatgatccaaagaaatcatcattaaagttatgcttgtggcacagcaccttccaaaagtccacctcaaactaaaccaaggaaatgtagggatactatatatggaaaagaagcctggagtttttctctgacagaatgacgaaaactgtagttaaatatctcatttatataccatgattcctttccaaagatcttagttttatcaagactgcctacacaccactgaggcaaaaccatttctgagctgacacatagcaaccatcctctcagcaatgttttcttatgttaggggagggaaataaaggaaaagcctctttagaaataaaacgacagaaaaagagaaatgccagcacacataggaagattactgggattcatataactctcccctctaggtttattgccaagggcaatgtgtggtatatgtcttgggaggggtttaaagcattattatattttactttatgtagctaactctgtaggaattttccatctaaaatgttaccagttttggtaaagaaattgtttgttatgttctttctttcctgaccctgtaagtaacccagatgtcccattctcacagaggtgacagtgagggccaatttacctaaatattgtgctagtgttttgcatttcaaagttccatgaagtcttttttattacagaggtccctatttttaaatgtattttttttgtctttcaaaaaaagtactgattacattttgatttttaaaaattgaaaaaagagactttggcacaaatgaagcccattccctaaaattgtatagagtagaatatttcccccctaaacactagacatttcagatgaatattataaggatcttgagagccatgtgggtgaggaatgaaagacatcacgtcattgtcttactatcacagtatcctggaggtgaatcaagcatttgtctgatatattctgaagtaagctatgttcttggcatagtttgtgtttatgtgtgtggccaaggatgaagggtgggcaggtaacagggattttggtagagatggggaagaaggtctctaagggacatgaagaaagaaggcaaagagaaggtgatagggagccgtaggtctgccttttctccagacttgaggtcacgagaactcatgagtgttcaggtgataggctgcactgtggtcattcttctgtaaagaacccagagaattttactggttaagcatttactatttggtgagactaaggaattccttcttgaaattctatttctagagtgaaacaatgtaactattagataattacagcaatattatcaactgaaactttttagcagaattaagaacttataaaatggccttatgtaaggggtacatattgacacatttatggataacatgatacaatatgcggtatctgtgatttttaaatacttcagaaaaaaagttggtggggggagagatgaaataagattggcagaatgttgataatttttgaagttgggtaaaggtttattctttgtttctgcttttagaacagtgatagggtttgggttttgttttttttttttttggtaarttgaaatgaggaaggagaaaaaaatttaatatagaagtaaaatgagcatcacatattccaggatataacagacatagtttttttgtctatagccggggtagcatttcacatggcagtggttgtcaaagtttaggcctctaggcttttccatggaacccagcagcaagttcaggtcttagcactgtgttctgggaactgaatgtattttctctaatgctattagttatgagcatatatagttggggttggaggttaccatgatttcctctcttttctttggggtaaaattatgaaaatcaggaataggattggtcatggggtattgcttttacattgcagaattcaatactgcacttcctactggagatttattttgccatgacaaagatcctcatttttttaaattatactttaagttttagggtacatgtgcacaacgtgcaggtttgttacctgtgtatatatgtgccatgttggtgtgccgcacccattaacttgtcatttaacattaggtatatctcctaatgctatccctcctccctccccctaccccacaacagcccctggtgtgtgatgttccccttcctgtgtccctgtgttctcattgttcagttcccatctatgagtgagaacatgcggtgtttggttttttgtccttgcgatagtttgctgagaatgatggtttccagcttcatctgtgtccctacaaaggacatgaactcatcattttttatggctgcatagtattccatggtgtatatgtgccacattttcttaatccagtctatcattgttggacatttgggttggttccaagtctttgctattgtgaatagtgccgcaataaacctacatgtgcatgtgtctttatagcagcatgatttataatcctttgggtatatacccagtaatgggatggctgggtcaaatggtatttctagttctagatccctgaggaatcgccacactgacttccacaacggttgaactagtttacagtcccaccaacagtgtaaaagtattcctatttctccacatcctctccagcacctgttgtttcctgactttttaatratcgccattctaactggtgtgagatggtacttcattgtggtattgatttgcatttctctgatggccagtgatgatgagcattttttcatgtgtcttttggctgcataaatgtcttttgagaagtgttcaaatccttcgcccacttgttgatggggttgtatatttttttctggtaaatttgtttgagttcattgtagattctggatattagccctttgtcagatgagtagattgcaaaaattttctcccattctgtaggttgcctgttcactctgatggtagtttcttttgctgtgcagaagctctttagtttaattagatcccatttgtcaattttggcttttgttgccattgcttttggtgttttagacatgaagtccttgcccatgcctatgtcctgaatggtattgcctaggttttctgctagggtttttatggttttaggtctaacatttaagtctttaatccatcttgaattaatttttgtataaggtgtaaggaagcgatccattttcagctttctccatatggctagccagttttcccagcaccatttattaaatagggaatcctttccccattgcttgtttttgtcaggtttgtcaaagatcagatagttgtacatatgtcacattatttctgagggctctgttctgttccattggtctatatctctgttttggtaccagtaccatgctgttttggttactgtagccttgtagtatagcttgaagtcaggtagtgagatgcctccagctttgttcttttggcttaggattgacttggcaatgcaggctcttttttggttccatatgaactttaaagtagttttttccacttctgtgaagaaagtcattggtagcttgatggggatagcactgaatctataaattaccttgggcagtatggccattttcacgatattgattcttcctacccatgagcatggaatgttcttccatttgtttgtatcctcttttatttcattgagcagtggtttgtagttstccttgaagaggtccttcrcatcccttgtaagttggattcctaggtattttattctctttgaagcaaatgtgaatgggagttcactcatgatttggctctctgtttgttattggtgtataacaatgcttatggtttttgcacattgattttgtatcctgagactttgctgaagttgcttatcagcttaaggagattttgggctgagacgatggggttttctagatatacaatcatgttgtctgcaaacagggacaatttgacttcctcttttcctaattgaataccctttatttccttctcctgcctgattgccctggccagaacttccaacactatgttgaaaggatccccattttttattaattttttttctccttcctcatttcaacttaaaactacctctctaatccccagggacttcatagcatctgtggggtctcctgcccagccacagtagcccacaaaggaaaagagaagttgaggattgctcccttttgtagcaatagagtttctcttcttttggcctgagaacagcaaggagtcacttaggggcctgggtgtagaatgtagctttcttcctgacattccagcctttgccaacttccctagaccattagttgcaccaaagttagttccattcagcaaaaataaattgtaaacttgttgacatttttgtyctcttaacaattcattgtttatttttccatgacggagaattttgatgcaattatcactgagctttctgacaaaagagaaatagctgaggaattttgatgagttacccacttcattaatcagaacaagcatctctagtgacagggttagaattacaatgaagattagatagcaaattgctgttccacctaacgtcaatcattcctagtgacagtagtgtgattacacttcagggaagagcttttctggctaacagaacgagggcaactccagtgcaggtaataaatttagcagagcgagctgtcatttcttctcttcagtggaatccttaacaaccaaatgatgtattgtggaagattttgtggggaggacaccatttcactttaaaagtttctaaatttcaccaggtagtattttattttagaaattattatagataggtacttaggaacagttcttccttcagtgactttctgtattttatttacctatatcaagccttaattattaccacaactatgataaagagatgatggaagttaggaaaagagtgcctgactatatttgaaaatctaacagaaataaaaacatggtacaaaaataaatgaactaggaaataaatggagggaaatcagactagttacctggctagttaaaacttaagttctcctggcttaaacagaacaacccagttgtggttttaaatcatacatcttgttttaaaaagcaaagggatagagcactattgtagttccaaagtatagaaaagtaacgaggagaagcaggcctgggagcatcaggaagtaagctggggggagggaggaatagaaagaataaatagttcaggtctgtggaagtatgccacccttctaaataaaaacagaactagcaactttttccagagaagacggaactgagtatattcctttcccaaatattttcttcgaacacatttatgggactcctgtatacctggataatgtttgctatgaatcaagaataactaagcagctattcttgattcacacttttttttttaatttaaattttaatgggattggtttttttgagcaggcagggaaaaaaccaatagcaagtcaatttcaagaaagtagttgccatacaggtttgtcactttgctcttgttagcttctgtgtggtgaacctgaattataggcctttaaaactgatcattttggtctcaaagtctcaacataagtatttttaaagaaacatattgactatagaatttataaactcaaaatttcccctcctacattcagatatgttcctaaccaatgcttttctaccacggtaagttatgtatacagttttctttcactatgaaagcagcaaaaaatgtgcctttctttttcaggagagatgtttttgcctaatagattagagtcatcaggatgctggaatgtttcagtttcagccttaggtgtaacactaactctttacttgtgattttagtcattaaacctttctctacttgaagttttagcttggtgaagtaaatcataataatatctacaatctttattttatagtgatggtttacaaattaataaaaatagtacacgtaagatgctttgaactttacaaagaaaaggattgtcagaatcaaaggatactattaatagtgttattattatcaagatggattatgtttgttctatttcatcatttgaaataatcctgaagttaaaattagagatagctacacatagaatattttaccaagtcattcaagaggaatctcttaaggggatttggtaaacagacacagaacattttctttcaaccatggcacacaagttaacaccatttttttcatgctgtattttgtggaacaggtaaacaaatgatgcaaaaggcatacccctcaacctggccagctgtatctcttctccctattacaactgaaagagtatccagtattcagcaaatctcctttccttcctctctcccttcctccctttcatcctctccaaaagatctaaggtgaaggtctaggacatgtgccttatttgacatatggagagggctttttaaagtttgccatggtttctcctaatgagaaattataatgaagaatattgtttagtttgtctaaacaagaatataaactaataccctgtttggaaaacatttctggccaaatagacaatttctaagaattctagtagatgctctcttatgttattggtcttttcattgatacatcctctttccctataacctcttagaagtagaggtcatatcaaacaattttgtgcagagtccccaaattgaaacacagtgatggttgcttagcaaatgctgaaatgaagaaagttaagtatttttatagagaaagaagcagtaaatatttgcctgataaatcaggcaaatccttgaaactggcaaatcccccatacttcccacaaagtcactttctatgaggttagtttttgttttaatgctccccacactcagtgccactgtcagatttaccattcccatttatgagacctattcccttctctcaggaggctcacagtctaggggagaaaagtaaactggtgattacaatatagtgtgttgggtgttttggctgaagaaagcatagattgttataggaacacagtggatgggcagttacatttgggtagagggattggtaacaggagggcttcctgagagaggtgactactgtagttaggcagaaagaaggcagaaaagagggacagagaaattaatattaggttggtgcaaaagttactgcagtttttggttatgaaaagcaatggcaaaaaccgcaattacttttgcaccaacgtaatatgaacataggaaactatgaaatggcatggttggtgtcaaggccaaaagctgaaagtaatttgatctagaaggaatgtaaagtttgctgaaaagagagaagatataagcaaggactaggtctcagtgattttcttagactaggatcatgagttaagtactgctttggggacatccttaggatcagtagaccttgtctaatttgctgtcaagtgcatgtagtggaagattataggcagcctgaacatctagtctttctagactcaccaaagccctaaagtggtcagtggtagtagcccagctgattttgttgtttatagctgtcttattctcagggaccagagactccatcctatcttcatggaatctcccccgttcacttgtgtggacactagtgtgtcagaaacggtagtgaattaaatggttggtattttgagctccaagacacctggcagggggagtcatgttggaaacaagttttcaagcttctcaaacaagccccttggttcatgtcatagatgtgacttattccagctccccatgggactggtggcttacaatgacaatgaagtattttagtttaagttgtgaggctgagaatgcctcatttgcatgattgaatattccttgtcattattagcataaaggaattgtgctttgtctcttcctttccattaagacaacagttcctgtatttgtttttaaaagtgtgaggggaaaatctgaggagagggctgtcagtgttagatattagaaacactagcgctgatgggtggtgattttcctaatatttccgctgcagtgtcaaaaacggtatttcgctgcctggcacaagctgattcttgatcataggattaagctggggaaagctgggaccctgtctgactggaagattcagctgaaggtcctgcgggcctggagagactacacaagattccagaagttggagygggagactcaagccttggaaaatgatcttagggaagaaaacaggtatcattatttgtattgtgaaaatctagtatgtttatctaggatatttccctcctgaagaatccacaaataaactttacacatgccaactagaataatcttaaccacttatgaaatatggtaatcacagtttttctatgttacatctcaaactagaaaattttactgaaaattataagtaaacaaaattatttaaatgtgctagccgggagcagtggggtgtgcctgtaattccagctactcagaaggctaaggcagaaggatcactcgagcctaggagttcaagaccagcctggggaacatagtgagatcctgtctccaataaaataaaataaaataaaataaaataaaatatacattgtacatgatcttctttctttaatggaagcaagtattaggattttcccttgtgttctggtgtagtagcattgtaccctggaccatcttacaattcaaaagagggtgtttggcttatatgccaataattctcattcatagaaatcactgtctgcacataaaatgttaattaaggacacagagcacatccatctgggagggccaacctgccaaagtgattcctcccactctaccatcttttgttccacaccttatttagaggttttttgacacctttataacagctccttcttatgtttgtgaatgacacagaattctgccttcaaatgaggctttctttattccatcatcttaaaatcaaataattttcttattattatttacaagttcaagtttgcattcttgaatcaaaatcacagatgtaaaaggaaccatttggttgtttgtttttctttatttcttctaaaaaaaagtgataaatgatgtgcagaacgtgcaggtttgttatataggtatacgtatgccatggtggtttgctgcacctattgacccatcctctaagtttcctcccctcatcctccacccctcaacaggccctggtrtgtgctgttcccctctctgtgtccatgtgaaggaaccatttgtttacttaggggttggggagaaattcatgtttttataagtaatcacttctctactggcagttctgtcattcattcaggatgaaaaatcacatgaatgataaatgtcagtattgttacatagaagggcatggtgcctcttaaagttgtgcaatcctgtgatagcatcaggcctggagactggtgcatggccccttgtcctcaaagaactcacagttgaatgggcaaaacaacatctagagactgtacaggtgttgaggagtattgtaaactgaataatacatctccatctgctgctgagaacgtggcaagaatgtgtagctgtggctaaggagattcctaaagagtgccaggaaaggcattatcaagaagatgggccttgatctgagcttttcatggtcaataggatgttcctaggtagagatggggagactgggatgatggcatgaagcatagccatctggattggctggagattatcaagcatgtggttgtcaagtacgtcaacttctgaatggccttgaatgccaggacatggagttaaggtagtctttggttaaaaaaaaaaaaaaaaaaagtgaatccttgaaggttttttaagcaggagggtgacctagtcaatctccctttcctatgatatgctgggagaaatctttggtgaaaaaaatagaggccaacacagaaaactctcccatagtttgtttctaaaatctcaggacctagtgattgatacaaggaattaggatgatagcttactcagaaaggaatagctggcaggatttgttggataaagaagggaaacaggttgtaaagtggatgcaatgtgagtgcaggcataaaatgagtggacacttggatgttgaagttaaaagtggcctatgagatttacatgctagaagaaacttgtataaggagaatctggaaaatttaagattccgttccaattaaactttaaatataaaagcactaaatagggatttcataatagcataatgtgccaattttttaaaaaagatcttctcagaactttttcttgtatctgtgaattattttcaggtgactatttttaaatgtttagaatggatactaaacattttttaactgccagagttagaaaacatttaacttacaataattttttactataaagctttagagcaaaaaaaatcccagagcaggaaggcacctcaaggatcatctgatccagcccctcattttacagatgataaaagtaaggcccagagacagtaaatgactcaaggtcacaaagcaaagagcagcctcaatggacaccaaatccatacttgttgaataataagcaagtcagggaacaaatgaagaactcagttgcttcctctcctgcaatttaacttgatagggttttgaagcattctttctaaatagacagctcagggataggagagagcatttattatcgtggttactcactatagaaacttagctctgaccagattgacaaaacacaggtaattctgtggttcactcacctggacattgaaattacttattatgttcgttatttaaatgtcagttgttttcctcatcctctagctcccctcgctgacgtgtgtgtttgccacctcgatttccgctcactggcctgtccgccatgaagggccyagacttgtgggcttttttcttttgccccttttctttctgttcttcccactttctctctgaagcaaccacaaatctctctctttttattcgtaatttagcaaccatctttccttgttgagcctgtgctgagtctcacttgcagtccaaggagtcatccacttatttcttctaaaaatgcatcttgcttttcctaataggaattgtggttactctgtttttgttcatgtttattattttaaaagaagttatggcaataatgttacaaaatgtccttacaatattgtgatgcagcttcaacatgaacaaatatttccaaaccctgaggattcatttagtaatacaacaaaattctagtatacacactaaattagaccatttgacatggtggtattgaaatttgaactgtatattcaatttccttagtgtgttcatttttgaaagttggttccagatcttccattcctcctctccccctttctgtctgcatttacagctagccccagacaaaattgggaagaaacatggtttgttttcaacatctgcaccaaaatctcataaatcactacttaaaaacttactcaygtaagtgaataccacctctaccccaataactatggataaattaaaataaaaattttagaaaaatcttctgccagtccttcctgagccctgcttcccagatttctcaattctttcctgggccgcatctctgcccttctctgtattaacctccacagtctttaatcctgccttctcttgcaccagtgctctgggcctttcctggaacatgcttttacctcttccctttgtccctcaagcccttcgttctttgttactgtaattctcacttgatatgttatccctcccgggacattttttttttattttaacaggcactgtctggaaacagtgcccaaagtgggagtgacagagatttgagggtactgtggcaggccagtgaaaaaaactggccctttggcattcttcagaccatctcattcgtttggtcattcattcgttcatactgtttgattgggataaattcattcagtcaaccagctttactgatgtttactgtatactagatcctctcctaagtcctggggataggatgggggaacaaaaatattaaacattattgccttctaggagttttttatctaaatggggaagttaaaattgtacccaaatatttaacacaattgcaacagaagacaccataagataaatacttaggagtgacatgaatgacatccttcattatgattccctggagagctttctagaaatagaaattcatgggtcccacctccattatgatcccctggggagctttctagaaatagaaattcatgggacccaccttctgaaagaggcagaatgtggctaagtagaaaagggcattttttaatttggataagaactagtaaactagtacataggcagtcttgcgtaggaacaggtcagggtgaacccgccaggctcacctggaggtggggaggagaagtgaggctgaattgaaaataggccgtcagatattctcatttccagtactctggatttcagtgttcttttggaaatcatttacggagtgtgcctgttaatcatgttcaattgtccttccctctgctcacgtgggtatgcaggtgagcagccasaarccgcatggtatcttcacctggtaaactcctgatctctctgtcacacaggcagaggacaaggctttcatagcctggctcgctttaaaactttaaaactttttaaaacagtttttatcttccattttgtccctgggggtacctggcacattattgaatgcatgagcttattcattcctattccagctaaacctgctcatcccaaatgtaactgttcatgtcactgcttttttatgttctgcatcagattacagcactcaatcagatcaccagcttgtgattatgtatcatttttcatttgcttttaaaacgttcaagacactttgcagatatctagtagtcttgtcctaagacagtgggtattaccttacatgtgaattttgttctatattttcagggttgttttaaattgaattagattctcaggaaaaaaactcttgtaggataggcagcataatagggcttactgacactgtttttgaggatgaatctggggcttagaaactcagttgctgtcccagtgtcccatgtctagttagcattcttcttctgacttgtaagttccaaaacatgcaccagtcacccagtatcattgagtgttcatcctgggcagcaaggttcatacttaaattcctattcaaaccttttgtattttatattcttagatgagcagagcctgcctttctctgcatgcagttatatatcattgtgatgatcaatttatatactctggctagaaattccctgatttcagattgcaaggaaattgggataggctatttttcataagggaactctgcccttccatttatgattatctggcacctatgtctgaaaccatttctttaggtgagcataccaaagtaagttgcatctgactaaggtttaagaaatttaagtgatttttcgcttttagaaatatttatgttttagtgttatcttttagaaagtatagaaattggcttatatgcaacattgtcactctgctgaagtgagctacaagaaaacagtagtggaactatccttgtctctggatctctagcttctgtgcttctgcctttctgcctcaaaccacaaatacagatatcgtaactacattttctgttttttcttttttacttttttttttttctttgacacagggtctcactctgttgcccaggctggagtgcagtggcacaatctcggctcactgcaatttccacttcccaggctcaggtgatcctcccacttcagcctcccaagtagctgggactacaggcactcaccaccacgcccagctaatttttatattttttgtagagatgaagtttcactatgtggcccaagtctcaaactcctgggctcaagtgatccactcacctcrgcctcccaaattcctgtgattacaggcatcagccactgcgcctggccaactacattttcatatccccgcacaaccattatagagtgggctttaagccctatattgaacatgcatttttttactcattttcttacttttttagtcttgttatagttacagaagtgtttctctctttgccttttcataatgtccaaataatctccttgacagtcaaaaccccagtgctgcttttggctgtttgtgctgtaaaaacaggaaattaatacatcaggtaaatttcacactcctccttccagagcagattgatggaaattgaatttcacattaatcagacacagcaatgtacatcttctatcctgtagaaatttatgatttttactcacttgaataaagtgttacagggtttttttgttcactatttatacactgatttttagagctttgttcttacctgtgttgctatctgatttattgttatttcttctaaaatttttatttcaagattattcagtctcagatatttgttttcataaaagtaaaacatacataaatgtttattaccacctatattatamttttattacaaaaaccatcagtgagtgaatttctaaatatttattgagtacctatcaatgcattagaaggaaacaattaaatataatgaaatatgctgttagcagggttgcttatttttaaaagaaatatagaatagattagaaatatcagagtatatctcttgtggtaagggtaaatattatttggtgaaacttttacacacacacacacacacacacgtatattgagtcacaatgtgacattttttcttactgtaggttgcagtcaaaaaaaggtttaaaagtcgtataaacatttaagaactgtagaaatggtctcctgactcactgagttaagaactttatgatttgcttgatatgaccccaaagagtccatgaggagacttaagcattatgtatgtttaacagaaatggatatggagaacttatatgagtcacctttccaagatacaatccagtgtgtgtctaaacagtatattttgaacctcaaagctgatccctgatactacataataagttccacactcacagctaagttcttcaggataataaccattcacttatagatagatctcagacctctatgtttgaattctcaactgactgccaccaaatctcctaatgcagattcccattgggaagaaaatgtggctggcagtaacaccacatcccaacctcccctcagtcatattccctaacatttataaagtttccaggaatcaaagtgagctcttccttaggaaggtgtagaaaataaatgagttccatgagaccaggggccttgcctttgccctttacacatctagtgcttagcaagtaccttcttggggcagacatgcattcagttcaagggtttggtaaatgagtccttctctttagcagtcctttccctgaccagttcttctttcacaagatcaaccctcagtgttactttgatttttgtaagccttttacttaaattattgacaatttaacttgttaagtgttataattttgttgctttctctttctcctaaacctgtctttttaaaattttcgtgcatagctgaacctctgtctccctcatgcattcatctttttaaagtcattacttgtgtacctcttctttttgctctttcccctccaaaagctttcagaaactatggtaatcaaaaacatgtaacatgcccttgtgacatgaraacagaacagttcctctttcttcttgaaggtaatctgttgaagtgctgacaccttctatgaggagatcctttgcactggggaatttataaagcaatttcatttagcttaatataaaatgttaagcgagagctaagatggagcatttctagaacccttttggacttatgtttcatttatattatcaattaacaaactgtaaatggcttctttattttaatggaagtgctttgttgcttagaaaacaacaactggccactgagtataaccggaaacaagttctccgacactgctttacagaatggcagcattggcatggcgccgagctcctgaagagagagctggctctcacaaaagaggaaactaggaagaagatggatgcactgctgcaggcagcatcactggggaaactcagtgccaatgggttatcaggcatcagtctacctgaggaggcaacagccatggtgggtccaccagtaaaaaatggacaggtacgttgtttttcctgcttagtaaacacttgcatttgaggtttgtgcttttatagctggtatgtcagtcattgtcagattgctttgtctaggctatcagaagattagagctgcctcaatgcactacctttcaggcagtgtttatttccttgaattgaatcttctttttataatcatatataaactttggcatcattggaagttagtagggatttaatatcgaaagggcatttaaaacaactaagtaaaatattcgtttaggaaaagacaggtaaagcactgtctataactcttgaactcccctttttgatcatcagacatttcctttctaaatgagtttgtgacttacaagaggggaaatttaaaatttttctttttctaataagaaaagtcatatgtactaattgtagcaatttgatagaagatcacagagaaaaactcctataattctgtcatctatagataatcactaataacatgttaaagtatagccatctagtctttaagcatatgcaaatttatctcttaatattttatttagcttttaaattttctttagtcaggccattgaggaactcgtctgccaaaattcaggaaaaggaaggccatgtttttttttccttcttaatactaatacttactgttcttctaaaaaaaaaattacgttttcacaatataacatgagcattttctgtcattacatacacttctgcaatagtagttctcaactgagagtatacctcagaatcacatctactaaaacagaatttttgggtgtggggcagctctttttttttaagttccgcaagtggacgtaatacatatcccctgtctaaggactagtattctgtgccaccattttgtaatggctacatgatactctgtaatgaaccataagctggaatttgtttagctcctgtattactggaatttaagttgtttccagtttgccgccattgtgaacaatgcttcagtgaacatcctagtagctaaatctgcacatatccataatgctttacttaggataatacctaaaaatggaatgcatgttctattttcatcttattattgcttcaacatttgtatctctttgattactagtaaggttaaacatttttatattgaatatacacttgtgcaccacatagcaatgttttggcgaatgactgaccacatacacagtggtggtcccataagattataatggagccaaaaagttcctcttgcttagtgacttcttgatgatcttgaccctgtgtagtccttggctaatatgtgtgtttgtatcttagtttttaacaaaaatgtgttttaaaatttttttaaaaaacaacctctttaaaaacaggaaaaaaaagcttatggaataagtatataaagaaggaaaatatttttgtacagctgtgcaatgtttgtgttttaagctgttactttataaaagagtcaaaaagttaataatttaaaagtttataaaatagaaagttacagtaagctaggattaattcatcactgaagaaaaaaaattctaataaatttagtgtggcctaagtatacaatgtctatgaagtctgcactagtatataataatgtsctaggccttcacattcactcatctagagcaacttccagtcctgcaagtgccattcatggtaagtgcccccatacaggtgtaccattttttatcttgtatactgtttttactgtaccttttctatgtttagatatgcaaatacttcccatgtgttacagttgcctacagtattccgtatagtaacatcctgccctggttggtagactaggggcaataggctataccatatagcctagatgcagtagactataccatcctggtttgtgtaagtacactctacagtgtttacacaacaaaatcacctatttctcagaacaaatccccattattcagcaatgcatgactgtatatatatctatatatggatgtagtaagatacagatatatagtgacttgtctcttcatgccctttgtccatttttctatttgatatctttttcttatttataagagttctttatattttaagactattgatgcttttattattatatattgcaaacattttttccattttgtcatttgtctttttggtttagttatggtgtttggtattatacacagttgtttagtttttataaagtcaatcctgtcggcttcttcttttatcactgctcttgtcatgtttagaaaaccttgtggagaagagcttctaccccctcacctccaccctccacataatgctgttaagtacttaattcagacatgtgaaattaaattgtgcactagagggtccccagccttgctttttaccctgattattgctagcaagtaggctagttttaatttaagcttattctctsagcaaggggggatcaggaagatgcttgttgggacttatgtgtaacattttggtcccttcccctaggcartgtatctacctttatggcagataattttgtctccattgagacccaagacagacttytatyttaagaaagagctgtatggaaccttttaccttacaaagtgccactgttyttaaatgaaaaaaaaaaaaaagtcagcagaaagtattttttacctgtgcaaaacagaaaaattactatatatatgtagtaatttatatatagtaatatatatagtaatttatatatatagtaatatatatagtaatttatatatatagtaatatatatatagtaatttatatatatttagactcaagggaacaaaagactccaaatctctgaaatcaagaacaaaagactttatcaagaaaggacagtattgttaaaaatggagcaaatgataatagagggctacaatagaccctrtagagactaagtaaactaatctttttccagcgtgtacagcaaaacatgaccaagtgaaaatataaaatctttagttagatgctcattaattatacagtcataggaactcatgtactaagaacacacaaactgtaccttgaatttttccaaaattatcagttagctaataggtgattttctctaattaagtcagaccattcactcctgctctattaagtactatctgtaccactaagcttttccttcatgttctttattttcatgttaaaaagttaccatgatccaaaagaaaccctgtcgctttactcagggctttgacacagtcttgctaggttaataaggtgtcattaccaccaagtttaaaagaacctaaaacatataccctgcttgatataaattgcttaagcaggtgttctcatgaataagtgttcactgacattactgaaataaaaggttacttttaaaagtgtttaacatgtcagagtttccatatatcacatctttcatttcagttgagtctatggaaagcatttctataatcgtgaaaaatatttttgagtccctaaggatggggtcctgttagaacaagaagcttctgatatttagatagctcatagcatttttctctttaagccattgcagatggcagaatcaaaaacttagaccttagaacatggactcaaaccattctagaagagacactttaatatgacattattttggccaagatagctgtttctaaataaaaattcttgtttccttcccctctgtatagaacttgtaattgagtatggtacctcagtctattaaatgggatttatgtaataaagctttgaaaactagtgatatgctaatacaaaatattattaggtaacattattcttatgtaatgcagatatttgcccagtgatcctgagcttccaaatatttcccacccatagatagtttgtaatgcagatatttgcccagtgatcctgagcttccaaatatttcccacccatagatagttcaggaatagctggaaacggttagctaggctttaacgggaccttgatgctgaaataamtaaatatcctatactatggcatatgattaatttactagtgtcaggagaggcattgaaagaaaagagatatattattcatttgtaaagatattctttggttttcagacattctcgagaaagaatatatcctttgccacaacatcttcaaatttccactaaaattcagagtcaatttatgcatattaaattcatgttttttatatataaaatatatatatttttttatatatatatatatatatatatatctggagtaaccttgcctaattcacaaatgaactgtccaaattagaaatttataagagaagatttttgctattacgaatgtcctggcccatggcaatggttcatacagctgtagccactctcccagttttctttttttttgagccagggtctcgctgtgttgcccaggctggagttcagtagcacaatctcagcccactgcaacctccacttcccaggttcaagcgattctcctgcatcagcctcctgagtagctgggattacaggtgcgtaccaccatgcctggccaacttttgtacctttagtagagacagggtttcaccatgttggccaggctgatctcaatctcctgaccttaagwcatctgcccatctcggcctcccaacgtgctgggattacaggcatgagccaccacagccggccactctcccagttttcatggtgagcagcaatgcatgttttaagagtggtggcctctgaggtagccaggccaggagcacagaccacctttacctgcaatacatggcagttgtgccattaaacaaaacaatactgacctcataaatgttggatttcatcagcacagtcctttaaatagttgagctataacatgtttctctctctcaggagactgctgtgccccctttgtgggaaaagcctcccttgggaagcagtggttgtatgctcagtcctcccctgggaagaacaacaacaggcaacttgcagggttcccttcagaatgtctctctgagtgcacctggcaataarcagcacaagaccctgggtgctgaaccctctcaacagcctggcagcaacgagacactcagaactaccagccagaaagcagaaccgctttgcttgggtcatttccacaaccgccatgtcttccagcaacagctgattgagaagcaaaagaagaaacttcaggaacagcagaaaacaattctcgagctgaagaaaaacctgcagctggcagaggctcagtgggcagcagagcatgccttagcagtcacagaagcacagagccacctgctgtcaaagcccagagaagaggaaccaagaacctgccagatgcttgtgaagtatgtctgttstatcagaactcgctggactcattttaaggggtttttcactttgggctcctgagcttctttgccctgcttctgagccccatgattgttccttttccttgattttgcactctcaaagcaaagaagcctagttatgactagtatatgacaggcacagatagtcaaggatgcctgtaaggatccagttatactgttagcatttgggtcacggctgcctttgaggatctctgttactatgccagttaaagagaaaaatgctgtcttgctctatttctgggtttctagctatgttaagtgctgagaagccaagtcagacaacatcaggtccacatggagcagcccctgggctggcttatttcctagcttaaatttgtagttgttagggataaaacaaaacatctttgagcctcaaataagagcccaagtttctcaaaagccacgtaagatggtttcagttgtgcttgagacatactcattgcatgtggtaaatggtaggataagatgtggtgacacctatggatttgaagcattaggatgggagtcacagtacctgactcactgtgtagactcatgccgatcacacaacctttccatacctcattacacatatttatggagtggatataatatgtagttatctcagagagtagggattcattaaggtctgtaaaaggctttgagcatctcaggtcaaaggagtttgaaggaaactggttagtagtctaaattcctttcctttattttttccctagttcacctgttgcttcccctgggactgaaggcagaagtgactcccgaaattctctttctggactcagaaggaaaccaaagcaattgatgacaccgcatcccatactaaaaggcagggctgtctcggtggtggccttggtggttgttatcttctctcctagagtagaatgtgtacactgggactgaattctggcaactcttgaggttttgagacttggcagaacctgacatcaaaaatctcagaatggtagacatgtgaggagtggagtacaccagagagccccactacttttttcctgccccttttgccaacctttttggcattcccagccaacacacacacaaaaaaacatagctgaaaggtatatcatttttctgtaatttgagatttggattgtgaaaaaaaaaggaataattacacaaatgagaaaactctgagtaactgccaaggwcaaacactgataaaggacacctgtcattgtactttgttaatgttcaaatttgatcagtttacagtaatccaagataagttattattttataatattataacttgttgataggattttagtaataaaacctacaaaccagatatgttaatttgataacatttttgatgcatctagaaacatttatttatttggtacaggcagggtcttcctgtgttgcccaggctggtctcaaactcctggcctcaaggagtcctcccacctcaacatccctaggtgttgggattataggcatgaaccactgcacctggccagaaacccttatttaaactaaactatacgaatagaagcattcttcagaacccacctagtgaatctgctaattgtttttactatatgcttagtccttcactgtacttatgtttgcatgtggtggttggcactttgacaattatattgtggtttgtaaatttgattttttacctgtgacaagattgctggtttaacaagaagtaattacaaatgaaagacactgtgcctgcagtcaattcctattaatgaagaaattggcagtctttgcattaactatctgccaggacagcaatttatgctgtctttgcctatcattaagcttggtcagtaaatacccagttaagtatgattatttttttaaaattattgtttggtcaaggagttagctattttagaagcccagtctactttcaagtagtcttttgatgattagatctagaaaagatgggcaaagggcatattaccagagactctgcttcttaggggtctcttactttaatcccctagtctatttctgccttcttagagacaatttcactctcgccatctgtggcactaccattctttttcagcaaagcagacacttaataactgtaagaaatagcctggtgagttttttgtttattaattcttaaaacttggacttaaattcttttctctaaaatatggcacaaggaactgaaagtaactattggctggcttaggtgagcagaacttgatactcctcccatccatgcccctcttcctatgaaagccccaactgattatagagtcatattatcagaccatcttgcacatttgtttcttttggatcgatatttaatagcctgtcaagaacaggagtctgacactcaaattcattcagatgccagttctccaaatgcctggtacaattccatttcctgcccatctgtatatccaggccttaaaactagattcaaatatattcatcgtgaccccaaactttagtttgtttgttgttattcttatatatacagacatatgtacagtgacttaagaaaaattagcagattcaataggatttgaggaacgattctactctcaaagtacttgttagatgtaattaaagttttctgcattcatcaaacatataatcaaattagaattctggtttctgggtttcatatactaaaagtatcatcaaggcacattataaatcagtaaacaattattttaataaaaatgtaaacaaaataattaatttataaattgttcctcattgctgaggatgggataataggtctttaacctgtagagtatataagttctgtttatctctatatattttctgagattgtgaacattcaasttmcaagaaaaccctaataataacactaaattttactatgaaatggagacrtttctcttgcagtattcctcatattttttcaatataaaaaatattagaactctgttactattttctagctatggaagagagagcaattcaacgagctgaatgtaggcggatcttggcagagaagaagaaaaaacaagaagaagaaaaattggtaatagattcaaaatgcaaactgagtcaaaaaagaaggatttgtccaggtctttcttaaaaaatgaaaccttgctttttcagaactcytgagacaatagagttacatcaactttggaaatggttttttggcctagtggcctgaattccgtgacaattttaggaaaataagggggacagaaacatcaacatcattaacacagcaggaagaaaatgttatgaaagttgatgagagtcagcagattagaagatttacacataaccaagattagtgtattataggtagatgtctgacctactgaatttgcaaagagggatagttcttattttccaaagttttgacctagactatccaaagtaaattttgtaactaccaagaaaaaataaacagttccaacaattgggggttttctggtgaaatgaaagaaaacctttttccccctaaactgtttctaacttggagttagtttttcacagatgacagtaagaactaaaaagtaatcattttttaatgaaagattggtgatcttatttatgatcagtcttaccttcccaagtagaaaaggattcttttggagaaacttttaagttacgtaactgatgacaggttgattgagttttctacttttatcacaaaatgcagacttcttccagagataggacaggcactttggtagacacttgactatcctaaacataaaagatcacatttctgttcaaattgagggttctgatatttctgggttctaatctcaatcaggcccagttaaaggcccaagaggaggawcgtcagaaaagggaggcagaagaaaaggaggcacagcttgaaagaaaacgagaagagaagagactgaagaaaatggttagtattgtctatttggtcagtccctgtatcttgaggtttgctgtgtgtgatactgtggccctatccaccttctttaacccagaacttctatctggaatactcttctctcaccctcacttcttttctctatcttacttagtgaaaagctactcattcttcagatttcagctaaaacagaactttgtccagattagcctttcctgccctgcccaccctcctctccactcagaattaggttgggtccccctttgtggactctcatcaagtatcttcccttcagaacattattgacagttatcattgtgcatttgttttatggctgttttattcatttctacatccccaactaaactgtgatctccataagggttaagggaacagtctgatgttgttcactattgtattggcacccagcagatatgtgtttaatgagtgaataaatgaatgaacaaatggaagaagaagtgataatacacaaagaaataataatacacacagaagaaataagagaaaaagctcttactctaaggttattaaattctgcttgggaagataaggcctaaaaatacaaacgtgtcagagacactgtagtagagtatttgacatcatgtgctacatagacgaaaagagatcaaggggccagacattgtggctcacacctgtaatcccagaacttttgggaggctgaggtgggaggattgcttgagcccaggagtttgagactagcctgggcaagatgttaagaccctgcctcgataaaaaaaaaattttaatcatctgggcgcagtgacacctgcctataatcaccagctacttgggaggctaaggcaggaggaatccttgagcccaggagttcgaggcagcagtgagctgtcattgtgccactgagctccaacccgggcagcaaagtaagaccatctctaagaaaaaaaaagagagagagagatcaagaaagtcatataaggtatgtttcatgaagaatttggagaaattagaagtattttcatgaaaaggaaatttgaatggagaattgtattagtcaggattctccagaaaaagagaaccagtaggacatatagacagagggagacttattttgagaaattggctcacgcaattatggaagctgagaagtctcatgatctgccatctgccatctggagacccaagaaacccagtggtgtaattccagttcaagtctgaaggctcagaatcaggggagttgatggcataaatctcagtcaaagagcaagagaagaccaatatcccagctccagatgggaggcaggaagcaaaaaggggcaaattcttccttcctcctcctttttgaaagttctattcaggctctcagcagattggatgatgcccaccaacattagtgagggcaatctactttactaaggccaccaactcaaatgctaatcttatcgagagacatccttaaagacacatccaaaaataatgtttaatctagcaccccatggtatagtcaagttgacacataaaattagccatcacaagtccaccccttgtcaacatggcacccatgcacatctccttaaaccgtagttaatctgcaaataaagacaatagcacgatcataattccacctaacatgatacaactatccagcatacaactaaaaacatactaaaccattcctcagaagaggaggtaaagtccttgtgtgatgtttactcttctccatgatatcccataacttaaatacttaaataacttaaatagcataaatgatataatattagtaacttaaatactgtgatagaaagttacagtataaaagaataagaggaaagaaaatgcacaaatgtattcatagcaaaataaggagaaaatactcatgacacagtttttgtttctacaactggttacatggtcgtaactggtatttataaataccttcttccactacccctccatattccccttgccttcagcaagcacctcagctgcttgtgattctctacccaacaggtgacccaaaccttcattcctaaagtcacagcaacattcatagtcctgcctggattaggttgtagttttccatttactctaattacaggacaatgttaatactaagagacaccctaacaaatctcctgtattccaaatgtattcttccttaccttcatgtagagtagtagttcagtttccccttggcaggaaggatcagtcaccccaagctagcctcataactcccttctttgccatcgattcagtggcacaaggagccgaaagtggccaggtagcagtcaacttgcagttaagtggaatcattatgtctcttggtgaaagcattcttccctctggaactaagacctctaggctagtaaagcataaagtcatgggaacaggaagccaaaattttgctagtggtattactaggggtaatagtgtaccattctcatttccatcccttgattcctgggcccttgaatcctggctatcagagaaaccatgccatgtattggatactgattaagagcatgtacggacttctgaagaaccttccccagccctgcaaggtattgccacctagctggtgctataactaagtcttcaaagggctattccattgttcgatcaatccacctggttctggatggtagggaacatagtaaggccagtgaattccgtgagcatgggcccattgctatacttctttgctgtgaagtgagttctttggtcagaagcaacggtgtgtggaatactatgacrgtagataaggtgaatctgtaagtccacagatggtggttttagtagaatcactgcatgcagggaaagcaaatccatatctagatagagtgtctgttccagtgagaacaaaatataaccccttccttaatggaagcagctcactgtaattaacctgccaccgggtagcttcctgatcaccctggggaatggtgccacatcagggactcattgttagtctctgctgctggcagattgggtactcggcagtgcctttagtcaggtcagctggtgagtggaagtccatgttgctgagcccatgcataacctctgtttctgccaccatggccattttgtttatgagcccattgggcgatctcaggaggtcaggatcatcagtatcacagtcttccacctccacagtttgttccactgaaaggtcttcaagggcaataacaccggtggagctgtcatctcctatgatagcgatgctttcttcttgaatacctcttgaaggacctgcctgaggctgttttatagttaacttttttttttttttttttttttgaagcagagtttcactcttgttgcccaggctggtgtgcaatggtgcgatctcggctcactgcaacttccgcctcccgggttcaagtgattctccttcctcagcctcccgagtagctgggattacagtcatgcaccaccacgcctggctaatttttgtatttttagtagagaccaggtttctctatgtgggtcaggctagtctcgaactcctgaactcaggtgatccgcctgcctcggcctcccaaagtgctgggattataggcatgagccaccacgcccagccaacttttttttttttaattaaggagtacaatctaaaataatgataaaaagtatagtgtcattctcaagtattatgtagttcacataattatatatgctatacttgtatatgactggcaacacagtaagtttgttcatactagctttaccacaactgcttgagtaatgtgtggcactatgaattagaataaccacagtatcactgggcaataggaatttttcagctccattataacctcatagggccaccttggtacattcagtctttcattgacccaaacatcattatgtagcatatgactgtatatgtattttatactttgggttattaaaaatactgtgttatttattttgttgctcaaattgtttcagctttggccactgggagctctttaaggttggctcctattgtccctttgacatgcccccattattttgtgttttttgggcactttactttctgatgctattcatcttttattttttcattgmcctgccctcatgaataagccatttctctgagggttcttagttataaatggtatttggaaagcaagatctaagtactgagggtctaattgctactgggtgtcactaattctaggaccttggcagttggaggtaggtaatatatgtatgctatgctatgtatacacacctatctgtaatcattctgaatctatccatctgtgtgtgtatatgtacatatatgtatgtgaaactctacctaaatatgagttcatactgatgtttctggctctaatccagcactagagggtttatcctatgcttcccttcttgcttatttgtaaatgccctctgacagcatgaaacctggctcccacaattcatctgtttacttatttgttcaaccccaggatagatgtaaagcagtttcagaactgattacccaaaccccaacgagaaaaaaattaccaaatacagtacagtgttaatgtacagttccatttatctttaaccttatgttttccaattaaaatctgggatacatatgcagagcatgcaggtttgttacataggtatacatgtgccatggtggtttgctgcacctgtcaacccatcatctaggttttaagcctggcatgcattaggtatttgtcctaatgctctccctccccttgccccccaccccccagcaggccccagtgtgtgttgttcctctccctgtgtccatgtgttctcattgttcaactcccacttatgagtgagaacatgcagtttttggttttctgttcctgtattagtttgctgagtatgatggcttccagcttcatccatgtccctgcaaaggacataatctcattctttcttatggctgcatagcattccatggtgtatatgtaccacattttctttatccaatctatcattgatgggtatttgtgttggttccaagtctttgctattgtaaatagtgctgcaataaatatacatgcgcatgagtctttagctggaggcatcatcctatttgacttcaaactatactacaaggctacagtaaccaaaagagcatggtactggtactaaaacagacatgtagactaatggaacagaacggagacctcagaagtaacaccacacatctacaaccatctgatctttaacaaacctgataaaaacaagcaatggggaaaggattccctatttaataaatggtgctgggaaaactggctagcctatgcagaaaactgaaactggacccyttccttacacyttatacaaaaattaactcaagatggattaaagatttaaatgtaaaacccaaaaccataaaaaccctagaagaaaatttaggcaataccattcaggacataggcatgggcaaagacaccaatagcaattgcaacaaaagccagaattgacaaatgggatctaattaaactaaagagcttctgcacagcaaaagaaactatcataaaagtgaataggaacctacagaaagggagaaaatttttgcaatctatccatctgacaaaggtctaatatccagaatctataaagaatttaaatgtacaagaaaaaaacaaacagtcccatcaaaaagtgggcaaaggatatgaacagacacttctcaaaataagacatttacgcagccaaaaaacatatgagaaaaaagctcatcatcactgatcattagagaaatgcaaatcaaaaccacaatgagattctatctcacactagtcagaatagcgattagtaaaaagtcaagaaacaaaagatgctggtgaggctgtggagaaattaggaacacttttacactgatggtgggactgtaaactagttcaaccattgtggaagacagtggtgattcctcaaggatctagaaccagaaataccatttgacccagcagtcccattactaggtatatacccaaagcgatacaaatcattctactaaaataagttttaagttacttaggtcagctcctatttttccctaggtcagcacctattttccccagctccttgagtacagttttgtcatttgtttttaatacaatcagattcatttgtcacagggtacattccatcctggaatccctgacattctggttgattttgttgtttttctactttaaagttcactcttggtaatgtacagtgctatggcttttaacaaatttagagtattataaaaagcagttccttcatgttacaacttcctctgtatacccctcattttttaatttttatagatttagggggtataaatgcggttttgttacatggatatattgtggagtgctgaagtctgggctttagtgtacccatcactcaaatagtgaacattgtacccagtgggacatccgccagcccctaacccctggcaaacacggatttgttttctatccctatgtgttttgcctttttcagaagtcataacagtggattcatacagtgttacttttttcacttagtaaaatgcatttatgattcatccattttgctgcaggagtcaaaagctcggtcctttttatcatcaaatagtattccaatagaacttcatctgcatatgcaagttatctattcctctattgatactgcttccagtttctggcaattattagtaaagttgctagaaacatttacatacaggtttttgtttggactcataagttttcagttcagtcaggtgttcacacctgtaatcccagcactttggaaggctgagatgggaggatttcttgagcccaaaagttgataccagcctgggcaacatagtgagaccttgtctctacaaaataaaagaaattagccgggtgtggtgacatgcacctgtagtcccagctacttgggaggctgaggtgggaggatcgcttgagctcaggagttcgaagttgcagtgagctattattttgctactgcactccagcctcagtgacaaagcaagaccctgtttctaaaaaaaaaaaaaaaaaaagaatttagttttttaagttttcaattcacttaggtaaatacctaggaatgtgattgctaggtagtgtggtaagtcaatgtttaagtttataggtaattgccaaattctattccaaagaggctgcaccattttgtgttcctaccagtgataaatgaaaggtctttttgttgcacatcctcatcagcatttgttattgtcagttaggggggtttaatatgttctaataggtgtgtagtaatatatcattgtggtgtttatttgcgtttccctaacaacaaataatgctaagaatcctttcatatctttacttgatatccatatatcttctatgatgaagtatctgttcagatcttttgtccattttttgtttacttattgttgggttttaaaagttcttcatatattctggaccaagtcctttttagatatgtgatttgcaaatattttctcccagtctaaggcttgtactttaattcacttaacaatgtcattcacagaggaaagtgttaaattttaataaagtcaaccttatcacttttttctttcatggattgtgctgttggtgttgtatccagaactaatcaccaaactcaaagtcattcagattttcagtttttccttcacaaagttttacattttacatttaggtctgtggtctatttggagttaatttttttttcttttctttttttttctctgagacagggtctcactgtcacccaggctggagtgcagtggcacgatctcggctcactgcaacctccacctcccaggctcaagcgattctcccacctcagccttccaagtagctgagactacaggcacacaccaccatgcccagctaatttttgtatttttagtagagacgtggtttcaccaggttgtccaggctggtctcaaactcctgacctcaagtgatccacccacctcagcctgccaaagtgcagtattgggattacaggcatgagccaccatgcccagcccatttggagttaattttaatgtaagttgtgaggtatgctgtaatttattttttatatggacgttcagttgttccagtatcatttgtttagaagactatcttttctccattaaattatttttatatatttgccaaaaatcagttgaccatattgtgtggatctatttctgggctctctgttcttttctgttgttactttatgtctattcctttgcaagtaatactgtctttgattactgtagctttataggcattgtgaattctgctactctatttttcttcttcagaatgttttggctattctagttcatttgactttccatatgaatcatagagtctgggtgtcactatgttacccagggtggtctcaaactcctgggctcaagtgatcctcctgcctcagcctctcaaaatgctggattacaggygtgagccaccacacctgggtcacaggggtgacccagcctactgaaatttttttttatcatgcaagggtgttgagttttgtcacatgcttttctgcatctgttgagatgatcatattacttttatccttcattctgttaatatggtgtatcacatttattgatctgtgcatattgaaccatccttgcatcccagggataactcccacttgatcatagtgtattatcctttgaatgtgctcttgaatttagtttgctactattttgttcaggatttttgcatttatgttcatcaggtatgttggcctataattttttttgtagtatccttgtctgcctgtagtatcaggggaatgctggcctcataaaatgagtgtggaagtgttcctttctcttcagttttgttggaagagtttgaaaagaattggcattaattctttttttttattatactttaagttttagggtacgtgtgcacaacgtgcaggtttgttacatatgtatacatgtgccatgttggtatgctgcacccattaactcgtcatttagcattaggtatatctactaatgctatcccttccccctccccccatcccacaacagtcccygtttaaatgtttgatacaattcaccaatgaagtcctgggtttttctttgttagatttttaaattactcattcaatctccttatttgtttattggttatagggtctgtggcctttgttcatttggttgtttattggttagtagggtctgtggcctttcttccctgttcccagcctcctcgaaccactcagctgtgctgattacctcagtaatctgggtaaggtaagaaagaagtgggcctcttgggcagcagcctacacagctgagggagctgaatgcttactcactctcctctcactttcctccgtgggaggaatcacaggctgtgggggtctctcttggcattgaactatgctgccttgggggaggggtgacctagataaagtgaaactattcttaccttcttcagtgtgtccagtgatgtgctggaacttcactgctggacttctggacttccacaaagtactctcatccatgggtacttgtcaaaatcagtgcttctgcggggatatgatggtagaaagctgctattccaccatcttgctaatgtcttttctctatttatatctttgatttctttcatcattgtttttatagctttcctcacatctcacattttgttagatttgtacctaactactgcatttttggggcactattataaatgttttttttaaactttcatattccatttattcattgctaatatgggaacataattcattttagtatgttggtgttgtatcctgcaatcttgctaaactcactttttggttccagaagtacttttgtaaattatttggaatagtctaggtaaacaggttgtctgctaataaatgcaatattatttcttcctttccaatctgcatgccttttacttatttatcttgccttatcacattagttaggacttccagtatgagatggaataggcatgatgagagaagacatccttgccttgtttcagatctagagggaaagcattcagtatctcaccattaagtatgatgtttgctgtgggttttcatgaatgtcttttattagatgaagggaattttcatttattcctagattgctgagagtgtttattacamatttcactgaaagctytttctgcatctttgatatgatcatgtagwtttcttaattcctctactaatacggtaaactacattgattgattttccaatgtaaaattatccttgccttcctgagatgaactccacttggtcatggtgtgttatttttatatattgttagatttcatgtgttggtattttgttaagaaattggtttttgggggggggggtttgtttgtttttcttttttttttttttggagtctcactgtgttgcccaggctggagtgcagtggcgtgatctcagctcactgtaacctccacctcccgagttcaagcgattctcctgccttggcctcctgagtagctgggattagaggcatgcgccaccacacccagctaatttttgtatttttagtaaagacggggtttcaccatgttggccaggttggccttgaacttttaaccttgtgatccgcccacttcagtctcccaaagtgctgggattacaggcatgagccaccacatctggcctttttttttttttttttttttttgaggtgctttatcactatgttgcgcaggctagtcttaaacacttgggttcaaattatcttgcctcagcctcctgagtagctgggattctaagcatgcaccaccacaccagcctgcatttccttttttttatattatgtttgtcttgttgtggtattaggataatggttagcctcataaaatgggggaagtatacccttttttattttttgaaagagagtatgtaaagttggtgttatttctctctaaaatgtttggtagaattcactggtgaaaccactgggcctggagttttctttttttattattttatattaaattttttatttctgtaggttttgggggaacaggtggtatttggttacatgagtaaattctttggtggggatttgtgaggtttaggtgcacccatcacctgagcaatatatactgaacctaatttgtagtcttttatccctcacctggagttttcttttttaaagtgatttaaaataacatattctatttctttaatagatattgagctattcagttctttttttcttcttgagtaaaacttggtagtttgtatatttcaggaaatttgagcatttaatctaagttttcaagtctcttggaacagaggtcatagtattctcttatgacctttttaatgtctatgagatcagtattgatgtcttctctttaaattttgatattggcaatatatatcttctcttctggtttacctggatatcagttttatcaattttatttcttttcaaaaactaacttttggtttcactggttttctttgttgttttcctcttttcaatttcattgatttctgctttaatttttatttctgtcctcctccttccttaagagtttgctctcttcctctagtttcctaagatataaacttcagttattgatttcagatctttctctttttctttctttctttagagacagggccttgttctgttgcccaggcaggaatgcagtggtgtgatcacagctcactataacctcaaactcctgggctcaagcaatcctctcacctcagcctcctgagtagctgagactacaggcatgcaccaccatgtccaattgattttttaaattttttgtagagatggggtctcactgtgttgtccaggctggtcttaatttcctgggctcaagagatcctcccaccttggcctcccaaagtggtaagattacaggcatgagccaccatgcctggcctctccttttctagtgtgtgaatttactgctgtaaatttccctctaagtactcttttacttgtatatcatattttgatatttttatctttacttagttcaaaatatttttaatttcccttgagatgtcctcattgtcccatgggttattaagaagtttattctttaatttttaaatatttgaggactttcagataactttttactagtttaatttctagttttaatttctagtttaagttccttatgttccaagaatgtacattgcatgaaattgtaaagttttgctttatgacccagaatattgtctatctcagtgaatgttccatgtgcacttgagaagaatatgtatagtactatagtactcagctgccattggtctgctctagaaatgccaagtcacattgtttgagtatgttttactgtgtcttacggtatctatatctgtattcttactgattttgtgcctgcttctatcagttattgagagaggactattgaagtttctaactaaacttgagacttatttctcctttcatatctatctggttttgcctcatgtactttgaaggtttgttcttaggtgcatgtatgtttaaaaagacttacatggccaggggcagtggctcacgcctgtaatcccagcactttgggaggctgaggcaggcagatcatgaggtcaggagatcaagactatcctggctaacatggtgaaaccctgtctctactaaaaaaatacaaaaatattagccgggtgtggtggtgggcacctgtagtcccagctacttgggaggctgagacaggagaatggcatgaacccgggaggcggagcttgcagtgagccgagattgagctgctgcactccagcctcggtgacagagcgagactctgtctcaaaaaaaaaagacttacatatatgccttataaaattgaatgtcttatagacatcatatagctatgtcttgatttagcatctaatttgataatctcattcttttaactattatgtttagcccattaactttaaagtgattattgataaaactggattaaaatctttttttttttttttttttttttgagatggagtctcactcttgttgcccaggctggagtgcagtggcgtgatctctgctcaccacaacctctgcctcctgggttcaagtgattctcctgcctcagccttctgagtagctgggattacaggcacgcaccaccacgcctggctaattttgtatttttagtagagactaggttttgccatgctggtcaggctggtctcgaactcctgacctcaggtgatccacccgtcttggctggaatagctgggattaacaggcgcccgccaccatgcccggctaatttttgtatttttagtagagatggggtttcaccatcttgaccaggctggtctcaaactcctgacctcgtgctccacctgcctcagcctcccaaagtgctgggattacaggcgtgagccactgcacccggccacaactggattaaaatctatcatcttgttagctattttctatttgttgtacttattctttgtttttcttttttccctaccttatctggttttaattaagcatctttatgattctattttattgtgtttttttggagtttttatacctctttaaawatatatatatatatattgagatggagtcttgctctgtcgcccaggctggagtgcagtggcatgatcttggctcactgcaacatccgcttcctgggttcaagcaattctcctgcctcagcctcccgaacagctgggattacaggcacccaccaccacgcccggctaatttttgtatttttagtagagatggggtttcaccatcttgaccaggctggtctcaaattcctgacctcgtgatccacctgccttggcctcccaaagtgctgggattacaggcgtgagccactgcacctggtcctcttttaaaaaatatttttagtggttaccctagtgtttacatttttaaaataatctccttctacctgagtgtcgtagcatgtacctgtaatctcagctactttggaggctgaggcaggaggactgcctgagtccastagtttgagacaagcgtgggtaacatagcaagaccctatctcaaataataataatgatctctttccaccttcaaataacactttacatgtagtgaaagaaccttctatcagtatttcccagttccttcctcccattccttttggtattgttgtcatgtcatatttttatgtatactataaatagccaatatcttgttaaacttattgtttgaacaattagttttctcagtggaattaaaaataagatgattatatttaactttatttcttctgtttctgatgctcttcatttctttgtgtagagctaagttcttaacctatattatattctttatgcctgaagaactttctttaccatttcttatagggtagatctgctggcagtgaattccttcagtttttatttgtctgagagtctttatttttccttcacttttaaagtatgttttttgccggatatagaattgtgggttgacaggtgtttttttttttttctttcaacaccttaatgatgttactctawtgttttcttgcttgcctggtttctcacaagacatctactgtaattcttacctttctttctttgtgggtgtcttattctgttcaggctgccataacaaaatgtcacagactaggtggataaataactgaaatttgttttctcacagttttagaggctgcaaagtccaagatcagggtgcctgcatggttggcttttggaaaggggtcttcttggcttgcagacagcttcttctcactgtgtcctcatacagtctttccttggtgcttctgtttggagacagaggggagagggagagagcgcatgcgagagagagcaagcaagcacaccacggtatcgcttcttataaggacattaattctgtccaattagggctgcaccctaggaccccatttaaccttcattacttccttagtggccctatgttcaaatacagccacactaggggttagggcttcaacacagtaactttagggggacacaagyattcagttcatgacagtaggtaatgtgggtctttccctttagctaccttcaagactttttctttgtctttgatttttagcagttcgaatatgatatatctaggtatggttggttggttggtttggtcttggctttggtggtcttaagcttcttggatatatgattttgtgttttgttactgattttggaatatgtttgcccgttatttcttcaaattatttcacttaccccattctttttcttttccttatgggatttgttatgccattgttacattgtttcatattatcccacagctctcagatgcactattttgtttttcactctttttgcctttcagtttgtgtaatttccattgccctattgtcaggttagctggttctttccttggctgtatcttctagcagtaagctagttgaagtgcctctttatctctattaccatgtgtttttttatttctagcatttttattttgaatctttttttatagtttccatgtctctgctaaaattacctatctgatctggaatgatgtctaccttttccattagaacatttaacattatttttggaagttatttaaaattccctctctgatagttccaacatctctgtcatatctgagccttgttctgatgattgcctcatcttttcagggtgtatttatttcttgtctttgggtatgccttgtatttttttgttgaaggccagacctgttgttcagggcaatagaaactgcaacacgttggcctagagtgtggagatttgtactaatttagccgggaattgggctatgtttgaagcttgttgttgccgtggtcaccattgttgaggtttgttgctgtatgctgtagacatcagagactttaatgtcttctagtgactttgtttttgcttcctcttttggttttgggtcttccttttgtgctgctccccagagagaatctgttgtttacagctttctcagctgtaatccactattattattggaagcttatataagtgtggtgattgggtgtggacgatggggagcattctctgttctgattaagtctcagtgtttggaatgcacagctttaagcactcagataatttctgttcccactccagtggtagagcttttttctgccccctttttccctttatccgcagtgggtatccaccactgtctcagtctgtgaccttaaagaccttccctctggagaataaggcttccccaacccctaagtgagatagggaggacttgtctgggcagaatcccctgaatccccttccctcagatgcagtgctaatctgccagtgtactgggttggttgctaggacagataaaccttttgtttcctaaggaagaatgctctgggaagattttgcagttgctgctgtgcctctccccagccagaaccatggtgcaaactttctgtggattctccatgatcttctctgtgagagcctggtagcgttcttataagaaaagccttcaaagggatgagaagcacccccatgactgtgatccccaggagcttcaaccttctcatgctggcccactcactgtctgcctccatcagttcaccaaaatttctagtttaattgtcttactcatatggtatccagtggcttctgcctccggtaaacaaatgcttaggtcctgtgcctccctgaagatgcctgtctctccaaatttgggggtagcttcagatctctgatcagttcacaaaaagtcattaatttgttgcatgaccagctttttccttgttggaagaaaacttatgcagaacaagaatggtgaaaaatacattactgaccaagagatcattttatttctctcactatatcaagcccaaacattttccttttagaagctgcagttcatagcaatagataagaagattttgtcacatagactagtttccatttcattagtcaactggagctatctaaattgagataggtgcatttataggctggctatacttgagtcttctttgaggacaactttagatataaaatgcacatggcaattgtcttcttttccttctggacaaagatgctctacacagtgtgcttctccactcagattttcataggtcttattcctttttacccatcaagttctgccaagcaattctttacttccttatatgctttatataacttttcccagtaagcaacctccaaggccatagtagtgttattcctctggatatcaaaaagatagtggcacttctgaacaagtgccttctgagacttctctgaatcatttgtatcctagatgtgtttggttgaactctgcttaacctcttctatttgggcgggtatttttgctcattgagtgtaccagcaaattgtccaacagaggtaccatgttttctaatgacatagataaaaaaaaaaccctactgttgatatgataaagaaagtctctggggcaatcatatatatttctttggagagatattatgagataagcccagttatgtgtgtatagggtgctatgacaccattttagataaaggaactggaagaattcttcagggataagccctcatgacagacctgtcctctatattcagcaagaggtggtacagaggcaagacatggctacagcttagtgtccccatgaccctgccagaaaagcatgttgggtgccacagtaaggtggccactcagaggtctcacaaagtgaccttctgaaaataataatctaacctcttcttaacacccccctgtatgtttattaaatgcttatacttaacaggcaataacttttatggctatatatacttctgattgatggacagttgaagtttgcggttgaaaaaataattttatcagagaagacaaggcaagatttaaagtttttccataattgcttatcaagcatatttgcacactgaacaaatatctgtaaagcatttacttacgtagatgttagaatgtagcaatgaagaagacagataacagccctgccgtctgaaagcttctatgctagttggggaaaacaggccaataatcaaagtaatgactaaagaagtagggagagagtggtatagttggtggaagcagtatgggaaatacctctctgaggaggtgatatttgagctcctggatgctgaggcggcctccacagtgtctagttggcgggggcatgttaaatgtgagatacctattggacatccaaatgaacatgtcagatatgtgcttgggtatataagcctggaccacaagactgtgtacgcaagtgaaaaacaagtcaatgtttataatggtctggaagtagctgtaatcagcttgggagattgtctggatagagtagaaatgagagtccaagatcaagtcctaaggactataaatagctatttagaggataaggagctagtgaggtagaaagagaacaggagagtttagaatcaaaacaccaagagaaaaaagtatttctgttaggggagtggtgggagtggtgaatttggctgaatgctaccgagttcaattaaaagtagcacagataagtgattctttgatttggaagcccagcaagcattcatgacctaggcaacagggctttcagtggtgttctaggaaaggagcctcattccagtgggctgaggagagaataggtgaggaactagagaccatgagtacagatgcggatctcctgagatcagagatagatgtggagctcatgagaaagagatccgcatctatactcatggtctctagttgttttttgttagttattttttatttttggtttttttttttttgtttttttgttttgaagaggggagatactggcacatatttgcatactgataggaataatccagtagtgagggagaaattcgtgatgcagaagagcagagtataaatcacaggagtgggtaagcaggaatatattctagagcacaaagggagagtagcgtacaagggacagaaggccaagagttttggggcagtgtcaattgccctgtacttttttttttaacatagctgtaatttctggcttttctcctaaagcatactagctgacaaagctacacatttatttcagaaagaagcccagattttatatccctttttagcctcagtgatctgtgttctatgaaacccctagctacatagatccccactataagtgccatctcaaaacagcatcatatcatgtaatcctcacagtaaatcatggatgcaggtgctattaaagacattttataaaccaggaaattgaaaatgtggtaatattaatkaaatacaaccagttctatcgaggaacccttaatagagggaggagatacatatttgaattaaattgctatgtaagaatacaacattttgactcaagcagaactcatgtttttctttatatttttccatggaagtgtagactttgaaaaagtctggttttccccacaattcagctgaaaataattttccttttggagctgattaacaccagccagtaattattctaggaggatagttacaccataacttatctctgcatgggaacaagttcttttgtctgagcctgagggcttctccaaaggttattatctgcattagatgtctctctgcaagatgcagctgctgccttaatgctacactgacatttcagtggatgtggaagggtcagtttctgttttcctccccacttaaccctcagcttcctcttactatgcatgagaaaattgttgtaaattttctctctggccatttcattcaacaagtatctcaagtgcctgraataaagagtataaagcttgttttggtttaatggctaagagaatatggacatttcatttttcagagctttcacagaaataggcagtttgtattggaaaattagagcaattcttccttccatattagaaatgttccattgctctctctgtaatgtttctctcacagaaggctcaggcacattaagtagcttgccaggatcagccagttcaccactgcccttttcctaatgtgaaatcgtatgaagtaaaggaaatcagcttaaattaaatgtttttgtatttatgctgcaaagatgacgactatgaaagcagtcttcagtctttgttgctcttgtgtctttcactgcaggtgtcacttgctcccactccccctttctgggtagatttctttttctctcacctttacaataagctatttttattaaaagagaaaaaaggaaataatgatatctatagggtcgatcattaagtttttgtcatctttcttggtcacacccctgaggggtgcagttctttgagggtcatggagtgtcttttctcagtgtattaccaggaatagttcatctttttccttcttagaagagggaaggtagcttaatgatgatcaactatctttaacttgcctctggacttattgttcttcacttaaaaagaaaaatactagtaagaatattcttccagacttttaatggagtatcattaaatctctatcccatagtttaaatgaagtggctgtatggctgggtttttcatataatgagggggaaaatcctgattgctctcctaactagatgttttaccttttagttacttggtgagagagaaattatttctgtgaacaatactgaataaatccacgaatatgcatagccctgattcttgtagactcatgaccagcttctcctgaccctcttagcagaattatttccttttttttaaagaaaaagccctattatccagagctctgttatcatgattaacacaccattcaatggttacatgttcaaattaaattcattagcttttcattgaaatgaaactcattcgttttttgatcatagcattttgctttttaatcttttccagaaagaacttgagaagcagaagagaattaagaggaaccagcasctggaagcaatagccaaagaacattatgaaagggtcttgctaaggaaaaaaggtctagagccttggaagagattgagaatgcaaagcaaacaaaacatccaggtacactgtcccactgttatcccccagattagaaaatggacttttccaaataggatggatgcccagttaagcttgggggagggtagggtttggtgatttaaagccagaaagataaattaattgaatgtgtgtatttgttttggatacaatttttgatttggtcttttaaggtagagaaggacttttgtaattgaataggttggaaaaaatgagagaaaatgttttattagagatccccccaaggtaagatgaatagaagcttctctcagtttgagtaagggaaaagttattaccataaggtacattagtcaggtttctgcctgtgataaagttgcataacagacaacccccaaatatcagtggcttacagctcaagtatttatttctcactcatatgtctgtgggccagttgtggattgagttcaggtctctccccaagcctctcattctggttacagcagctactcagggcatgcttttcacctggcaactgtcagagctacaaaaggccaaaccaaattatgtaaacccgttgcttgtattatgtccacattccattggccaaagcaaatcaaagggccaagctcaaagtcattgaggagagaaagagctccatccactctacagggaggaactgtgaaatcacattgcaaagggtatgggtgtataattctattagagagaacagaacagtaattcactctactgcagagagatatatgaaatcagacaccgcagaaatttctaaaatttccctaacaaatttatccagtgcatgcaactaaatgattaaaaattcaaaatagataaaatgttatctcatcttttggctctcagtctgctgagatgagtccaggacaggcagaaatctcaggtgccacagagacctccgtggtggtcattttggccaataaatatgactgccaagagactcacttgagtcaatcacattcacagtgccagatatctagacaaggcttagaaaaatgtgtcgctgtttagagaggactaagagagaaggcttttcccctcttgcctcttaaaagaatataacagttacttttaaaaatctataaattctgatttgtatgtttattttgatagaatgatactcagttgaaaagacattaaattattcatgttattttctatcagatggttttgtggtttattgataatgtctaaatttcaatgctggtgacagctcattccacaacactaattgaaagtattggcatttcctcaattagacagtggttaagtcatgagaaagagaggtttgttgtggagttgctgtccaagctccaggagagcaaattgagaatgttgccagctacccactccaaaactcaggggaagtgaagtaatggcttagaggttggttgttccatttccataaccagcaaatcactgtggtcttcagggagctggcattgaaaggccatgcatgatgtkaatctataacctccatagaataggtcaacagtcaaagcttttaggacacaggctgcatgtaccttcagattattctctaccgactgcctaaatgtgttttatagcatcatttccaaaggtgatgtgtttgtttaaatgatttaaaatttaaggaataatatttctcatttaaaaaattgtccaggtggcagaagaacattactctttgttcctgcagaggaaatacatgctgacgtggttccagcgtagtcaggaaagtctggctagaaagatggcccaggctgatcaattttattcccaaatactgcttaagagagtcatccagagctggctacaggtaaggacatagggaagggtaccttaaatacatctcattgctcaattctatttaagaaaastaaatgaaatccagaatgtccagggtcattatgttttttcaagaacaaaagagtagtcaatcccattcactgctttgaaataaatgtgaaaatggtaaatcagtgttttattagtgtaaaatcctaagcctgtgtttgtttcacggagtgtgtataaactgtaagttatcattccatcagcttttgtttttatagtcatttcttgtttcttgtctcacagtgctcaagtgatttagaaacttaccccttcaatcttataactgtttctattcatgtgttctcttaccatttttaggatacattatagaggatattttcttggcttccaggttatccttttctttgtatgtctctagtgtcatttgtttcttttgtttcatttctgtcttttgtgctgtttatttgctctaattctttgtcaactgatattttttgtctcacttttatttctgtcttcatccccagtacgtgattgatctgcaggaagaagtaagaaaattttgtgtacattttcttcaaaagaagattttcagggcctggtttaacatggtcagggaggtgaagatcgattctcagggcaagcatgagattgcagcggagcacagtgacaggtgaggttttgatagtgaggaaaattcactctctgacttcacaattgctcagcaatatattctgctcctacaatgtgtctgcagagatgagctggaggctaggagagcggggaaacaccagtcaggggtgggagtcccggctcaccagcaatgtaataaaccccctgggactccagggttccatctttaaaaagagaagtgggaggaggaggaggcctgccctttctacctcacggaaactgccaagagaataaaatgatgtgacctatatgaaacacacctaagcaaaagtactgtattctttgttagtcaaatatagttttattttttaagttcagtttctctttcaacatcatttattgtgaaatgtacgacaaatatagaaaagtgcttaaatcatacaaatacagcttaacgaatgactgtaaagtggacaccctttgttaccaccactgaggtcaaaacgttgaacattgctgtcgcacaggctccttcccaagtctctcttaaactactctcctgacatttacaatgaacatttgcttttctttttacttttctcctaagtatgcagccttcaatgctatagtttttcctggtttggaactttatatacatggaatcatactatatgccatattaatatttaaaatmgttatgttktatttaatccagttgtctttgagaaataaggtattctgtataagtaagttttatatttgttttctaattttaagcatttggacagaatgttcttaatttcattatgcacttccctttaagagtggtgatttggtgtcattatgagcatcagttagtgtgccgggtgtattcagtgatgcctccagcttttttgaggtatgaagactgttgtgtgggtgtataaaaatgccccttttctcaacattactctgttgcccgggctgaagtgcagtggcatgatactgcaacctctgcctcctgggttcacgcaattctcatgcctcagcccgccaagtagctaggattacaggcacacaccacgacacccggctaatttttgtctttttagtagaaacagggtttcaccatgttgactggtgctgttttctttttatttgcatgtttgtgcatgggtgtttatttctgttccttgtaatagtgttcctatcttattgccatgagggtgcctacctccaccaaaacctgtttgtccttgtttaattcacagatactggaaatcagtggagtgggaaaacagataagcaagttgattatagttttgtttaaattaaaacaaataagcaataagtgagggcattcagaggacctccctttggataaatgatttagctttagagtttgaagtttaggactcaatatctatgtgaccctgaacaaataacctttcaaagcctccctgttcctctctcataaaatgaggatagcaacagaacctatctatctatcttatggattgctgtgaagactaaacagggtactatagtaactcactcaatgcactgcttggcccaaaataataactaaccttttttttttttttagtttagtgtcattgtgaatatattattattaaacatcctttttgcctgcctatgttttctttctgtttctcagccactatatacaggctgagagattcatttggggcttttgcacaaaccatctcatctgatagcagtaataacttggatgtggggagatgtcattatttccatttttcaggcaaagaaataagcaacaggcaggtaggtgaattgtcaaggtataaagataacaaaaggttgctccctgaactccagattaggttttttgaccctaaaacattctcttcttgctacatcagtcttcctccccatttttctaattctccctctgtcttttttgtttgtttttgtgttttgttttgtttttttttttaccctgagacaaagtcttactctgtcacccaggctggagtgcagtagtaggatctcagctcactgcaacctccgcctcctgggttcaagcgattctcatgcctcagcctcccaagtagctgggattaacggcatgtactgccatgcccagctaatttttgtaatagagacagcgttttttaccatgctgcccaggctgatctcaaactctagcctcaaggaatctgcccacctcggcctcccaaagtgctaggattacaggtgtgagccatyttgcctggcctcatttttagactataaaatagtaagatagtcatcctatttaggatttgaagttgtgaaatcaatgtaggaatccatgcaatcaacaagaaccaaattctcagccaatgtctacttgatataaaagcattgctgtgatttcatctcttcccactttgctttttgtttaccatgttctggccccactggcctcctataatgtttcttagacaaacaaagctcacttctgcttcagagctttcacataacctgatctcatcatttagctctctgcttaaatgtcacctccctaaccaccctacttgcatcactgtctatccattaaactgccctacttccttcacagcacttaagactctctgaaagtatataatttactgtttacatgttaaacagagtggaagcaccacatcttgctcattactgtgttctcagtatatgacagcgctcagtacataggtaacacagtaaatatttggtaaatgtatgaatagatgaactttattgcaggaatgacactaatatttaaggtcaccagtctttaaaaggggctttaacattaaaaaattgatattcagagttcatattcaattttatatgaatgaaataataccatatagaagagctgtggatgaaaggaaggagagacatctattggtcttaagcctgacctttaagctgcaataacatcgagaaagatgattctcaataagaacataacttgtaatcttacatatctgtatcacttccggataattttataaatctagctgagctggatcagtatttataatatgtctgatattgtcttgctaccatagttcttaaccacagtatgaacatgaagtaggtagtaatgaaagtcacagacctacaccccagaaaatgcatacatgcatataacatacaactttacacaacatgtcaaggagtttatgggacccagcttaagaacccttaccttggtgacttaaatcatacttattatacaatacacccacatgtaattatcaagacatatttaccaagcataaaaaaatacctaataacatggcccctggtgctcataatttagtagaaaacataaaagattagagagaaagagagagattgagagagcaagagaaaggtttactagagccaagatgaaccagggattaaagcaccatctagtgccaaaaaggaggcagccacatagcaggagaacaaaaaagaaattaaacaggtaaattacaaacaatctctaatcaaacatacccactgaaaaccaaacaagccagacacagaagactgaaataaataaataatccttcagtgcaaaggcatagacatatatccacaagaaacaacagcgagttggccgggcgtggtggctcataccttaatcccagcactttgggaggccaaggtgggcagatcacctgaggtgaggaattcgacaccagcctggccaacatggtgaaaccccctctctactaaaaatacaaaaattagccaggcatggtggtgtgcatctgtagtcccacctactcggaagcctgaggcaggagaatggcttgaacctgggaggtggaggttgcagtgagctgagatcatgccactgcactccagcctaggtgcttgagcaagactccatctccaaaaaaaaaaaacaaaaaacagcaaatggggaaccatgaccttcccaaatagataaatcaaggaaccagtgactaaccctaatgagaaggcaatatgtaaactctaaccaacattcaaaatagcagttttaaggaaacccagtgatcttcaagataacaaagaaaagcaattcagaaatttttcagataaatttaacaaagatttaaaaagtcaaacaaatcttggaactgagaaatatatttgctgaactgaaaaatcattagatgttttcaacagccaaatggatcaagcagtggaaagaattagtgagcccaaagacaagccacttgaaaatatgctatcagaagagaaaagaaaaaagaaaaggaatgaagacagcctacaagatatagaaaattacctcagaagatcatatctaaaaattactggtgttgaagggggacttgaatgagaacaaggggtagaaagcttatccaaagaaataaaaataggaaactttccaaaacttgacaaagacatatccacgtataggaaagtcagagaaaccaaacagatttgacctaaactctcaaacgtcaaggacaaagaggatcctaaaagcaataggagaaaagaggcaaataacatataatgaagctccaattcatctggcaacagacttctcagcagaaacggtataggccaggagacagcaggatgagattttcaaagtgctgaaagaaaaaagaaaaaaaaaaaaacctgccatccaagaatactgtatccagcaaagccatctttcaaatatgaaggatagagaaagtttttctcagaaaaacaaatgctgagagaattcaccaccaccagacccatcttacaagaaatgttaaagggagttcttcaatctgaaagaaaaaaacactaacacaaaaagaaaacagttgacagtagaaaacctactgataaaattaagtacatgaacaaacccagaatactctaatactgtaattgtggtgtgcaatcaactcataactctagtatgaagccagaaagacacatctagcaaaaacagtaatagctacagcagcctgctaagaggtaatataaaacatggaaactaaaacaagaaaaagtcaaaatgttgggggatttctaaaaagaaaaggcaagaaattaaaacatactacctgagaaaatcgttttgccacaagggaaaacagtaagaaaggaagacaggagttacaaaacaaccagcaaacaaggaaagaaaaaattgccatagtaagtccttacttatcaataactgaatataaatggactcagttctccaattaaaagacatagagtggctgatggataaagaaacaagatccaactgtatgctgcctataagacacctacttcacctgtaaagacatacatagactgaaagagatagaaaaagacattccaagcaagtagaaaccaaaaacacagcaggaatagctatacttatatcagataaaactgactacaagtcaaagactataaagagaaataaagaaaggtcattatataatgataaagaggtcaattcagcaagaggatataacaattataaatatctatgcactcaacatcaagcacccaagtatataaagcaaacaataaagggagagataactgcaatacaatcataggggacttcaacacgccactctcagtagtggacaaattatccagaagaaaatcagcaaggaaacatcaaacttaaaccagaaaccaggccaaataggtctgacatttaaagaatattttatccagctgttgaagaatacacattctttttatcagcacatggaacatcctccataataagaccatatcttaggccacaaaacaactctcaacaaattcaaaaaacagaaattgtatcaagtatctattctgaccacaatagaataaaattaggaatcagtaagaggaacttcagaagctacacagatagaaggaaattaaacaacatgctcctgaacaaccaatgggtcaatgaagaaattaagaaaaaatttaaaaatttcttgaaaccaatgaaaatggaaatatcatagatcaaaatctataggttatagtaaaagcagtaacttcttttaagagagaagtttatagcaataaacacatcaaaaaagttgacagacttcaaaaaataagtcaactatgctcctcaaggaaatatagaaaagcaagaacaaaccaaaccccaaattattagaagaaaggaaataatataaatctaagcagaaataaatgaattgagactttttctgactcaaaatcagaaatgaaaaaggagacataacaactgagacatcaaaaatacaaagaatcactagagactattatgaacacctatatatcaataaactggaaaacatagaagaaatggataaatttctagacagataaaacctaccaagattgaatgatgaagaaacagaaaacctcaacaaaccactaataagtaatgagattgaagctgtaattaaaaagtctcacctaaaagaaaagcccaggtcctaatggcttcaaactgctaaattgtaccaaacttttaaagaagaactaatacaaattctactcaatttcttcaaaaaaaaactgaagaggagggaatacttccatacttattctatcaggccagcattagcctgataccaaaaccaaacaaggacatgataagaaaaaagaaaactacatatccctgatgaacacaaatgcaaaatcttcaaccaaataccrgcaaaccaaattcaataacacgttgaaaagaacattcaccatgatcaagtgggatttatcccagggatccaaggatggttcaacttatgcaaatcaataaacatgatacatcacattaacagaaccaagaacaaaagccatataattatttcaagagatgtccaaaaaggcattcaataaaattcaacatctgtatgaacagacacttctcaaaagaagacatttatgcagccaaaagacacaagaaaaaatgctcatcatcactggccatcagagaaatgcaaatcaaaaccacaatgagataccatctcacaccagttagaatggcgatcattaaaaagtcaggaaacaacaggtgctggagaggatgtggagaaataggaacacttttacactgttggtgggactgtaaactagttcaatcattgtggaaatcagtgtggtgattcctcagggatctagaactagaaataccatttgacccacccatcccgttactgggtatatacccaaaggattataaatcatgctgctataaagacacatgcacacatgtttattgcggcactattcacaatagcaaagacttggaaccaacccaaatgtccaacaatgatagactggattaagaaaatgtggcacatatacaccatggaatactaagcagccataaaaaatgatgagttcatgtcctttgtagggacatggatgaagctggaaaccgtcattctcagcaaactatcgcaaggacaaaaacccaaacaccgcatgttctcactcataggtgggaattggacaatgagaacacatggacacaggaaggggaacatcacacaccggggtctgctgtggggtggggggacggggagggatagcattaggagatatacctaatgttaaatgatgagttaatgggtgcagcacaccaacatgacacatgtatacatatgtaacaaacctgcatgttgtgcacatgtaccctaaaacttaaagtataataaaaaagaaaaatcaacatcctggccaggaccaaaatgcccactttcagcacttttattcaatataatactgcaagtccttgccagagcagttagacaagagaaaaaaataagggcatccaggccagatgtgatggctcatggctgtaatcccagggctttgggaggccactatggaaggatcacttgaggccaagggttcaagaccagcctgggtgacagagaaaccctgtctttaaaaaaaatgtatccaaattgaaaaggaagaagctaaattagccttgtttacggatgacatgctcttatacttagaaaaacctaaagactccaccaaaaaaaactgttagatctgacaaacaaattcagtaaagttgcagcatacaaaatcaacattcaaaaatcagcagcatttattaatatatacaccaacagtgaacaatctgaaaaagaagaaaacaatcccaccttaactagctacaaagaaaataaaatacctgggaaccactttaaccaaggaagtgaaagatctatatactgagaactataaaacactgaggaaagaaattgaagaggacacaaacatatagaaagatatgccatgctcctgcactggaagacttcttatagttaaaatggcaatactacccaaagcaatttacagattcaatgcaatctctatcaaaataccaacaacattcttcacggaaatagaaaaaaaattcctaatatttatatgaaaccacagaagaccctgaatagccaaagcaacactaagcaaaaagaacaaagctctaggtatcacactacctgacttcaaaatttactacaaagctatagtaaccaaaacagcttggtactggcataaaaacaggcatatagaccaatgaaatagaatagagaacccagatttaaatccacacatttacaaccaactcatctttgacaaaagtgccaagaacataaaatggggaaaggacactcttttaataaatggtgctggaaaaacaggagaactatatgcagaagaatgaaatgagacccctttctctcaccatacacaaaaatcaaatccaaatgggttacagatttaaatctaagtccagaaactatgagactactagaagaaaacattgagacaatgctccaggccactggtctggccaaagattttttgtgtaagacctcaaaagcacagacaaccaragcaaaaatagacaactgggattacatcaagctaaaaagtttctgcacagcaaaggaaacaatcaagtgaagagataacccacagaaagagagagagagtatttgcaaactgtctgtatagtttggatgtttgtcccctgcacctcatgttgaaatctgatcctcaatgttggacggaagtggagtctaatgggaggtatttgggtcatggagatggattgcttaatgaatggcttaatgccatcctctgtaaatgagtgcattctcactctattagttacggaagagctggttgttaaaaagaacctggcacctccctccccctttttctttgctttcctctcttgccattggatctctgcacatgatagctccccttccatcatgactggaagcagcctgaagtcctcattagaaacagatgctagtgccatacttcttgtacagctggcaaaactgcaagtccaataaacctctttttttaaataaattacccagcctcaggtgttcctttatagcaacacaagtggactaaaatgccatctgacaagggattaataactagaatatgtaaggaactcaaacaatagcaaaaaaaaatccaatttaaaaatgggcaagtccattatagtggctcacatctataatcccaacamtttgggaggctaaggtgggtggatagtttgagtcaaggagttcaagaccagcctgggcaacatggcaaaaccccatctctaccaaaaaaaaaaaaacaaaaaactattagccaggagtcatgacatgtgcctgtagtcccagctactggggaggctgaggtgtaaaggatctcttgagtccaggaggtgaaggtagaagtgaaccaacatcacactgctacagtccagcctgggcgacagagtgacgccctaaaaaaaaaaggggggggaagatctaaatagacatttctcaaaagatatacaagtggccaaaaagtgtatgataaaatgctcagcatcactaattatcagagaaatccaaatcaaaaccacaatgcgatatcatcttatgccagtaaaatggcttttatcaaagacagtgaataacagatgctggtgaggatatggagaaagggaaaccctcacacagtgttggtgggagtgtaaattagtacagccattatagagaacagaatggagattcctgaaaaaactaaaattagaactaccatatgatccagcaattccactaataggtatatctccaaaagaaaggaaatcaatacatccaagagatatttgcatgtccgtgattattacagcactgttcacaatagccaaaatatggaatcaacctgagcacccatcagtggataaatgcataaagaaaatatggtatatacacaaaatggaatattagtaatgaaaaagaatgaaatcctgtcatttgcagcaacatggatagaactggaggtcactgtgttaagtgaaataagtcaagcacagaaagacaaatacatgttcttactcatgtgggagagctaaaaaatgtgaatctcatgaagatagagaatacattggtggttaccagaggctggaaagggtagaggttgggaggtggatgaagagaggttgattaatgggtacaatatacagttagatagaagcaataaggcctaatgttcaatagatcagtaggatgactatagttaataataacctattgtgcatttcaaaataaccagaagagaataacttgaatgtccccatggtaaataaaagataaatatttaaggtgatggatatcccaaataccctgatttgatctttacacattacatgaatgtataaaattacatgtacccccaaaatatgtatattatgtatcaataaaaatattataaaaagatagctatagataggctataaataagtgccaaaccagtgatcatgaatatgttttaggagttcagggaaagaaagagaaatgtagggaaagaaagagaaatgtagggaaagaaagagaaatgtaggcaaggatgatctaggaagatttcacccaaaggggagaacatttttcagttagggtagaacagcaggagctaaaatgcagacgtcagagaacaggagtgtagccaaaagagagatgtgaatggctgagaatgggagacagggtcaaggactgggagtgtgcccacagccgagcacaggaagctgtaaatggtggactgaatggataaaagcaagcaatgaagtaaatccattccttggagcctttttctttttttctttttttgagacaagagtctcactctgttacccaggctggaatgccatggcttgatctcggctcactgcaacctccacctcccaggttcaagtgattctcgtgcctcagcctcccaagtagctgggattacaggtgcctgccaccatgccgggctaatttttgtatttttagtagagatggggtttcaccatgttggccaggctagtcttgaactcctgacctcaaatgagtcacccgcctcaacctcccaaagtgctgggattacaggtgtgacccaccgcacccagccatgcctttttttaaagcagtacctccaccaacaaaaatcagcattatcaaaaatattaaccaacagccataaaattaatgaggactgatgtgcattctgggactccctcagatggtcaagaggccagaacaaatcccatctctgcctatagttgtgaaaatataagcttaactactctgcacttcgtttcaacactgtaactccacacacacaccacggcatgctattctcgcttcgttgcctttactcaagatgtgctctcctctaggaaagccttttctttgcctgacaaaaattcagttcagacatcatcttcaaaaaggtctgctcctcaccaccagactgggtagtcctctgtgctgctctccactgctgtaccttcccactgtatggaaactctggtcacctgtttcagcctctcccggggcagacggtacctggcttaccttgatgcccctagtgttcagctgtggtggacactaataaatcctaaaaggccattgcatgcttccctgtgacagcacagacactcacttaaacagtcttccataccatgtttccagaacctgatgttagggtattttttctcaactgatattcaagactggttctttgttgttattgctgctgttggaggtcaggttaccagcaggcttttaaaatatgtctacgcactgaggcctcaatgcctgtaactttggcacattctgcacgcaattttccatcatttttgcgttgagggttgtggtttctggatcccttgccagcatcactggtcctggcatgggtacaatatgtatgctataatcagatcaactcaggagtgtgcctcgtagcttgggttactggaagccatttggtgctctgctcaaatgtcacctcctcagtttccttcaccactcaatcaaaaataaaaataactggccaggcacagtggcccacacctgtaatcccagcactttgggaggccaaggcaggcagatcacttgaggccaggagttcaagaccagcctggccaacatggtgaaaccccgtctccaataaaaatacaaaaaaaaaattagccaggcatggtggcaggcacctgtaatcccagctacttgggaggctgaggcacaagaatcatttgaacccaggaggcagaggttgcagtgagccgagattgcaccactgcactctagcctgggcgacagagcaagactcttgcctcaaagaaaataaataaaataaaataaaaataaaaataacctatcaatcaatcagtcactctcattcccttttgttgccttatttttttcacagcatttcacactgtcataatcccgattgtgatttccacaccttttatacagcattttattaacataagaattatttttataaagttcttaatgtgctatagatggaaagccaactttttctcaacatttcacttttytccttctttattcttaaaggaggatcctctggatcacccttcggacatggaagaagtttgtaaaatttatgaaagaggaaagagtaaaagaagaaaggcgacagcaacttcgtaggaaggtagttgaaattcttccagacttccaggtacctggaaggtaccacgagctatatcagcaatcagatacttggtccttgagtaagacaagtctggtgaacgaatgagccagattagtgtaatatttaggacaggaagctcgactagtctgtatgtgtgttatctccacccacccacacacatacatacatacacctggtttattctctacgagctacttcttagatcaaaggaattattttgagaatttttattcccttctttgacttttcctggattgctagtcattcactatagcatttatcacagtgggatcatccaaaggaacattctagagatcgtctgttcaaatatatcctatatatttttagcatagtaaactttaaaaaggacaagtgtttgcctgactgagcctgtgaagaaaatgtgtccgtatagcacgacaggagttgctgatgtgaccttaatgaaacagaaataaacaggggtgagtgctcggaaaggaagggcgggccaaggcactcagccttctagtgcagtagcatcagtgacacgcaccccaccagacctcgtccactttcaccacccctgaaggcagaccatgtatgaaaaggttctctacacagctgctgcagaggacagcagcttatcctgatttcagagaaactgaggcaccagagatgcttctcttccgtgcaccttgataagcatgaaggacattccaaaaggtaataactctatcatgacagtccagcaattcattaaattatctgttcatgctcccacctgcaactgctgaataatacactcagtttgtcttctagtactcagctcagtttgatctagatattgagatacctatcttgaattcaaagaatgttttcatctttaagatgctataaagactgataaaatgctctcttctatgaattgtgttagagaattacctgctagaaaaataatttttcattataaaatacacatttattatataacaaattcaagtagtccataaatgcatatggtaaaatgagaaagtcctgtgcagtcctgagatgattactcttatttggtgtgctgaaaatttgagttgacaaaataaaattctgtggttttttaagtgaatgttcttgttactgtctcatacttcctagaaaggatatctagctgtaccacctgctacacgacttaagatacttttatcacggaggatgtgtgatatgaccaaacaccttgaattgaactttatttcttctacgacatggctgttcccacacagcttttcctttaataggattatacagttgtcattttaaaaaaaaaaaacctgtgtttttcaagatgaatggccactaaagaaaatataactaaaagtaattcataatacatcactttccatcaaaatcactaacagtttaaacctaactacagtacatttacaaaatactggctgatattagcacccggaaatgaaataccaattttattattttgtttgttctgtgttttttttgttttgagacagggtctcactctgtcactgtacttcaggctggaggtagagtggcctgactatggctcactgaatcctggacctctcagactcaggtgatcctcccacctcagcctctcagatagctgggattacatgcccagctaactttttttttttttttttttttttttggtagagatggagtttcaccatgttgcccaggctagtcttgaactcctgggctcaagtgatcctctcagcctcccaaagtgctgagattacaggagtgagccaccacacccagccaccagttttctttaaatgccaagcctgtacataaggttgagttccttaagtcaacatgccaggcgcataaataaatcccacaaagcttaagttttctactttagctttatttttgcctcacctcaaacatcaactagaaattgagtctttagcagcccatattccaatggcgccagctagactttttaccgaatacagagccttctaaagagatacaatggaaatagttttgatgctgttttttgctggactatcatgaaagtatgtttcaaaatgttactgttaacataatgccccaacaagcagtatccctgacccacaaaactggagaaattgccaccgggaacataacagtttagggctagggacagggccacaggatagagacattgagggagccacagaggcagcacaggtataatgcagggttttcagaaatcagaagacttcaggagacactccaagaaacaccagctattttccttaaagaaagcactttattttccatttaaacaacttggtcacaggacgttattttacataaatggaagtaatttgtaaaatttccatgtaaaaggccttgtgtctgagtctgaggtgataagaggatatgaatacaagtatataaaaacagtgcaaaatgtgcagcccacagcctccggagttggcttcagaaatcccccttaatgttgctagaccagttacattaaatattaaatgtaacaccaggtaaatattcctgggtttcctttagtctaacatccaacccagatatgcaataaaatgaaaaactcaaaatccctaacaactcaaaccatccaatcacccagaccattaggatcacaatgagttgagactgcaggctctatactgtgacatctcgtcagtggctccatcttaagaaatacagaattttagttgcatcagtaactagaatagactagctctgcttttaaagctttgccttttaaatgtagatttctagaagttcactttcaaggtgccatcaagaaggctaggccactaagaagtcacaagcccaacctagacatcgcagcctcttaagacatttgtcttcactaaccgttcagtctttaacctgctgctgatcctacaatgaaaacacttagtgccagctgaagcgtggatgcttgtctatcagcaacataattaagtgtagctgattctgcaagaaatttatattagtcacagcagacatccacaggaacatactgaatcgtactcagtagtgagtttaggatggctttcctgctcccctgcatcacccttgcagtgtttaatacaaaagggtgcacatgtcaagctgccgctgagaaaaccagattccaaacaggcgcctcaggaaaagtctcttattatccattgcttgcttaagcaacctctacttttcaaaatggaaggtaccagaatatggctacaattaagttaggtcatataaacttacctaggttaaaaagacccttaagtctcacaaaactgtaatttttaaacatcctggctaaaactgtgcttctagatgttatatttttgcttatactagttgagctttataatcaaaagctaatgtcctactcaaaggaaatacatgtctattaagcagatggtcagtggtatgtagaaccttactggcactgtgttttctggcagtggaagattctagtacagaaaattgtctcttgctaaaaatattagaagtaccaaggactattgcataagagaaagtttgtagcaattttttgctaggcagatggtacacttgaagacaacaatgacttcattcaccaaggaaaacactacttagcaaagatttacaatatcctaaacacaaacacatatgtggctgaggtggaataagcagcacgttgtcccaaaaacacacttaaggctttactttagcagcatcagggtaacctatcaaagaggcgctgttaatggtcagttcatttcaggaacgctcggctggaaccataaaagtgctccgtgggtattgtaagaaacattttaaatattgaaggattttcttctttcatgcaatcctgatccttaatctttctcccttgaatctttcaaatcggtctgttcttctccccccaggaacagtccacagtggtgtgataataatctaagtggccagatgatagtaggtaatttattaaactccacatccagtatgttcattaacagagactaaggacatgagatgagagaagaggacctgcttgtttgaaatcatgttcgaggggcttgctcctctgcccaagagactgctgatttataggttcaccgggcaatcctccactgccgccaccaccaaatgcttccctgggactgattcattcacagaggccttgtcctttcaaagattccacaataaactcatctggcccctggagagaaccaaggcctataatgaaacccctcaaatagttccagatcataaaaggctccaaaatcctataaaccaaagatgtcacagagcctacagaacactgctcatggattagccccttgtttgctgctcctttcggtacagacgcctgggaaggcttttcccacacaaaatcactcatcttttgacaggtttaagcattctgtcaactgtccatcatgggttctcaaggaacttaaaacaagtatcttcgtgccaataaacctgaataatacacagagtcccttcctatccatgggaaggaagcggagttggctcatccaagtaaccctattagaggtaagttgttaaaaaaaattgtcatcattcctaattctcccaaattattttggtctctttgtactacttatcttcatcacatcacattacatttagatgttgtgaacaatttggcaagaagctaaaattactgactaatgtttctatcaatttgtatgatcaatggctagataatcagagttggctctacagctgacattcaaaagcacgactaccaatttctgcccacacaggctatccttgacattattactgtctctcttatgtaaaacctgtatagaaagaaatttgttatatcaaatccaactttaattctagatgaatattcagctctgggccagggagaaggcatcactgtacaaaccccagagtctgctaacatccccaggcacagagcctatcattcgttaaacaaaccatctctggggaaaatgacaacagcctgaataagaatatggtgaccatcttaaggacagctccaattaatggcaacagtagggacggtgccggctgcagagggtggaagtgcaggaagtagcaatatttcctctcaacaaatataaatctcttgcttaaagcagcatgcacagaatgactgaaaacgctggcaatattttccctatattaagctataagccaaggcaaatttaaggagtcatgaattatctttgggattgcacaacagtacatgttcaaaactaacatttcaaaagggtattttcctcatctgaaattccctcatcttaattctatagtagaacaacccattgtacataaatatttaatcttttatacattttcggttttaagatatgattaaagaaacaacttgttattgtcggaagagccagggaagaacagtaatccattaatagtggaaaccacatataccctgtttcttctctcttagtgagatactgttatttagggaggggtaattgagaattaatgtgcaagttaagtgggaagatgtcactcaactcctcaaagttcataccagaataatgtgaatgccagaaggctgattttcacaatttagtgctataactgacagcatttgaaatacatgaagaaaataatcgagcccgtgatgttactcagccttcctaccagaaaagagagtaaagcatccccacaggagtgtctgttctcctcttccagccacagtcacaagtgtgctagcaccttacctggtgaaacatgggaagaggaaaaacacatgaatgcctgttggagttatttataagaaacccaagcagaatttataaaatataaatagaagaactcatcacctaaactcatggccacactacattacactagcaataattatctttataactgttgtcaactgtcttttcaagatgagacaacttagcatcaatccatctggtcatcttctctgtttgagtagttcatgtctaataagaaggagaaattctcataactgtacaacaaggtatatgctgaaaactgattaccctaataatattggcttcaatattctagactataaacgtttttcttccatcataatattttcctaatactttgtatttccatggctcttgagttgttttttagtgctttccacatccatcttccctcacgtgaccctcatgacggctctgtgaggtagccagggcaggcatcagtaccccactttgcagatgaccctgagacttgggaaagtgactcagctaggggtcacatggctattaagaatcgaaagagggactagaaactatcctaatccaacactctttcctccatactaatggatgggaattgcttctatcaatttgtgcattagcaatccacatccttctcaagttcaggcaactgagtcaattaaaaaggtgactggaaaggaatggctctacttttactgcctcagtataaaagtctcttaagttgtggcgtcagaaaaattaacttcttcccactccagtctctaaacctgagcatggccctataatgcctttaagaaactggggatagaaatggacactgaagtgtaaaatggaagggagacggaaggaggagccatcatccctcagagagccacatagaaggcacttcagacaatgtcctcggcagggtggtggaatgcacgtgtgcccagggtggagaactggtgccagttccgcaggaagcccctattgtactggcctgtgtccacgatgagcccgcagaggagccggcgcccagtcttctgtcggagggcctgctggacttcccgctcagtcacattgtagctgatgttgatcagctggatcaggaagatgtaggccatgcctgctgtgatgatcacagagtaccacacgcaggtgaaggacagagccgagctaggagagggaaaaaggctgtcagggctgccgtttttgtcaaattcagaaaactgtcatcattctcacgttttacacatttttttacttattac

SEQ ID NO: 96868 - DNA, 22690 bp, Homo sapiens
  misc_feature (1)...(22690): n = A,T,C or G
aacctgagcaactgtatgtggaggcctggtttttccctcttctgcggaatttccccttgtgtccttgcccaccctcaccatagcctttctcgccataggccaggaatggagggatgataatcttccttctctctccaggacacatgcccagcagcccctggtccatgcccttgatcagccaaccagagccgacgtaggtgtcataagtgccgcccttactgtagctgcagaaaatgaggtggaggtgggagaggcaggctgggccccggattcccgctccccatgccacagtccccagtgcctcagggctcccctccagcccctcacctggtgtcgaaggaggtgccgtccagcagggtgccattgtagtggtagcggacaaagtcgccgtcctggaccatgcgggggcagtggggcgggcgcagcaatgtgctcacctgcacggtgtcttccttgttccacacatccagcagaaccacatcgaagtagagggtggcatccggtggaatgagccccgctgtgagagcgcagcagcgtggaggtctcagagttctgctctgccaaccacgatcccagccagggccctgttattccccttcctctcatcccagcaccaagagacccaaaccagggacagagatgccactatttttgttttttttttttaagagatagggggccagacacagtggctcatgcctgttatcccagcactgtgggaggccaaggcaggtggatggcttgagcccaggagttcaagaccagcctgcgcaacatggcgaaaccccatctctactaaaaatacaaaaaattagccacgtgtggtggtgtgcacctgtagtcccagctatttgggaggctgagagggaggactgcttgagcccaggaggctgaggttgcagtgagccgagatcgcaccactaaactccagcctgtgcaacagagtgagatgctgtctcaaaaaaaaaaagaaaaagaaaaaaagaggggttttgctctgtcacacagggtggaattcagtggcatgatcatggctcactgcagcctcccggggtcaagcaatcctcccacctgagccttctgagtagttgggactacaggcacacaccaccacacctggataatttattttattttttgtagagacgaggtctcactatgttgcctaggctggtctggaactcctgggttcaagcaatcctcccacctcggcctcccaaagctctgggaccatatatgtcagctactgccccagccagagctgccactcttcatactgcgtgcacagtgtgacattgggcaagtcactcctcatctccgcacttcagttttctcaccccaggatccctgattctgcctcgtggtctcctccacccccggcctgtgccccagcccttctcacccaggccgatgctcccatagcccaggtggggaggcacaatgaggcgtcgccgctcgttgacacacatgcccatgaggcctcggtccatgccagtgatgaggcgccccacacccaccacgatggccaccaaggtgttgcgatcatagctggggggggagggacagatgggatacagtgacctcagacacacacacactgcccatggtggcacagatgcacaggtgtgcctgcacacacgcacacaatcccccctccctatagccaggtgtggatacgcacacacacttctcacctccttttcaagtccccctcctaggtcggccgtgacgcccaccttaagagaacggactgttgtgaaaggcaagtccctgaggaggacaagggctgctactgccctgggacggggttgggtgggatgcccgggcctgatggctgctactatttgctgacagcaagtggggagtggtacgtacagcacggaggggcagaggagcattactatatgggattaaatgcttggcattttacattccgtatcttctttgtctcccctgtgaggtgggcattcttgttctcatttttcttaatgagagcaatggagacttgagagactcagtgccttgcccaaggtcacacagctaatatgtagtcagctgagttctaaaatttgccattatactattggctctccaagaaaagacgggagagcagaggtggggtgggagctggtttcacattttgaaaaggcctattctacaatcctggctaacacagtgaaaccccgtctttactaaaaatacaaaacattagccaggtgtggtggcgggcgcctgtagtcccagttactcaggaggctgaggcaggagaatggcgtgaacccgggaggcggaggttgcaatgagccgaaatcgtgccactggactccagcctggcgacagagtgagactccctctcaaaaaaaaaaaaaaaaaaaaaagcctattctaaaagtgccatggcttttgtttgtttttagttatacacttttaattaatgtatttatttttacttatacatatgtatttttggagatggagtctcggctctgtcacccaggctggagtgcagtggtgcaatcagctcactgcaacctccacctcccgggtttaagcgattctcctgcctcagcctccgaagtagcagctgggatcacaggcatgcaccaccatatctggctaatttttgtatttttagtagagagggctttcgccatgttgcccaggctggtcactcttggcctcaagtgatctgcctgcctgggcctcccaaagtgctgggattacaggagtgagccactgtgcccagccaattatatacacttttaatttattttaagttttcagaagtaaagtgaggatgggagatttttttttttttaattgaaggggccatgggttaagaaagttttctggccgagcgcagtggctcacgcctgtaatcccagcactttgggaggccgaggcgggcagatcatgaggtcaggagatggagaccaccctggctaacatggtgaaaccccgtctctactaaaaatacaaaaaaaattgtggaggcgcctgtagtcccagctaatcgggaggctgaggcaggagaatggtgtgaacccaggaggcggagcttgcagtgagcagagatcgcgctactgcactccagcctgggggacagagcaagactctgtctcaaaaaaaaaaaaagttttctaagttgtgtgggcgcgggggctcacgcctgtaattctagcactttgggaggctgaggagggtggattgcctgagctcagaagtttgtgaccagcctgagcaacatggtgaaacgccatctctactaaaatatgaaaaattaaggctgggcgccgtggcttacgcctgtaatcccagcactttgggaggccgaggtgggcggatcacgaggctggggtggcatgtctgactgtgtgacacgtagacagacagggcctccgcagggagccatgccctacccccaggtccagctggctgtcttcttataatacccacccgcctttttcaagaccagtctggccaacatagtgaaacccctctctactaaaaatacaaaaaaattagccgggtgtggtggtgtgcacctgtaatcccagctactcgggaggctgaggcaggagaatcacgtgaacctgggaggcagaggcggaggttgcagtgagttgagattgctccattgcactccagcccaggcaacagtgtgagactgtgtctcaaaaaacaaaaacaaacaaacaaacaaaaattagctgggcgtggtggcatgcgcctgtaatcacagctacttgggaggctgaagcaggagaattgcttgaacccaggaggttgcagtgagctgagatggcaccactgcactccagcctgggcgacagagtgagcctccagctaaaaaacaaaaagttttccaagctcaacactcatgagctgggctcccagagtccccatcagggatgacatcccctaaatcccaacccctgcctcactcctagcagtcaagggctcagggctgcacttctggctactaccctatatctgaatttgcccaccaagcagacaggttttaagtctggactgtttccttctcagtgttgttatgaaggcttaagctctgcattaagtttctacaagttccacagcatcaggtcatatggttttcctcagggtcaatgttaatgtgtgctgaactggctggaggactgccaggccctgtgagaagcctacgttcattcatccatgtccttggagtcctaacatcagccttagcaagtaggtcctgtttttgtctccacttttcagataaggaaagtgatgcctaaagagacaaaattctctgtccatggtcatagcctggatttgaaccagggtcttgggactcttggagtttgtaggcttaccccaatatatgcctgcctctaaagtcatggccactaatttcctgtgggctgagttgtgtgtttcagaggagggtctaagaaacactgacttctttcagtgtgctgtggggtctgtgtgtaactgggaccctagatttacccctgaggctggcatacagccctgccctgtccccgctaacaaaagtggacttgctggggcagaccaaaggcctgggtcagaccaggaggccaccttacaaaccccaaggctggcaaaaatgggcggcctgtgcctctggcctggtgtacctaaaatggagagagatgagggttccaggagaaccagagagggaggaatgaaattcctccaaggagcccagggtggcatgtccgactgtgtgacacgtagacagggcctccgcagggagccacgcgctacccccaggtccagccggctgtcttcttataatacccaccagcctttttccctgcccaccagccgctgaaaactcccaccccctccaaaaaaaagttctattccctcttctctgaccacaaaggcactgaaaacagtggaaccagaaggggagtcagggtgggtggaaaggtacggggtccaggctgatagaccatcccagggttcttaagcagcagggaccacccccttccccccaacactgtagatcagaacacccctctccatcaggtcattacatacagccctggtaactacacaaggcagttcaccttgattatcgagtcctttccgggatgtggagagcttgtgagaaagaaatgggatcctttgagaagtgagggtttggaagtgggggcaggagggtatctttggggagatgggtgtctgggaggccccaggggtgctgtctagggttagagtattgggatgcagagcttaaaagaggcaacaaggaaacaggaccccgggttcaggggacggagtggtgaatccgggggcgcccaaccggggttaccttgaatcaaacttcttgccatcttcaaaagtgccgttgtagtggtagcgcacaaaatcccccatctgcacttcccggggacaggccctggggatgtggtacctctcgatgaccacatcttccagggggcccccggccgggctggcgcggcccagccccctccccacggcctgcaccaccagtagcagcaactgcagcagggggagccggaggaggctgtggctgggggggcccgcggggaacatggtgcctggagttgggaccgccggcagtgagggcgagcgagggagtcgccaccaacctccttccccccgcctcccagaactggctccccctcttcctgtcctctttccctacccccgccctggctggtccacgtggaatgggggctgggaagactgagctggcctggccgggaggagcgggggagggggttgcaataggaggagggggccaggctgagtgtgttagagtctgagggaggcactacaaagaactctaggttccccctccccccatctccatccctggctgcgagacctggggcctggccagggagagaggctcgggaaagatgagaactctgagtggacaccaaaggaaaaaaaaaaaaaaaagttcaatgactttttccggagcccccgggtcctaaagccgggcggagatgaaccttgcttctttcgcgggcacttcgaattctagtcccctccaggtgggtggtgaagccgcggagtgtgagaggcatctccgtgctcatccgtgaccccagctgtactccaagggaaggcatctccagggaagagcagcttggtcccgcaaaagctggactgmaagaaggactttgtgacttgggatgtgacgggcacggagatggagtggggggtggtggcagcgcaaggtgtgcaggtgacagcaggtgtgtgcctccgacgtgggcgggggagacactcggagggtgcaggagggcgcagcgacggaaggcccggctccagggcttccttctcgtatgggcagcgcagaggaggcggccctcactcagtgtcctgatctcaggcgggggcactgtttgcatggggaggggcttcctgggcttcccatctctggcgggaagcgctccccgacgcattctctacctaggggacacccccaaggcaggagcccgggccgacggagaggacttaacgacactatcggaccctctgggaaaagaggggagacgtcgtgacccakgccccgccccaccttgccgcctcgtgcccggcgctaagacccagcgggcgcgccgcccgcccggggcccggccctgtccccttccgtccgcggggcagccagctcagctccggagagccggcggcgcggcgggcatggctcgggtggcgtgggggctgctgtggttgctgctgggcagcgccggggcgcagtacgagaagtacagcttccggggcttcccgcccgaggacctgatgccgctggccgcggcgtacgggcacgctctggagcagtacgagggagagagctggcgcgagagcgcgcgctacctggaggcggcgctgcggctgcaccggctcctgcgcgacagcgaggccttctgccacgccaactgcagcggccccgcgcccgcggccaagcccgatcccgacggcggccgcgcagacgagtgggcctgcgagctgcggctcttcggccgcgtcctggagcgagccgcctgcctgcggcgctgcaagcggacgctgcccgccttccaggtgccctacccgccscggcagctgctgcgtgacttccagagccgcctgccctaccagtacctgcactacgcgctgttcaaggtgggagcccgcccccacccggggacctgtctcgggctgggcgtcgtggctccccacagatcggtcgaaggagcgttatcttcacccaaggcacgaagcccgccgtgcgctcggggccgcgagctccggtcttgctgacccgctccccmaccccctaccccccgaccaggctaaccggctggagaaggcggtggcggcggcctacaccttcctccagaggaacccgaagcacgagctgaccgccaagtatctcaactactatcrggggatgctggacgtcgccgacgagtccctcacggacctagaggcccagccctacgaggtggggtggagggtcaggaggaggcttgtagaggagggctagtagaggaggggagatgttgggggcgccctgactccccctgccacgccccttccaggccgtgttcctccgggctgtgaagctctacaacagcggggatttccgcagcagcacggaggacatggagcgggccttgtcagagtacctggcagtctttgcccggtgcctggccggctgtgaaggggcccatgagcaggtggacttcaaggacttctacccggccatagcaggtatctgccacccagaccacggtgggcrgtcctctcacccacagggcccggtaaggcagatgtccccttcatgcacgtggagcactgcgaatgcggaggagccagccgggaggaaggccttgtctgttgagaaagacgctgggtgcaggggccccagctgggagtgtccaaggggctggatcagtgagtagaggcagtgacatccctaaagggtttgggaagcttgggttcataggccttccaggcagagggcagtgcagatgcaaaggtgcagcggtgagaagtaacccagcagatgtgtgcagaaagcagttgataaccagaaattacacctagtcttgggatctctaaccctggggtccctcgagcaggggcagaaaggactgtacttggccaggtgtggtggctcacacctgtaatctcagcactctgggaggccgaggcaggcagatcacgaggtcaggagttcaagaccagcctgaccaacatggtgaaaccccgtctctactgaaagtacaaaaattagctggtcgtggtggcgggcacctgtaatcccagctactcgggaggctgaggcaggagaatcgcttgaacctgggaggcggaggttgcattgagcccagatcgcgccactgcactccagcctggtcgacagggcgagactctgtctcaaaaaaaaaaaaaaaaaaaaaagactgtcctttagcttctctgtttggacttctgccccatttctggacctcacctgctgctctcccagaatgccctggctccctctggcttggggtggtggttgagtggcaggggtggtgagtcagcccagcccacagtcatcttcctcaccatcacttgtcatatagtatgccaagcactttacagacattctctcctgtgattgcaacagcaacacattttctggacaagcagcttggcttagtaggcagagmttggatttagagtcttctccactggggggacggagatgttcattgcaatgccagcctctcactgctgcctcccaccctcagatctctttgcagagtccctgcagtgcaaggtggactgtgaggccaatttgacccccaatgtgggtggctacttcgtggacaagttcgtggccaccatgtaccactacctgcagtttgcctactataagtgtgagccccctgggtgggctggcttgggcaggggacgaggtgataagggagaggactgtatgggagcctcccagagttgtggggagctttccttcagtaytgaggaccctgggtgataggaggaaagtctaggggtggtgggaatatggggaaggcaccctgggagtctggggcaggtgagaggcttctgagtgagaacagacagcagcctcagggagaagaagagggtcttttgggcaaatgactagacaaccaacaactgcagagcacttgacagtttatttttatttttgaaacggagtttcactcttgcccaggctagagtgcaggggcacgatctcggctcactgcaaccgctgcctcccggattcaagtgattctcttagcctcctgagtagctgggattataggtgcctgccaccacacccagctagtttttgtatttttagtagagacggggtttcaccatgttggccaggctggtcttgaactcctgacctcaggtgatccactgcctcagcctcccaaagtgctgggattataggcatgagccaccatgaccggccaacacttgagagtttataagtcactttatcttatgtggtcctttcaccaacaccatgcagctggcattactggaccgatttttcagatggggaaactgaggcttatagggcaaggggctgttrgtcttatgactaataaaaagtggcaccaggacttgtggctctcctcactggagagatcctggcatccactggggctggaatggacagcctccagtgttcctgcagctcggagatgccaagattcagacagagccaggagtcagagcagaggggctgagaacccaggggccaggagacccttcctgggtacacatagcagagaggctaagggcctctaattcactagagccatcattctccagctgtgtgagcttgagcaatttatctaacctctctgtgactcagatttcttgactgtaaaatggggatgacagtaataggtaggcatggctgggcacrgtggttcacacttgtaatcccagcactttgggaggcccaggcaggcagatggcttgagcccaggagttcgagaccaacctgggcaacatgacaagaccccgtgtctacaaaaaatacaaaaagttagccaggcatggtggcgcgtgcctgtagtcccagctactggggagactgaggtgggaggattgcttgagcccaggaggcagaggctgtagtgagccgagatcacaccactgcactccaacctgggtgacagaacaagaccctgtctcaaaacaaacaaaaacatacaaaaaattagatgggtgtggtggtgcctgcttgtaatcccagctactcaggaggctgaggtgagaggatcacctaagcctgggagatcaagcttgaggtgaccataattgcaccactgcactctagccagggtgatagagtgagaccctgtttcaaaaacaataaaaagacaataacagtgaggcttagatgagttagtcagggcctggcatagggtaagtgcccactacatgctagctggcattatgcttgggtgggataaggagcccattaggtattctgggaggtggctgggtagcaggggtgctggactgaactggaagatggagttgactctgaaggggaagtgccagagcaattcctcacccctgtcctgctgcagtgaatgatgtgcgccaggctgcccgcagcgccgccagctacatgctcttcgaccccaaggacagygtcatgcagcagaacctggtgtattaccggttccaccgggctcgctggggcctggaagaggaggacttccagccccgggaggtgggcaytgctttctggggcacttgctggatatgcactttgtaaaaaatgaactcctggcggccgggcgcggtggctyatgcctgtaatcccagcactttgggaggctgaggcgggtggatcacgaggtcaggagatcaggaccatcctggctaacacrgtgaaaccccgtctctactgaaaagaaaaaaaaattagccaggcatggtggtggacgcctgtagtaccaactactcgggaagctgaggcaggagaatggcgtgaacctgggaggcagagcttgcagtgagcggagatcgcgccactgcactccagtctgggtgacagagcgagactccgtctcaaaagaaaaataaataaataaataataaaaaataaactcctggcttccatggaaggcaggatgggaaatggaaagaaagaatatgagttgaggttagagtcctggcttcagagcccagccccactgctgtgtggtcctgggaagaccatggccctttcctaatctattgcctcacctgcaaaatggcagtgatactgccacctcaccagcagtgtccagacgagggaggtatgaaggtacacatccactcctacctgctcccctccctaccttcattaccctcactgctgacctttgtccctctttcccaggaacaccctaggtaaccaatggaggaaatctgttggagttgagggccaggctggcaaatatggggcacatggtgccactcctgccttccttgtcagtggcagacattgctaatcgattgagggactctttgtcaccaaactctcagaatccttaacccagtgttccaagcagccacgatgatctgatgagcttgtgagctgatacctattctctgatccttgagctagaagagggccagtgggcccagatcctaggagccctggcttcttgccatctggcaacagggtatggctcaccccccaccccgtccttccctccttccaggaggccatgctctaccacaaccagaccgccgagctgcgggagctgctggagttcacccacatgtacctgcagtcagatgatgaggtgagtgcctcctgctttccaggattgggctgtgatggggacaccttggaccttttcctggggccaccagtgtgccagaattcagccccagcccctrgtggtcagctgtcgtgaagaagagaggtttgcctgttccttgtctagactgtccgttccttccccarccttagtattctcatgtcctccttytgtacatgtctcaatcctgttcctcccaggcccagctcacatggtgcctcctccaggaagcccttgctgcatgccctggctctttgttctgggctagcagtgcccactctgacctgtgtgcctccctggccacctgtggcctggacctgggtgattgcagccctsgtccatctcagccctgggccccttctccagccagtatccaggagaaccgcactgcaggacacagggccacattattccctgttctcccacatcctgcacagagcctgggctcagaaactgagtttgaatgaaccagtgaatgaatgaatgcaggacctcaggacagaaggaccgtattgtattacattgatttattttatttatttatttattttttttttttgagatggagtctcgctctgccgcccaggctggagtgcagtggtgtcatctcagctcactgaaacctctgcctcccgggttcacacgatgctcctgcctcagcctccggagtagctgggattacaggcgtgcaccaccacgcctggctaatttttgtatttttagtagagacagtgtttcaccatgttggtcaggctggtctcgacctcgtgacctcatgatctayctgcctcggtctcccaaagtgctgggattacaggcgtgagcagccgcacccggscctattaacattgatttcaagtgagggtttgacagccttaatttctctgaggtgttgctgctcagtgctcatttatgtatcctctcctttgttcatgcccccacgcccccacccatccaaccccagaggaggagggcagaatctacaccgtcagcacccaggatgaggaactagccagacctggctccattacttaccagttgggtggcctccaaacaagtgtcaggcaacctctcaagcttctgtttcttcatccattgaatggggagaatcatgcccatctcacattgttgtggtgagaataacacaagatctggccgggtatggtagctcatgcctgtaatcccagcaatttgggaggccgaggcagagggatcacctgagatcaggagttcaagacgagcctggccaacatagtgaaaccctgtctctattaaaaatacaaaaattactcaggtgtggtggtgggcacctgtaatcccagctactggggaggctgaggcannnnnnnnnnnnnnnnnnnnnnnnnnnnnnnnnnnnnnnnnnnnnnnnnnnnagaggcggaggttgcagtgagctgagatcacgccactgtactccagcctgggtgacagattgagactctgtctcgaaaaaagagaaagaattaagtgagatcaagtatgtttttttgtttgtttgtttttgagacagagtctcgctctgtcgcccatgctggagtgcagtggcgtgatctcagctcactgcaagctccgcctcccaggttctcacgccattctcctacctcagcctcccaagtagctgggaccacaggcgcctgccaccacgcccggstaattttttttgtatatttagtagagatggggtttcactatgttaccccgtatggtctcgatctcctgaccttgtgatccacccacctcggcctcccagagtgctgggattacaggtgtgagccaccacacccggcctcaagtatgyatttttcttttttytttcttggagacagaatctcactctgtcacccaggctggagtgcagtggtgcgatctctgctcactgcaacctccacctcttgggttgaagagatcctcctgtctcagcctccgagtagctgggattacagtcatgcgccaccatgtccagccaattttattttgtatttgtagtagagacagggtttcaccacgttggccaggctggtctcaaactcctgacctcaagtggtccgcttgcctcggcctcccaaagtgctaggtttacaggcgtgagccaccgctcctggctgagatcaagtatgtaaagcacttgataaagagccagtacctggtaggtgcacagtgaatgacagccgagtctcactctgtcatccaggctggagtgcagtggtgcagtctcagctcattgcaacttccgcctcccaggttcaagcgattctcctgcctcagcctcctgagtagctgggattacaggcgtgtgccaccatacccagctaatttttgtatttttagtagagacatggggtttcaccatgttgaccaggctggtcttgaactcctgacctcaaatgatccaccgacctcagcctcccaaagtgctgggattacaggtgtgagccaccacgcctggcgtatggcagccattttgacggctgtctcttatttcctgtggtttgccagacaccagactaggggctggagtaagttagtgaaagtcatggtcctggcggggcacggtggctcacacctgtaatcccagcactttgggaggccaaggcgggcggatcacgaggtcagaagattgagaccatcctggctaacacggtgaaacccggtctctactaaaaatgcaaaaaattagccaggagtggcggcatgcgcctatattcccagmtgctggggaggctgaggcaggagaatggcgtgaacccaggaggcagagcttgcagtgagccgagatcatgccactgcactccagcctgggcaacagagcagactccgtctcaaaaaaaaaaaaaaaaaaggaagtcatggtccctttcacgtgccgctcacagtctagtgggggaagcacaaactgctgctggagagggcagcacacggcaccaggggaggtctccagcccagccagagtcaccagcaagggctcagcctggaactgatgcctggctttggagggattagtgcgggctacgcaggcacaggggacagcagtagttcctggcagggaaacagtatgagcaaatattatgcatggactagcaatattcttgccagggtctttatgcttaaaaggtggggctgtgcaggggcgatgtttatgctgacaccaaattctgcctggtggtgccctatgcagccactcagggaggggcagtttgggaaaaatcctcaggactgtctcattagatcttgagactggggagggggaggggctttggggaccgagagatgggatgggaagtcccattggccaggaagggagcccatatgggtttgggcgtactgtgacccggtttctcccacaaccgtggygctactctagatggagctggaggagacagaaccgcccctggagcctgaggatgccctatctgacgcygagtttgagggggagggtgactacgaggagggcatgtatgctgactggtggcaggagccggatgccaagggtgacgaggccgaggctggtcagtgacacgagtccttggggggtgrggatgcagcctgggatggaggttggggacagatgcattcacccgctgggctccggagcccagggtgtgtgtgggtgcyggggcccatcctccaggggcctccagcctgttggcaacccctgtcccgcttgggggtggtggtgcagcatctcccctggagctgggaccagctgagacctgtccgggggagcctcacyccacctcccatcaggacagcacctggacacccattgggagtgggtgggggagcaaccccagtgctttctcctttccttttcagagccagagcctgaactcgcatgagaaggggacaccccacaccsctcaagcttgggaagcctggtgccgatggccccaccctcaccagcctgggcagcagcaagaactatttattaaaaacttaagatgggccaggtgcggtggctcacacctgtaatcccagcattttgggaggccaaggtgggtggatcacttgaggccaggagttcaagaccagcctggccaacatgatgagacctccgtctctactaaaatacataaattagccgggtgtggtggcaggcgcctgaaatcccagctactcaagaggctgaggcaggagaatcgcttgaacctgggaggcaaaggttgcagtgaactgagattgcgccaccgcactccagcctgggcgacagagcgagactccatctttaaaaaaaaacaagacgggccggcacggtggctcacgcctgtaatcccagcactgagaggccgatcacttgaggtcaggagttcaagaccagcctggccaacatggtgaaaccccatctctactaaaaaatacaaaaattagccaggcatggtggcacacacctgtaatcgtagctgaggcaggagaatcgcctgaacccaggaggcggagcttgcagtgagccgagatcgtgccactgcactccagcctgggcgacagagtgagactccatctcaaaaaaaaaaaaaaaaaacttaagatggacacagctgactggacccccatcctgcctcacccatgggtgctgcaccccagacccatcctgccacttctatgtctctggaccacaggatggtggtggcattgcaggttggcaagtgggctgatggggtcygccctcctcactgctgagctcctcacctggacagtctcctggacraggagtttccagctgctggctggagtctcaggccaaattgcagagggtcctccagggtcctgaagagcactggactaagagtctagtggttccagggccctgaccagtaggtgctcaataaatgtttgttgttgaatgagtcatagtacccgtggtcgtctccctggagctcagttgtaagggtacaggtccttccctccctctctccgcacctgtgtcccctcatctgtaaaatgtggggcggaggggcaccatctgggccctggctggtcctctgcacctggggctgaaggatgtgtgagagaggacgcagtgtgcagatctgccaccagggggcgggagaacacagtcctccccaggcgggaagacgatggtttcagatttctaagatgggaagtcctgtattttcctagttcaggatcacttccctcggggaatgtggcaagtgtgggagggggccaaggacatttgctcctagtgtttactttgtgggcatttactgacccagtttccttagagtcagagggagctggccctgccgctgccctctattcccacattccagagccgggttggggccccagcttagcaggcagaggagccccagggatgtggtttgattactttgggattcttggggtgcagtgggacagccagatccctcttgaccgattttacatgggctcccaggggcagtgggtcccggtgtgcagggtgtgcaggcaacgatggtgcctggtggctacctcctagcctgggactcaccgccaaaccccacccctattccacagcagggaggtgggggcaaagggggtctgtctgggaggaacccagggccaaggccagccaggtgacagttctgccccatatttccagcctcccgggggcagggcggcagagttgtcttcccacttgaaggtagagtcaaggctgggaagccaagttctcactgccccacccctactttctctccagatgtgccaggtgatctggcctgggccctgtccacctctgttcctaggaggactccctgtcccactccaagcccctcccctaggcctttgatcgggatgagagctgaaagggcagagtctgagtctggaaaaagggctgggtcaaggctgggggctcagtgacctcactccttcctcccataggtgggtcttccggggaagcacatctgcagtggtagcgtttcctgaccgcctccaggtgcagggtggccccgccccaccccacctctttcaagctgcagtgttgtcaggtccaccaaggcccagcccctgtttctgggaggggctggcccttcagagggtggggagcgggatgtgctgtggcgtgtctgcgcagacgtgaacctgccatgagcacaagctttggaatctggacggctgggtgtgggtctgaaagtgcccgtgtgcttgtgtgttgcgtgaatgtgcgggtctgggtgtgaatgtgtgcctgcctgcgtgcatgcatgaatgtggtttttttttttcttttctttttttttttttgagacagagtcttgctctgtcgcccaggctggagtgcagtagcgtgatctcagctcactacaacctctgcctcctgggttcaagctgttttctgcctcagcctcccaagtagctgggattacaggcacctgccaccacacctggctaattttttggggtttttttttgttctgttttgttttgtttttgttttgagacagtgtctcactctgttgcccaggctggagtgcagtggcatatcctcgctcactgcaacctccgcctcccagattcaagcaattctcctgcctcagcctcccaaatagctgggattacaggcatgcgccactgtgcccggctaatttttatatttttagtagagatggggtttcgccatgttggccaggctggtcttgaactcctgacctcaggcaatccactcgccttggcctcccaaagtactgagattataggcgtgagccaccccgcctggctagtttttgtatttttagtagagacggggtttcactatgttggccaggctggtctcaaactcctgacctcaggtgatccacccacctcggccttccaaagtactgggaataaatgtgtttttagagggattcattcactcaatcagcacatatttattgagcacctaccatgtgccaggcatgctgaggtgctgggcatagaaaaatgaacagatcaggccaaacgccggacccacatgggcttacattccagcagggaggcaggcagaaaacaataaatgtcagaatgtatgaattagataggtatggcatatatggaggtgggaaaaggatctgagagctgaggggttgcagttgaggtgtgttggtagctgtgcaagtgcgcatctgagagtggcgtctccgagtgtgtggtgaagcagtgtatgtattagggagcaggcccaccctctctaggcaccattcctgtgcagccctttagcccaggccactggctcagccttgcgttactcagctctcctttcccagggagccgccagcccctcccgcctcccctgatgccagcatctccccattgcccagccagctctgcaaaccggtgaaacctactcccagccagtcccagtgtgggccctctggggccctccagctcattctcctgactccacccatccagacagcttcacctcctccacacctctgtctcaggtagccacctccccacccgcccccacaccccacccagcacctcaccagtcctagaatcttggaataatgggtaggaggttagggatgaccgaaagggctctggggaggctggcctcatgcagcaggaccagactcagatgccgcgggaagaccccatcctaaagaaatcagagctactatgatgtcctaagtgcctgctgtgtgccaggcacttgggagcttattttttgcgacaggatcttgctctgtcacccaggctggagtgcagtgacaatcacggctcactgcagcctccaccttccaggctcaagccatactcccacctcagcctccggagtagcagtgaccacaggcacgtgccagcacacccagctaatttttttgatttttggtagagacagggtcttgctctgttgcctaggctggtctcaaactcctgggctcaagtgatcctcctgccttggcctcccaaagtgctgggattataggaatgagccaccaccaggcctcttgacaaattattgataaccctcaaaacagtcctgagatgtacatgtcagttcccctctgctccaggtggggctgaggagtgagaagcagtttgtccagggttccttgaggtggttggtgactgagctgggtttggatcttttctaactaaatcagtgctgctcagagaagagagagaatgccctggttgcaggggctggcctggtgtgtgtctgttcatttttgagacgtagtctcactccagcccaggctggagtgcagtggcgtgatctcggctcactgcaacctccaactccctggttcaagtgattctcctgcctcagcctcccaagtagctaggattacaggcacatgccactaggcctggctaatttatttttagtagagacacaccatgttggccaggatggtcttgatctactgacctcgcgatccgcctgcctcagcttcccaaagtgctgggattacaggagtgagccaccctgactggccagcctggttttgttaggctgtcagctggggacagggagaggagagggtgcgctgcaggatgtggagataaatcccctacagggccatgcgctgtggctaacacctgtaatccctgcactttaggaggccaagcaaggtgggtggatcagtagagcccaggatttcgacaccagcctggtcaacatggtgaaaccctgtctctaccaaaaaatacaaaaattaggccaggcatggtggttcacacctgtaatcccaacactttgggaggccgaagcgggcagatcacctgagattaggagttcgagaccagcctggccaacatggtgaaaccccgtctctactaaaaatacaaaattagccaggtgtggtggcacatgcctgtaatcccagctacttgggaggctgaggcaggaaaatctcttgaacctgggaggtagaggttgcagtgagcccagatcgcaccattgcactctggcctgggcaacgagagcaaaactctgtctcaaaagaaaaaaaaaaaagaaaattagctgggtgtggtggaacatgcctgtaatcccagctactcaggaggctgaggtaggaggatcacttgagcctgggaggcggaggttgcagtgagccaagatcaggccactggacttcagcctggagcctgggtgacagagtgagtacccccaaaaaaaaaaaaaatcccctgcaatgccatagctcagctctcgctgaaggaggcaaggagtgggaagggagggggaaggaaaaaaatgaaaggaagaaaggaggaggaagggagcaaagaaagaagaaatgaagggagggaggacagaaggaagaaatgaatgaagggaggcaggggggcctggggacagagttgctgggatcacttagactaacaacttcctgaatcctgagagtcatgttcagggaggtgggagggagtcccttgggctccccgcaaattcagtaaattccagccgaagaaattccactcttagatttgaaaagtagttcttgccaggcgcagctcatgtctgtaattccagcactttgggaggctgaggcaggtggatcacctgaggtcaggagtttgagaccagcctgctcaacatggtgaaaccctgtctctactcaaaatataaaaaattagctgggtgtggtggtgggctcctgtaatcccagctacttgggaggctgaggcaggagaatcgcttgaacccgggaagtggaggttgcagtgagccaggatcgtgccactgcgagactctgtcacaataaaaaaaaaaaaaaaaaaaaaaaaaaaggtcgggcgcgatggctctcgcttgtaatcccagcactttgggaggccgaggcgggcagatcacaaggtcaggagatcgagaccatcctggctaacacggtgaaacccgtctctactaaaagtacaaaaaattagccgggcatagtggtgggtgcctgtagttccagctactccggaggttgaggcaggagaattgcttgaacccgggaggcggagtttgcagtgagcggagattgcgccactgcactctagcctgggtgacagagcaagactccgtctcaaaaaacaaacaaacaaacaaacaaacaaacaaaaaagaaacaaagaaaaagaaaaaagaaaagtagttcttgaagtctcaacctggttctctgtctctaggagaatagaaactccccttgggaacaaagagtggcccttccccttgtcagaaggctgtggccagttgttgctagagccaatagctcaacatgactggggagatcctggcagccacaggactcaactcttagacagtttccccattctggggccttgctccaggccttctcttgtatcttgtctctaaggacaaccctggcagatagatggcttccattttgtggatggggaaacagaggcccagagagtctgggttgggcccccagggctgaggctcactctaagctaggctggcgcagccctgcccagctcccttcacaagttccaagatgacttgggaattagatgggagtgtgctgagggctggggacagccccctggtaccggccccatcccaaaccccaggtctgacctatggacacaccactgcataatcactgcctgcctgggtcccagctggcgccaacgttcctggatagcatctcttctgtcccgcaaacagcccttgggatgggaatacctcatgcctgtgactcaggtggggaaacagataacttggaggataaggttgtttacccttccctccacatgcatatactgtacagacagtccccagcttacaatgattcaacttaggattttttgactttaggatggtataaaagtgataagcattcagtagcaactgtacttcaagcacccaaacaaccatgctattttttcactttcagtatagtattcagtatattacatga

SEQ ID NO: 96869 - DNA, 17197 bp, Homo sapiens
tcatggtctttcaggtccctggttacttttctcaaaggccatttccaaaagaatacatgccttcacatcacaacctgtactgtgagtccattctagaggtcactgaaaggccctgtaaagagaggacatggatacgggacctggccctgaggttattactggccgtaaggcagagttaatccatacagaaaccagtgtgtccatgtgctctgcacaaaaacagacctgttgtccatccagtccactgacaagagggtttccccgagagccgaagtggactgaagctacagtttttagctggtgcgggccacaggcagggtcagattgagaagaagcaaagctggggaagcagaagttgggagtcttgtgttgctccctcttcctgtgtggtgctctgggtttctgtggatcgtgaaggcgatctcaagagtgtttccctccaaacctgatagctgcctattcctgtctggttggggctgtggaggatgtagttgtatttattgcattgtaatatttttaacatcctgtgacttcatgctagaaattttctattgtttatagaaactttttgtagaaacattaactctaaagcacatctgcatgtcagtaaaaatctcagtttcgtacagaaagggacccatctgcctttttcaacctagtcttaaaaccagtgacatactccagggttacttcatgagcacccgggactaaaacaggaagaaatgtgactgatgattctggtctttcaagctttctgaaatggtgtgccagttagaaaaggatttctattcctgacatacccagactaggcagcccataccattctcacagtgtctttcgtgtgtggctgctgggcctggcccacaggaattgctactgttctttgttggagctgtcaatagcaacatgaacttccctggtaaaccaggagataggtgaagtggcacattcactctagcttgaatgtttttctagggtttggctgtgctcccagaaaccaccttaatttgccaattctcaggaggtgttctttctgttgtttttgaaacagggtctcactgttacccgggctggagtgcacatctgatgttcttaattggtaaatgctaaaccagttctgaagtgaggccccctgtttttcgcggtggctcacacctgtaatcccaacactttgggaggccccaaggcaggcgtatcacttgaggtcaggagtttgacaccagcctgaccaacatggtgaaaccctgtctctactaaaaatacaaaaaattagacatatagctaggtgtggtggtgcatgcctgtagcatcagctactcttgcctcagcctcctgagaattgcttgaacccaggaggaagctgcagtgagctgagattgcaccactgcactccagcctgggcaacacagtgagactgtctcaaaaaacaaactcaaaagtagtctcaaaaagtttttttgtttgggtgagtttatttacatctaaggccttataaaggcgtaaaaagtctcattttatggcacatttaacaaaatgtattgattaaagctggaattgtcccagaaaactcaggatccctagtcacactgggctctctgttcagcagtcctgtagggtgggtcagtcagaacccaaagcttcagcttgcctcagaagcatccaagctcagtccatctgaaccgcatctagttcatccaagaagcgccggcacttccccatcagtactttgatggcttcactcaccagcacatctggtggcaacacccccgttgactcaacagagactggggaccaaagagacactttagtctaggcagggcttgcctgtaaaacttactcataaacttcacatctagactggaaggaagctgcagcaccaaagagcactgcccactcatctcaccacttcatactcacagatataatgatctcgaacccgggcaagcctcacaaccttctttagcttctcattccggaagatttctctgctgaaggtatccagccgggggttggcaactctggccacctttttacctaatgagaacaaaccatgtttttttattcctttttctaatttgccacttggtagcaaaccaggttatacttttaggagcccagggtttttatttctgtcaccttgaaagaaaatataatttaggtcctaacttgaacagcatcccaaataccataccttggacttcctgcacctcaataacaccaggtgagaagcacctgctcaactcctcagctgcctccccttccacgggctcaagcagggtgatgtctggcaggagcctgtaactggctgttgccactggtgaaaacttggcatgatctttgcctggagaggaagagggaacgtgcctataggaaacccttctagggttaggaagaatactcctcctaagctactaacagcaaaagcacaaccctcttggctttctacctgccgggaatgtctcagctgagttccctagtcagcttgccccactgcaaccgaactatcccccttcccaggaaggcacacagggttctcaccaatgcccttgacacagtgcatgagcaggtcaatttcttggccaggccgcagctgagcgatgaggatatcatcatgcactggtcggatagtgccctctggaaagagatcagcctggttccccagggggatccatgtcatatgcctggtatacactggaggaaaaacatgtcagaagatctcagtccctaaaactagcagctacccacaggtggggcctcttcctcaccctaccactactcacctttgtggttcacgtacagttcgttggggtcagaggaatctttagcagcatgggggttccgagtgcatctgacctggagacgaaactgtagagtatctatctctgtgccttcttcatctcctgcacaaatggagggagctcctaagaactagtaaacgtctgagtgccagcactatgctgaatgctttacgtgtttcccatttaattatggcaaacttgggagacaaggcaagtgttctcacagatgaaagacactgatgtacaaagataagtaacttacccaacatcacagtcaaccaggatttgaacccagatagtccacttctcccaaaatttcattttctcaccttggttccgatactcaaaaagacggggatcagcatgaatgggaatgagccccagacggtgagcaagaatctcatcctgaacaatggatgtattattgtacaccaggaccttctccacagccatagttggcacctgcccaaggaaaaataaccacttatctgcaaaaacccaacagaccccctacctatccccgtaaccccaacctccagaggtagggagctatctctcttcctagaatgtttaatgagaaatttacaaagaatgagaaggtaaaatgctcagcaaaattccaggaaaattaaggagggaaggacagcttgagacacttaattctccaagtgaggtgtcagtgcagttcccaaagcaactccagccttgtcaccatgcctgccaatacctcagctagcagaattcgtcgaaaagcattggcaatggctgcgtcaattcccaccatgtcaaactccagtgagttttcatccatgtgtactacatccacacggaaattctagagggacaggaaaaaacatttaagtgaaatctgctctctgtgtaatatctcttcatacctcccccttagataattccctcaagtattatcctctcatccaaaaacctccctttgcccaaatgtctcttattaaatattctatctcgcccagtgttttaagtttcatgaaaagtctccatttttgtcgtccattcattaaaaccctatgcaatatggcttccaaccaaaccatccacagaagctattctactgaagaacagaaactaccatagtgcttagttttgttgacactactcagtcctcttactagacttctgttatgcttggcattgattaaaaaaccccctcctggcccggcacagtcactcacacctgtaatcccagcactctgggaggctgagacgggcagatcacaaggtcaggagtttgagaccagcctggccagcatggtgaaaccccgtctctaccaaaaatacaaaaaattagctgggcatagtggcgcatgactgtagtcccagctactcgggaggctgaggcagaactgcttgaacccgggaggcggaggttgcagtgagccaagatcgcgccactgcactccagcctgggacataagagtgcctcatgaaaagcaaagaaaaaaatctcctccttttttgaactattcccctggtttctgagctctgagctccactcttcttccttctctgatgatcgacttccacccatctctaaatttgccaggttcttgtctctctcccaggtcaccttaactgtactaacagttttagcaactatctgttctgacaactcccaaaatgttatctcacttctgatctcatttcaagcatgcagtcttctagcctgctagatttctccacatgcagaaaacaatgcatcatcattcccgttccccagacccatttctcctctcagtaaatgataccacaatgcatcaaagcagttcccaagccaaaaagtcattttatgctacccccacagcctttaccaaagcaatcataaatttaccttctattctacctttgctctatttctaccatcagtcttagttcatgtcttcaacctcagcttcccttacaacagatctgcctgctccatatgatcctcctcaaactcattccctcccagccaccaaggttgcaaatctcatcatgtctgcttaagaactattcaatctccctatcatcaacagtgcccaagacacacttcaaccttgcctaccactcatgccagaactacttggacatgcccggagcacacttcacacaagccataattttttttcaagcattaacctttttcattgttcatactttattccttgtatcaacaggttaaaaaagtaaaattttcccaagcactgatttacagatcatgtttataagctgcacgcaaaggtcagttgcctaaacggtaacattcagtaatctatttaaatgcaattttaacccttattttaagctaagtgaaacaatacaaaagactaaatacacacaaaacctgtatatcctgaacttcactgacttgaaacaaacccttcataatttaactcctgttcttttttacttaccattcaaggctcaattgagatgtaccctcctcttgaaatgttaagtacctctccgcccctcttcctggtctcagcgtaatgctccccaccccaaccctgccgtcttcatcgctatcaaccaccttcaccatattacactagattcactgtttatacacaccattcctcaacaagactgaacatctttgcagaactgggtagaaaccgtgtctaatttggcctgtaaacggagcgtctagcacattgctcaacaaacttacaaacggagcgacccccaagagcagcttctgagacagacacaggctgctcagaccacaaggtctggccttcataaccctccccagacaactccggccccacttaccttctcgaagcggtcctggtcccaggcatcatcataaccggaatagttaccgggaaagtcagtagtatggacctagagcaaagggacgaatttgtccacgaagggacagtgagcccacagctatccccacgccaatcccaagacccatccctgttccgctctcattcctcccgcccgagctcaaggccacaaggcttacattgcgaaccccaaactcccccagaaccacgcggctccgcatttcctccaccgcctgagaagccgccatcttcaatctctccacgagactagaggttctatctcgcgcgtgcgtcctagtagccctgctccgtctccgtggcaacgcaccgcctcctggaatcttaaatatcgcgagatttttccccgcccccgtccacgtccccagcttccggaagttgcttttgtccaaacatccgggcttctcctttttgtgttccggccgatcccacctytyctcgaccctggacgtctaccttccrgaggcccacatcttgcccacthcgcgcgcggggctagcgcgggtttcagcgacgggagccctcaagggacatggcaactacagyggcgccggcgggcggcgcccgaaatggagctggcccggaatggggagggttcgaagaaaacatccaggtaatggccccaaggcaccagctgccagcagccggagggccggcgatgtccagaagtgtcttggggaytccccctctgggcctggaagtccgctccatttacaaaactctcttctttgggtcttcgtgcacactaaagtcagtgggattaacattgacctgaaagggccagactactactccagcctgaggatctcgggtttcagggcccgcccgaggcattaggaagaaggtattcttggaacaagttaggaggttggtcggggtaaggcatggagtggggttgggtgggattcactggcattcgctgaaaacatactatgtgtatagttttgtttggggcttaggaaagaaggaaatgggcactttttcagccttttagtctttgataggtaacataggagaaagacatgaatggaagactagtaggtttcccaggctagaaaagatagccaaagctagaaaccaggcgttctgagagcatatgagggggaatggagtggcatgatctgtagtgattccaagccgtatcctcagcagtggaagaacaaagccctaaaccctgggatgagcagaggacttaatggatggaacagaaaagtcctgcactctaggagccattgtcttcacagggcggaggctcagctgtgattgacatggagaacatggatgatacctcaggctctagcttcgaggatatgggtgagctgcatcagcgcctgcgcgaggaagaagtagacgctgatgcagctgatgcagctgctgctgaagaggaggatggagagttcctgggcatgaagggctttaagggacagctgagccggcaggtggcagatcaggtaagcaagattgaatcctctgcaggtagaaaagtagacctaggtatgtcccgtgttctggaattggtgttggtgatgttcgccccasrttgtccagttagaaccatgtagaaatcaaacggaaaataggcaacaggatctagaaccaacagtaccacaatacctatgcccatcttccttacttcagatgtggcaggctgggaaaagacaagcctccagggccttcagcttgtacgccaacatcgacatcctcagaccctamtttgatgtggagcctgctcaggtgcgaagcaggtgaggagccttctcttgaagaagcttccctcctaacacctagaccttcatgcacactacagtcagatttcaagccctgggctctgatgggctccccgtcttcatgaccccatcacctctcatcactgcacctgtcaytgaaacaagtaataatagcacaccatcttcctcttcttttccatctaactgactactcatcttccctcaaaacctacctcagatgtcacttcctctgttccacattcctcaatcccatccccagtttgttctctcctggtgttcctatagaactctgtgcttgccagccgggcatggtggctcacgcctggaatcccagcactttgggaggccgaggcgggcggatcacaaggtcaggagatcgagaccatcctggctaacacggtgaaaccctgtctctactaaaaatgcaaaaaaaattagacaggcgggtgccygtagtcccagctactcgggaggctgaggcaggagaatggcatgaacctgggaggcggaggcggagcttgcagtgagccragatcgtgccactgcacttcagcctgagcaacaragtgagactccatctcaaaaaaaaaaaaaaaagaactctgcgcttgcctctaatagacagcacttcaccactgctatcctttcttattcctggaatcttccttccagagaccaacagcatctcaaaagcaggctctgtcttgtttatctttttattcccagcaccagaacagtctcagaatcaaaatatcagggcatagtttttgagtgacttttcaagaactagatttaatcctggcttggtttttttgttcatcctttaatcaatgctaatcaaatacccaggaccactcagcaggtatttattaagcatttgctctgtgccagacgctaaactaatcgtatctggttcagtggtgaagatagatgggagccttgctcttgagtgcagttacagtacagtactcattctatgatggggcacacaggagggatatgtgagccaaagcaggttggtgggtgggacaggacaagtttcccagaggaagtaaaacctagctaaaatcccaggtatgattaggagctagccacttgagagaagagggaagtgactaaattttcataccacttcacatatatttttcaagaaaatactcgaaagtgcctggaggcacagataagcaggaagaggaggcgtttttactattccctcagtaacacctttcattctaaactttccatctagccggctagacttttcccagggcttcctcattataaccctgaattctgggtactctctgctgaggtctgcctgtcttgtcatgtctttgttttgttttgttttgagatggagtcgcactctgtcacccaggctggagtgcagtggcgcgatctcggttcactgcaacctccgcttcccgggttcaggcaattctcctgcctcagcctcctgagtagctgggactacaggcgcccgccaccatgcccagctaattttttgtatttttcgtagagacagggtttcaccatattggccaggctggcctcaaactcctgaccttgtgatctgcctgcctcggcctcccaaagtgctgggattacaggcgtgagccaccgcgcccagcctgcctgtcttttcaaggggagggggcagacggatacatggtcgggccctccttcaaggcccagtagggctgagttctccatatagctgctgtttcagtcagctaagtttcagagggttgtccttcctggaagtaactttaggggcaaggaaatgatttcctcattccctatctgtctttactaccctgttctaccgtgtcatccaacatgtcttctaggccaggccccattccctggagttagagatgaataaaattcaggccttgccctccagaacctcatggccttgtgctgcctttgctttaatctctcctctcctctcccaggctcctggagtccatgatccctatcaagatggtcaacttcccccaggtgaatagagggtggcatgtctggagagccgggggaagcaccagggcagagggtgggaccaccaggcaaatcctgggaagccataaacagatgagctgttgtaccctccagcctgaatgaattggtatattgacagaaaattgcaggtgaactctatggacctctcatgctggtcttcactctggttgctatcctactccatggratgaagacgtctgacactattatcgtaagcaggacagacaactttgggggggtggctgcactaggttgaaagctgcctgaggatacaatggtggagtgagacaggaacagcccctgcggaaggccctaggtgaggctgagatcagaggcctcctaggactaaatagagccttcaccccacagcgggagggcaccctgatgggcacagccattggcacctgcttcggctactggctgggagtctcatccttcatttacttccttgcctacctgtgcaacgcccagatcaccatgctgcaratgttggcactgctggtaaggagccaggtgtggtgggcaagagtgatgttaaaaagagtagccaggccttggtcggcatctgtcctggggccccaaagcctggaatgggaggagtaggccaatggaccatgtgtttcccagggtccccatgaggggccagaaagcagcccaacctgaatgattttcctctccaccatcctccttcccagggctatggcctctttgggcattgcattgtcctgttcatcacctataatatccacctccacgccctcttctacctcttctggctgttggtgggtggactgtccacactgcgcatggtaagctgggcaagaggcttccaggggtgggctgtcctcccagggagttggggaagacagcctggagctgtccatctcacaaagagccctaaatgggagggaaragcccaaagatggttctgccctgggtgggggtgtcttgtccccaytcctcactttggagccaggccctttgagctgtattctcatggycctaggtagcagtgttggtgtctcggaccgtgggccccacacagcggctgctcctctgtggcaccctggctgccctacacatgctcttcctgctctatctgcattttgcctaccacaaagtggtagagggtaagtggcaggaaggtctgggtgggggagaatgggaaagcagctgcctagagcaagaagctagatatgatggcyggtgggctgggcccatctgaycctcgctcaccttccatcttccttccagggatcctggacacactggagggccccaacatcccgcccatccagagggtccccagagacatccctgccatgctccctgctgctcggcttcccaccaccgtcctcaacgccacagccaaagctgttgcggtgaccctgcagtcacactgaccccacctgaaattcttggccagtcctctttcccgcagctgcagagaggaggaagactatyaaaggacagtcctgatgacatgtttcgtagatggggtttgcagctgccactgagctgtagctgcgtaagtacctccttgatgcctgtcggcacttytgaaaggcacaaggccaagaactcctggccaggactgcaaggctctgcagccaatgcagaaaatgggtcagctcctttgagaacccctccccacctaccccttccttcctctttatctctcccacattgtcttgctaaatatagacttggtaattaaaatgttgattgaagtctggaactgcagcggctgatccagtggtcctccctgtcatcccgcttcctatatactttcctactcagtcaacagtggtaatgtcatatgttcccttcttcatatcctcacccaggcaagataaaggtgggacaggccagactacatagaaggcagtgattgaatatcacacctgacccatgaagcggcagggaggcctcaagcacaaaagccataagcctgatggaacactgcagccagcttgagtctgggctcagctgctctcttgggaagccaaggaagcagtgacaattgaacaaaacatcccgacttaaaccccgtgtcaaaacaaggatcttctgcacctgggcattgtgttgataattttcctgtggagctcttaattgaagccaaatttggctttgccttggtggtactggggccagctccttttagtttttctgtctttcctcttaaaaccaaccaccactcctaacatagcaccatccacccccaccacctctttaatatgctccacttaataagttaattcaggtggctaagagtgggaatagggcctttgacctcccttcactatattgaatattatattttatgtaaaataatcatcttaacactagtaaatctgggtcagcagcatctatccctcctaacaaagggacaaacagaggtgcccttcatttgtcctgcgttacacaagtgagtcccccaccaccctggccagaggacaaagttgagacagcaccgcctgcaccgtgcagtgtggctcagccgccttcacgtcctcaccagtgctccagggccctggccctggcaccttctttgtattggctgccccagtctcgcggcacggacacaccctcagatgtcaacagtgccctgcgtacctgagaaggtgtggcaccaggaccttgcatctatctgaggctcccctgccctagggaccctatggggtacccttctccccagcagctcaagctggctctgcccagccgtggcccctggggcctccctgatgaggccgccatcttggcgaggagcaagcggggaagtccccatgggccgggatcaccacgcacgctgcgcctcgagtcacgggggcgggagcgaggcgcggcgcggatgaaagggccctggggccttccaaataggagggaacagtgccctggattccggcgggggtatggaccttaggaacggggaaggatggaagaatgggcagaagcagcagtaaccgtgcccaacgccatctccacggggcgtgcctccattccgctccccgtcagccctacccactcagccctgccgcctgccgcctgccagttggctgaccccactcccaagggaagagcggcctatcgctcccagctccttgccccgaaccacccagtgtacgcgaacctcgcgggccggcgtggccttggccgggcagggggcggggcgagcgccggtgacgcggccgttgccatgggaactcgccgcccgctcgctctctggagctggagccggagctgccgccagccgcccgcctcaggctctctctgccagccgtgcggccaggcccgcggggtggtcggggggagccgggcggcagagaaggagggagcgggtacggcctcctagccgagaccggtaagccgaagcccttgagccgctcgctgccgctgccgccgccgccgccgcgaccgcgagggacaaggacaagcgccgagcagcgcctgcccaacccccggaacgcgcacccgccccaacgcccagacacggaccgtgcgggccgcccccgccccagcgccgccccacttcagcccggcccgcgccctggacgcctccgcacctctggccggctccggctcagtcccggtagctcttctccgcccccgccgcagcctccgccgcagccgcagcctccgccacagccgccgcctccacccccggccccactccgcccgcgacccctgccggggccccgaccccggccctatccccggccccgcccgcggccccaccaacctccgttccggccccgtacccggaggcccagccgtgggcacgatgctgcccagctccatccagatttcgggggagccgctgtccggcgccgaggtgcgggacatctgccgcggccttcgcgacaacgccgtgcgcctgctctcactgcgcggctgccgcctctgcgaccgcgactttggccgcatctgccgggccctggccggggccacgtccctggcgcagctcaaccttaacctgggcgtcgtgtccagccccagccgcatcaagcagctggctgaggctctgcggaccaaccgctccatccagtccctcttgtgagtgcgccccctcgcaagggggtcccgggcactgcacccttccatacactcccctggcacctcctgttcctccacactccttccagtaccatcctaccttcacatgccttatgcacatacaccgtgcctcggcccatgccttcacagcaccctccaagcacatgcttggactttgcacgcgcgaccctagccgtgttgggatacccaccagttcctgacatgaggtgggggccgtacctccccacctaatcatctgcatttacttcactggggcagctccttggttcccaagggggaatatccccgtggggacgagagccctgcccactgcagagttccggtccaccacccacccaccccttctctgcccctccctgtgcaatgtcctggatccctgccccagaaaacaaaccgaattctccctctatctgtattccctgagaatctagaactttccttctccttttccaggcctctcaagcgctgtgactgccctccccatacctagggctgacagaagtgaaagtgcccctttcccatgtagatagtgcggaggactgcagtaaccctgctctctcactctcctccagcctgcatgggagccccctgacagatgcggggctggccttgctgaacccagccctggccctccaccctgccctcgtggctctggacctgggggactgcatgctgggtgatgaagccatcaacctcatctgtggcctcctgcccccagatggggccaaatctggtgagcaggaccctgttgagggcttgggctagtgtggcagtgatgaaaatcgaaatgcagagggaagggggtgtggccccagagctctgatgatgtgggcgagaacatctttctactcctctcaggaaggggcaggacggggggcagcatggagactcaggaatccaggctggggcaggcagaggaagcatgggcctccttaatggctcttgacctctatggtgggggtaaggtggtgcccagccactagggacaccccagagacacagggattgtggggaagggctggaggagggcttaaccctccctattctggtttcttgctatgatgctgcccaggcttgaaggagctaacgctgagtgccaaccctggcatcacccctaagggctggagccgccttgccattgccgtggcccacagctcccaggtccgcgtcctcaatctggattacaaccccctgggtgaggctcaagaatacccccttgggctgtcactgcctcatgccctatccaagagcctgggaccatcagttgacatggtaacccgtacactgggagagggaagagaaacgggagcccccaggggtcaaggagatagctttgtggcggaccaggtgaccaacaaatagatcaaaacatcagtcaccacccgtgggcctaacttgcttcgtgccttcactcaccaatcacaatgatcccttcctgaccaccaccaattgtccatgtttccttggccagggattagtatctaaagttgttaaggcaatggggaagctatctgtaaggattagcaggcatgtgtatgaatgtgtgcacgtgtgttgtctccccaggtgaccatgtggcaggaatgctggctgtagctgtggcctctagtcgtaccctagaggtcctagacttggagggcacagggctcaccaaccagtcagctcaggtgggaagtcgtcatgtttgggcacggccaggggatggggtggaggttagtttatgtgtctgatgacatacctaaggcatggcaggttgaggtctgaggacctgccttaactgtgttcatccttttccatattcttccccacttcagaccctgctggacatggtagaaaattaccccacagctttgcggagcctggtgttggctgagaacagcattagcccagagctgcagcaacagatctgtgacctcctctctgagggagaggaggaggaggaagtggcaggaggggctggcgacacccaggaatgggagagagggcgggagcctgctgcccaccagagaggcagcagctcctggatgtgccccagcggtaagaacccagagggttgatcagagccaggtctggaagaggctcgggacaagggagagtgggtgtgcagaacctaggctctcacctatctgtggtccccattggaggaaggaatggtggtctgaacacttctctgcccttccacagatcccagctctcagatggtgctaatgacgtcaggactaggggacagtctgttggctgagaccgagatgtgactctccactgggcctctgcacaccatttcacttatctatgtcccgagcaccttgccccagatatcagggtcaggccctgggacttgggagggaactggggtcaggggctgcatgggggctctggcagctcctggcagtgtggtgggaaggaagctctggaagctgtgactgagcaacagccttggggggcacttgaacccacggcaatgcctttgaacttggcagctctggctgcaacccgctggctcggaaaagattttatgaactccacaacctgtcgtgtggctgtagtcacttggggccggcagtaggggaggaattggaactaccagtaagcaccactagggggcagtagcatcgcacagcccaagctctaagctgcgtgacctggtccaggatctcaaaataggcctggccaggcctagaacccaggcctctgaggcaacaccttacactagccccataaagatatggtccctgcctccgagggaagactcaggaaccctgctaaggttacttaaggtgccccctttcccgctccctgatgctctgtgcctagggaaaccctaggcagagtggggcgagggggagtcactagccgactaggatgagactaggactgggaatacttatgaatggggagaaaagtgggagaggggaggtcattaagacaagttaggccataccagtaaaatagttttatttgattttaaaatagtcatcaatgtgaaaatttctcaaagcttaagagtaacagtctagagccaaggttgggagtgggggccaggcctcacacagagcccagcttgaggcccctgagccccaccctcctttccagagggagggaggagacagctgagggggccctgaatcagtcctctccctcgtccccaaggccagctgtgccaggcccctggagggcaacagctcatgcggaggactggggggggaagcaaacaggtaggaaacggaaatgaggttaacaattacaccatcacccccaaaaaaaaacaaaataacaaaacttgtgactatgaaaggatggaagatgaatactgataaactcctcagctccccagaaaagcccagtctgggctgggttgggctgattggaggaaaggtcttgagacccaactgcatgttacctctgaagaataaatattctaagaaaaagggaaaaccatgaggcaagctgctgcagtcagtcaacgcagctgacaggcctggcatggcccacaacctgaccccatccacacaggaaacagctgtgcgggtctggatagaggagaggtcaagggcttggactggggaccctgagctgccaaggtgtggggactccttgcagtcctggtgcagcaatggcaggaaggccagcaggggccctagttgagcaggttgccctgctcctgggcctgggtcaggctgtccttgcggtgcaggtggtgaacccccatcctcttggggctgcg

SEQ ID NO: 96870 - DNA, 37980 bp, Homo sapiens
tcaggagttcgagaccagcctggtcaacatggtgaaaccccgtctctaccaaaaatacaaaaataagctgggcatggtggcacgtgcctgtaatcctagctactggggaggctgaggcatgagaatcgcttgaacctgggacatggaggctgcagtgagccgagatcacgccattgcattccagcctgggcaacaagagagagactctgtctcaaaacataaaataaataaattaattaaaatacaaaaattagctgggtgtggtggcaggagcctgtaatcctagctactcgggaggctgaggcagcagaatcgcttgaacctgggaggcggaggttgcagtgagctgagatctcgccactgcactctagcctgggcaacagagcaagactctgtctcaaaagaaaaaaatgcaaagagccagttcattaagtccaaatgcaacacgtgagtttcagaaagaaagaacagttgaaaaagccagaagggttaggctaccaaagactagagtggggagaaagtgaccgaagccctggaagctgcttattctctcaggctttgaagatttcttagaccccctttctacctgcctcccatctaagagccacaaagtcttcccaccaacttgctcccaaagcctgtgcctacctggggagaaggttttcggtaaaagtgcttaagctgttcatagggcagagggagctgctggcgttgatacatgatatgctttagaagttcacaagtaaactgacagcagccttcctggctcacaggcccaggaaacaccactggtaccatgcagtctcttgggcaaaaggcctccgaagcgttgagaggttcctgcgtagagcttgtctcaagtagttctatctgggaggcgtgagtttcttcggacttctcataccactccaaatctggtagatgaaaagagggacaagagagaaaaattaaaaacctaaaagccagtcagtcttctcattccctgtggccgacaaaccagccaccctgaaaaagcaggcactccgacatacgcccatatcctccgcagcctacagtatgggccgtggcagggagagattcctgatccctgttgcctgaggagatttaatcgactgcaagatagtggggggatttcggagggctccccgctcagaaagctgcgggacttgatctggggaaatgagtcaaaagtgtagtcaagcagggtccagtgcgacccagggcgatggagtcacagccagagccgtgtaggacacccggaagacagggaagacgggctagggagaggaccagcggataaacgaatggatggcgcggcggtagggaagaaacaagtccccaaggctccccaaactcttggccccacgccttaccagggactgcggctgaggacagaacctccgcctccggcgccgccatcacgacctcccctccgctactccttgcggttagaataaaggtctcgcggggcatcatgggaagcccgcgcctccacttccggctcagttgggtcggaaaaaaggcgcggcgtcgccgcagtgtgggggaggttaagtggagctgggatttgaaccctgcgttcctcctttaacaccctggcaaatgtacgcctaacccttgcccagcagggaacccaggagttctcagccactgagcgctgctttctaaaagacaccagccctcttgcatctattcactccagcattcactactcactgtgcacctacttcgtgccaggccctgtcctaggtgctggagacagcggagaacaagccaggcgcgggccccgtgctcaaggggttcactgcctgtagatacaatacaatgtgatgaattatacagaaaagtgtacacggggtgtggaagtgaaaaacaagggtggctgacccacagagggtaggggctgggaaggagtggtcccagaagaaatgtgtgaagctgtgacctgtaggataagtcaacaaggtaaagaggagggcctagtgctcctggagaccttgagacaagagcatactctgtacaaggaatgaaaagagttcatattataaagagttaaggctgtagtgaataacaggagccagatcatggcaggaccgtataagccacgtgagagtttggacttgatcctgtaggcagatggggaagccttgaaaggtttaagtaggagagtggcatgattaaatttacatcttataaatttaatctctaccctggctgcaggatagagattggattacagagaggataagagaggaggcagggataccagttagaggtagtgcaattacccgagtacttgatgaaagcagcctaacctagcgtagtcacagtggggtggagataattgggtaaactcgagatatttaggaggtccagtgaacataacttggggattgatttacaaggaggaggaggaatagaaatagactgagaagaggccaggcacggtggctcacgcctgtaatcctagcactttgggagtccaaggcaggtggatcacgaggtcaggagtttgagaccagcctggccaacatggtgaaacgctgtctctactaaaaatacaaaatttagccagacatggtggcatgcacctgtaatcccagctactcaggaggctgaggcaggagaatcgcttgaagccgggaggcggaggttgcagtgagctgagatcgcaccactatactccagcctaggtgacagagtgagactccatctcaaaaaaaagaaaaaaagaaaaaaaagaaagagactgacaagaaaacaagcaggtttctgacttcagcaattgtatgggaaattgtaccattcaatgacagagggaagcagggtgccgaggccaggagttcaataccagccaggacaagattggggaccctgtttctgcaaaattaaaaatttttttttaaagttagccaggtgtggtggtgcacaactgtcgtcctggctattctggaggctgaagcagaggattgcttgagtccaggagttcgacacttacagtgagctatgatcatgccactgcacttcagcctgggcagcagagcaagaccatgactcaaaaaaaaaaaaaaaaagaaaaaaagaaaaaaaaaaaggatggaggaaacactaaaataggaaataagaccaggtttgttggggtgggaggtgagtaggagaaaagatgagttcagcttttcacagattgaatttgacatctccataggataatgaatagagatatttaggaatgccatttgcaataaaggtatgtatttaagagccatcagcatgttagtgaataagatcacccagggagggtgtagaatgagaatgggctaggatattgaagacactaatgtttaggggatgaccagagagacagaagctatggagaagactaaagagtacccacaggaggataaagaaaaatagacaaatggccgggcaaggtggctcatgcctgtactcccagcactttgggaggcttaggtgggaggattgcttgagcctgggaggttgaggctacagtgagctgtgatcgcaccactgccctccagcctgggtgacagagggagaccctgcctccaaaaccaaaatagacaagtggggccaggcatggtggctcatgcctgtaatcccagcactttgggaattcaaggcaaggggagtgcatcaatccagaagtttgagaccagtctgggcaacataatgagaccttgtccctaccaataaataaataaataaattaaataagtgtcaggtcatggaggccaagaaaagggcgtgtttcaggaagtagggaccagaggtcaaaacacactataaaagtacagcaattagaggccaggcacagtggctcacgcctgtaatcccagcactttgggaggtcgaggtgtgcagatcacctgaggtcgggagtttgagaccagcctgaccaacatggagaaaccccgtctctactaaaaatacaaaattagccaggcgtgctggtgcatacctataatctcagctacttgggaggctgaggcaggagaatcccttgaacctgggaggcggaagttgtggtgagctgaggtcatgccattgtgctccagcctgggtgacagagtgagactccgcctggaaaaaaaaaaaaaaaaagtacaatgattaaaatactgggtctgactgggcatggcagctccagcctataatcccagcattttgggaggccgaggtgggagaattgcttaagggcagagggattgcttgagtccagaagttttttgttgttgtttgtttgtttgtttttagatggagttttgctcgtgttgcccaggctggagtgcaatggcgtgatcttggctcactgcaacctctgcccccagggttcaagcaattctcctgcctcagcctcccaagtagctgggattacaggtgcccaccaccacacccagctaattttttgtatttttagtagagatggggtttcaccatgttggccaagctggtcttgaactcctgtccttaggtgatccacctgcctcagcctcccaaagtgctgggattacaggagtgagccaccgcacccggctgagtccagaagtttaagaccagtctgggcaacatagtgagatcttgtctctattaaaaaaaaaaaaaaaaaaaaaagacaagtgtcaggtcatggaggccaagaaaaggatgtgtttcaggaagtagggaccagaggtcaaaacatactataaaagtacaatgattaaaatactggatctggctgggcatagtggctcacgcctgtaatcccagcatttttggggaggccaaggtgggagaactgcttgagtccaggagttcaagaccggcctgagcaacacggcaaaccccttctttacaaaaaatacaaaacttagccaggcatggtggcatgcccctgtagtcccagctacctggggggctgaagtggaagaatcactctctagggttggaggttgcagtgagtcaagattgtgccattgcattccagcctgggtgacagaaggagaccctacctaaaaaaaaaaaaaaaaaaaaaagtcaatcaatcaatcattttctctcttcctcctcctcgccacccttaaaaaataaacagggccgggcacggtggctcacacctgtaatcccagcactttgggaggccaaggcaggcggatcaactgaggttgggagttcgagtccagcctgaccaacacggagaaaccaccgtctctactaaaaacacaaaattagccgggtgtggtggcatatgcctgtaatcccagctactcagaaggctgaggcaggagaatcgcttgaacccgggaggaggaggttgccgtgagccaagatcgcgccattgcactccagcctgggcaacaagagcgaaactccatcaaaaaacaaacaaacaaacaacaacaacttctggactcaagcaatccctctgcctttaagcaattctcccatctcggcctcccaaaatgctgggattaaataaataataaatagataaataaataaaatagtaggtcaggtgtggcagctcatgcctgtaatcccagcactttgggaacccaaggcaagaggattgcttgagcccagttcaacaccagcctaggaaacacagggggacaccatctctacaaacaataaaaacaaaaattagctgggcatggtggctcgcacctgtagttccagctactccagaggctgaggtgggaggatctgcttgagcaggggaggttgaggctgcaatgagctgtgatcacaccactgcacttcagcctgagtgacagagggagaccttgtctcaaaaaataaataaaaataaaaataatccatgtatatgaagggacacatgttatcagacaagtgcagcaggctctggttatcaagagggcccagggctggtcatggtgagaatgttgggagaatggtcttatctcttccttccaattctcatccttcttgagatctctcactgagttccctagtctctgtctctaagcagcagtttccctagtaggcctgtgcccctggctagcattgacmtctacggcataacctttccttcagtggcacaggactaagaaaagtcacatgtgctttcaaccactgaagacccacataattggcctatggtcagctwggcccttttgcagattttggtctctctgctctcactgctttgggaaattatgctatgtggacagcatgatcagtaaacctgcctccctccttgtggccctgggaggaagccatggactctaccaagtctgaacccctgaagggatcaccagaggtaagtcattattgctgcttctagttttccaaggacaactgaggtctggagagaagagttgcttaatttctttttctttctttttttttttttttttttttttgagacgaagtctcgttctgtcacccaggctggagtgcagtggcatgatctcagttcactataacctctacctcccgagttcaagcgattctcctgcctcagtctcccgagcagctgggaccacagatgtgcaccatcatgctgggctaattttttttttttttttttagttggagtctcgctctgttgcccaggctggagtgcaatggcgtgatctcgggtcactgcaacctccgcctcccgggttcaagcgattctcctgcctcagcctcgcgagcagccgggattacaggcatgcgccaccacgcccagctaatttttgtatttttagtagagacggggtttcgctgtgttggccaggctggtctcgaacacctgacttcaggtgatccgcacactccttggcctcccaaagtgctgtgatttacaggcgtgaggcaccgcacccggctgagttgtttaatttcttgaccgtgtatgagcacctcgcagttcgagaagaggggagaagtggacacactgtgagtggtctgagtcatgagacagccatgcggctgtgaattgagccctagcgtcctgactcgcagctcagcaacataactgcttttccaccctgcctttctgtgttctgtgcactggcttatgtcgctgaatgtatgtactctgtagagtgcaacagcactaaagagctggagattgcttcacaagagagtcaaaagccaaaaatcccctgtggccctaggccaagtttctattcccggccactgccccgccctcrtggtggttggtgtaacccgagccctagccccgcccgaagtaggggccaggcccctcctacagtcttggccgtttaaaaccaaactcagttcttcccgattggttctgcttcaaaacaaaggggaggaggaatactcgctttgggtatgcttgyagccttcggggaggaagctggtttacgggttcgggtstcgtgtcggggccaccgcggtgcctccggttattaaaaccagcccctggacggtgccagcctggtaataaagcagtgactactatgtaaaggtagcataatcatcccaacaataacagccgtaatttggctaatcaccatccgcctccgccctggcgttcgccctgactcaccccagcggcacgcgggccataggggaagaaactgaggcagaggcggagccagcaggctggcggcaccagtagcctcagttctgcagctctcgaggtccaaaacctgttgtctaggatccgcgctaaagggccaaatcccggagcgcccacaaagctcgattctgatgtaagctcttctacgctggtgtcctcgcgtccccaccccaggcctcgaggctctaaattccccccaagtcctagaaaaagaacatagcgcgaggactggaagtcagactacagctcccttaagcctttgcgcgccaaggcgcgctccttccccacgcctccgacgactcccgcggccacttgcgccgcgatgcctcctgggagttgtagggcggcgacgtgtcatttaagtgaattcccaggcctggggactctatatcccgtggtgccccgcggctgtttctgacgcgacccggaggccagggaggtggggggcgtagcttgtgcagagccccaccccactctgctcaggccggccggacacggcagtggcagtaagggcggcggcgacggcggcggcggtcgggggaggggccgggcggggggctggcggcagcggcggatggactcgcgggtatcggagctgttcggcggctgctgccggcccggagggggcccggccgtgggcggaaccctcaaggctaggggggccggcagcagcagcggctgcggggggccaaagggaaagaagaagaacggaaggaacagagggggcaaagccaacaaccccccgtatttgccccccgaggtgagcacctgagaagtggtagggcgggaagaagccactctttccggcccaggactctagggaggcgggacccagataattaatctccccttccggtgtcgagaccccagggaggaggggcacgggaggagaacacctctttcaggtcccgggaccccagggaggaagggcagagactggactctcaggtgacaggacctcagggaggaagagtggagagggaggactcccccttctgatctagattaccccaggagagaagtagagaaaggggatcccaggaagagcaccccgaccaactgcgtgtgccgccatagggcaagagagactgcatcctgggacgagaggcagacagtaaccaccacttcttctaaacttgttccacagggagaaggggagtacccgggaaaagagcaatatgttccacacggacacacacacagtactcgggaaaagagcagtatgttcactacacacacacacacacacacacacacacacacacagcctaagccagtggttatcaaactttggcatgtatcgaatcacccggattgctggcccccaacgcctggccaattttatttttttattatttatttatttattttttttgagacggagtctctgttacccaggctggagtgctgtagggctatctcagctcactgcaacctcggcctcccgggttctcaagcgattcttctgctgcagcctcccgagtagctggcattacaggtgcccgccaccacgcccagataatttttgtattttyagtagagayggggtttcaccatgttggccaggctggtctcaaactcctgacctcaggtgatccacccgcctcggcctcccaaagtgctgggattgcaggcgtgagcctccgtgcccagcctagaatttctgattctttcttactagtgaggatgggcctgagaatttgcatttcttataagttcccgtgtgatactaatgctgctggtcccaggacctcactttgggaaccattggtctgggccctagactgtcattcttgtaccacattttttgaagccacccatccccagaaaaatgattaaaaggtttttattgatggggaaaaaaaataatctccttaacacaccrtgargtggagattatgagtgaagacctgttagggcctgggagccagacagccttgaagggatggaatgataggaagggaagaggaaaamtaaaatatccagagaggcgggtagaaaaatgcagactggccaaacaggcaaatcccatatccctttgtacctgggaggggaagcctcaggtaacagggtgcttctgtgctgtgctacccactggagctagaagagactgtggggtggattcaggatttcacctccactgaggttagggggcaagaggtaaaggccatagcgagtctgtccrcttcattacattttctgagtttttctgttcctctcagccccagctttggagctcttctcctctctcacctagatcttctcggtcatcaggcttgtagtgaccattgctgagctcaccctttggctctgatccagaacctcttgcagcctcttactctagatgacatcagctgaaaggggcaggcagggaggaaatggtgtttcctagaccagtgacaaagaaaggttttaacagcctgggcacagaggagacatagacttctgggaaaagcaggtttgaggccctggaggtggggaggaagggatgatcttgcatctaggaagaacgtgctgccagtgatcaaagaatggattgattcagtgttctgttcctggcttaaatgggtgactccttgtgtccttataggccttcccttcatagaggctatgctgggggtgaatagaggatcttgtctgccactgacctttgacaggcacttgcctaaccaagtgccagtggggcttcctgctttctcaagttagctacctggacccagtgggaattgaggggaagtagggattgggtctgtacagtgtatggtaactgctcactgtttcttttcaggctgaagatggaaacattgaatataaagtgagtcctaggctggggaaaagcaggggctggggtaggttgtccttgccagtgtgggataatttcttttttctttctttcttttttttttttgagatgaagttttgctcttgttgcctaggctggagtgcagtggcgcaatctcagattctcctgcctcagcctcccaagtagctgggattacaggcatgcgccaccaygcctggctaattttgtatttttagtagagatgaggtttctccatgttggtcaggctggtctcgaactgctgacctctggtgatccaccagcatgggrtaagttctctgagagccttccaacttcataattatagcagtttaaggatatggttcaggttaagggctctgtacctcgttctgttggagggggatcaggtatgagtttaagtggaaagagaaagtcctggtccttgcagcagaacaggtggggaycatgtaggtttgggaggaacacctctgatttcaccttatgataccccacttgccctaagttgaagctggtgaatccatcccagtaccgctttgagcacctggtgacacaaatgaagtggcggctccaggagggacgtggtgaggccgtctaccagattggggtagaggacaatgggctgctggtggggctggctgaggaggaaatgcgagcttcgctcaagaccctgcaccggatggcagagaagtatgcttccccttccccaccagttctcctttacctgacttggggggacccatgcatacccagttacctagggcctgaggggccaaggtgggactttccttctcttgacaaagggctgaagtggggagggttagtgttttggtcccctcctcactggacctaggctgttttgctccttgaattaagatatgtatatttgttttaaagggaactgtgaatgaggaatagattggagggtggtaggaagtgcactaaggtattgggagctctgtgggaggtgcaggaagtctgtaggtccagagcgagcctggaataggagaaggacaggtgagatatggcagctgtggccttgctgtgacagggttggggcagacataaccgttcttcgagagcgagaagtggattatgatagcgacatgccccggaagatcaccgaggtgctagtacgaaaggtccctgacaaccaacaggtgagcacacacccatccctgtctctcatgtccacactgtggaagggccctgtggtggcaggctgtctcctggcctgggatcctgggggcttccagttcatcacttgctccctagggagcgtcactgcccttgacccagtcttcagttagaggggtgagagattggagttcttatctctggcaattcatccacagttcctagacctccgtgtggccgtcctggggaatgtggactctgggaagtcaactctgcttggagtcctgacccagggagagctggacaatgggcggggccgggctcggctcaaccttttccgccacctgcatgagattcagtctggccgaacctccagcatcagcttcgagatcctgggctttaacagcaagggagaggtgcatgggatcaatgggacccaatggggccagactctgaggatgggatggtagtagtgaaggacataggatgggggtagagtgtggagactttttgaaatagtatagatgaatgccctgaggggactgtgaacaagctctgcccctcttaggaaatcaatggggaatcaactaaattaaataaaaaatggggtcaagattaagaggcagggtcacccagggaatggtttaggtcctggcaactctgaaggggttggaagggctggcaggaggcactgagggccctgggccctgggccaggtggtgaattacagcgactcacggacagcagaagagatctgtgagagcagctccaagatgatcaccttcatcgacctggcaggccaccataagtacctacacaccaccatctttggcctcacatcatactgccccgactgcgccctgctcctcgtcagtgccaacactgggattggtacgaggcattagggcagggacagggctgaaggggggtgctgactctcctaccctgggcctcaaatcttggagacagaccaatgctcctcttcttccctctcctccctcctgcattctcactcttctctcctgctgcttgctgtccttatgaggcagctggcaccacaagggaacatctggggctggccctggccctgaaagtgcccttcttcatcgtggtcagcaagatcgacctatgtgccaagaccacagtggagaggacagtacgccagctggagcgggtcctcaagcagcctggctgccacaaggtccccatgctggtcacctctgaggatgatgccgtcactgctgcccagcagtttgctcagtcacccaagtaagcccaccttactctaaagccctgatccactaggaaggctgccacagagcccagggcccagaagcatgatatcctacttctccagggccagaccagttctggcttagttctgcgggtgtttcagcttgggattgtggaggggcatcttgctaaagggcttgaccctcctcccgagccaacctggagcactgctgatgcctgggaccatggcgatgaagtgctataccaggcatttgctgtttcccttgggctcggatgggctttttgtgtgacattgctcgactggctcacaagaaggcccagagttcctgagccatttgcagacaggagagaggggcccccagccagaacaaagctcacctttccatgtatggggctctggcctctgcctcctgtttggactgtcttcatctgtccattccatgcctccctctacagtgtcacccccatcttcacattgtccagtgtgtctggagagagtctggacctcctcaaagtctttctgaatattctgccgccactcaccaacagcaaagagcaggaggaactcatgcagcagctgacggagttccaggtagttgactgcccaaacatctaataggctgggaaacagggaggggcygcttcagaccaaacccagagtctgtttagagattttggacccaccagccctacttggcaggccattgatagcgttttctttggcttcaggtggatgaaatctacacagtaccagaggtggggactgttgttggaggaacactttccaggtaaattgtcttgcttgctaccytccccactcagccctcacctatatactcaaagacatcctggcccaaaggaggagaccctggaattgaacggaacccatttaaaggacatgcttatttgcagattaggctttcactatcagaagagctggagaacggtagtctgttggctttggagggaagaaacagtattgctgcctattggggaatctccaggcccctgagagagaagtgtgggtcttgagctccaggaagaaaactagagtgtattcaactgacttcatctcacacagggaaatgagagacgtcacttaagactcttctttctttctttctttcttttttttgagacagagtctcgctctgttgcccaggctggattgcagtggagcgatcttggctcactgcaacctctgcctcctgggttccagcaattctcctgcctcagccttgagtagctggaattacaggcgcctaccaccatgcccggctaatttttgtatttttagtagagatggggtcgtcaccatattggccaggctggtcttgaattcctgacctcaagtgatccacctgcctcagcctccccaagtgctaggattacaggtgtgagccaacgcggctggcctaagactctgcaaagcagagaatgaaacccaaggggataacttgctccttcagtgattaggtgttcrgtgttgttaaaccagcaagtgtctctctgtccaccatcactgctggccttttatgaaattagtcttctgattctgaactctggcagtgagccctgttacatccaagtcagaatttagggttcttccccacttgagggactcaaccctagaagggaaggaatgctctgggtgatcctaatagagaagtaggtatggggaccttggctgacactgtgccacctgccctctgggctgcagtgggatttgccgtgagggggaccagctggtggtgggccccacggatgatggctgcttcctggagctgagagtatgcagcatccagcgcaaccgctctgcctgtcgtgtrctgcgagctggtcaggctgctacaytggcgcttggggactttgaccgtgcactgcttcgcaaggtgaggtgggtgcatgggttggggagggaacgctaagagaagtgcctaggagactggctactgaatgagcacctatctaaggtgcttcagagaaactcagaggaaacacactctctgacccaagaagcttctggtctagctacgtagactataaaaacagcttaacgtactcatgaggtacagataactaaatatgaatcactatgttacactgtttttaatgaacacyatttttagtgttcaggaccctaaaaatgtgaagcgttagatgggctagaggacgtaggaggtgggtaaagactcattccctctgagagttttgattattgtcttttgaggtctttgtgtttagagttgtgtagaggaagaggaaattcaggagctataaagggtgtggggtggctggggagggagagtctgatgttagagctgcccttcctgggcctggggtytgttcctccccagggcatggtgatggtgagcccggagatgaatcctaccatctgctcggtgtttgaggcagagatagtcttactgttccatgccaccaccttccgacgaggattccaggtgacagtacacgtgggcaacgtacgtcagacggcagtggtggaaaagatccatgccaaggtgagagggacctggccttccatttctccagaggtcagaaaagagggaggcctgccccagactggcagagaactccttgatcccacaatgggaataaaaccccrcttagggtgggtagcggcctgataggcctctggagggtggagagccacggctggcagagaatgggacagaaggcactggccaggggagtgaccacttatttgctgcaggacaaactgcggacaggcgagaaggcagtggtacrtttccgcttcctgaaacacccagagtacctgaaggtgggcgccaaactgctgttccgggagggtgtcaccaagggcatcggccatgtcactgatgtacaagccattacagcaggakaagcccaggccaacatgggcttctgaacccttcaggcagggacagttctattgctgtccctacaatatataaggtgacttctggccatgctgccctgccattggcggctctgtgtgttaataggctagggagagaggggtgctgwctgccacttgctccctgccaactttctggagaggtgccaaacttggtgtggccaggaaagggcagtcctgagggagaagacaggattcagggcagtgctccgaagctgtgtgctcacctggttggctcatcaaacctggcaaccctgtggcctgtctgccggagctgactggatccactcatcaattcttcgtccccactactaagactgggcatgttttgctggtgtggtctctgcacttcaggaatggtcacaacagggggtagccctcaaaagcactcctttttctatacctcttctcaaggccatgtaagttgcccatctctacctggctgtggacaaaaggttatctgctcttggccatctggtggtggtggcggcccagagtctgaagaaatggcacagggacagtgaatggtagtgttgccaccctgtgctgaggcctgaggcctcttcctcagctttatctccctttccttcactcaagggccatttccccagtccctatctcccccatcccctcccggcttataggccccacaggtgctatttgttgtgctggcccaggcgtggggctaccaagcaaaggcttggcatataccaaaggccagctgcatgcccatcagtctggtctttttcctctgcggtcatgttggctttcatgctggatcaaatgttttactttcccagactggtggcatctgagttccccatcctaccactctcaccccactttcctgccccacctaaaccctcgttttagtaatttgtagtgactgttcccttccctctgttgcagggaaccaggaggaaagggaaagatgttgccatatttcctactctttaggcatggactctcctttccctttgttagtgtcctgggttcccatggactcarggatttgttggctaaggtttctctgtgcatatatatatatatacatatgtatatatatttaaatacacatatatattgtacagaataaaaatgttttattgaatacactgtgcttatgcgttagctacaggctcagcttccttccagggctagatacctcttcaggattagagacaagtgaaaccccaacactgctgagccctgaatgtggaaagagcccagctggtatctcgttcaccattgtttttctctcctccacataggttcagagttccagtattgtaaccaagtattgtggcctattttccgtagttcaagtgagcagaatactgaggcctttcacgtgaaataggtagctaccctgtatttgaagagttggccacttgctagtggtcagaatagtaaggagcccacttctgtgccctggcagagatacagtgccagctacttaaagaagagtagaatttagagacaaaaggtaatctggtcccatatttttcaagtttacatagcctaaattactcttggaacaatgagggccacttgaccaaaccttagtccctgctcctgtttccatgttcatactacttgattttgacattttatgggtaaataggggccaaagtcaactgtaaatagaaactgcattttgaggagaccctggaaaagaaatatgtgacccaaagtcctatgtggcattctgcctctagagtattaaagtgatagcttccctaccactcaggctgttttataaaatgtaactggtttaacttgctactaacaagcctgtagttgaacaacttcctcctgtattaggggctaagctgtttacttcctctctatagctgctgatagagatgaaagctttgtccacaatttacttatcttttgcctgtattgtaaagaaaattttggaaaatcacatttcagtacttaataagacatctccaggaactagtgagcctctctgcaacattaatggaacatttagggggataaaaagtatataaggcagactcccaaggagtttatacatgtttatgatcccaattgtggtaatcagatctaaaattcttcactatatacattcatccaatgagtatcagcacctatcatgtgcaaagcactatgaagaatctttgcctttaagaagctacatagctagttagggggaaaaggccacgtatacagtgaatgtagtcttttttttttttttttttttttttttttttgagacagggtctcagactgtcacccaggctggagtgcagcggcacaatcatggcttattgcagccccaaactcccagattcaggtgatcctcccaacctcagcctcctgagtaggtacgactacaggcataagccaccatctttgtattttttgtaaagactgtttygccatgtggcttaggccggttttgaactccagggctccagtagtccacccacctcagcctcccaaagtgttaggattacaagcatcagccaccgtgactggctaaatattgtcttttattagatattcaagtatcataaaagcagaaaatatttttgaagaaaaaaatttcctggtaaatctagtggttttcaaatcttccccacctcttcaaactaaatatagaaccccccccccaatttataaataaaataaaaagtagaagttggggctggcctggtggctcaggcctgtaatcccagcactttgggaggccagggcgggtggatcacttgagatcaagagttcaagaccagcctggccaacgtggcgaaaccccatctctactaaaaatacaaaaattagccaggcgtgatggtgcatgcctataatcccagctactcaggaggctgatgcaggagaatcgcttgaacccgggaggcggaggttgcagtgagccgagatcgtgccattgcattccagccggggcgatgagagaaactccgtcacataaaaaaatagaagtttgggtatatgtatgggagggatgtgtacaccattctctgggcccacttcacccagcgccacctacttcagttcattttcttcagttgggttccctgtgtaattcaagtttccccataacagaaaagccaaaagagctgacttttcacacacaagagtggagaataagaatacagtactataggctgggcgtggtggctcatgcctataatcccagcactttgggaggccgaggcggatggatcacgaggtctagatagagaccagcctggccaacatggtgaaaacctgtctctactaaaaatacaaaaattagctgggcatggtggtgcacgcttgtagtctcagctattcgggaagctgaggcaggagaattgcttgaacccgagagacggaggttgcagtgagccaagattgcaccactgcactccagcctggctacacagcgagactccatctcaaaaaaaaataataataatacagtagtataaacatggacaagtgcaaaaagctacataacaaattttaaaccctaagctaaatatttacactcagtgggaaagatgaacaagccagtaaccctaatggctgaagcacttacctcttaaatttgtacttaagggcttaagaaaatgtcctctacacacctggtcattagtatcttttagatcagcatttctcaaactttaagatacacattgggaatttttttttttttgagacagtcttgctgtgtcgccagggtgcagtgcagtggcacgatctgggctcactgcaagctccgcctcccaggtcaagcaattcttctgcctcagcctcccaagtagctgggactacaggcgtgcaccaccacgcccagttgtattttcagtagagacggggtttcaccatgttggccaggatggccttgatctcttgacctcgtgatacacccacctcagcctcccaaagtgctgggattacaggcatgagccactgcacccggcccacattgggaatttttttttttttaaacagtgtcactctgttgcccagactggagtgcagtggcacaatctcagctcactacaacctctgcctcccagattcaagtgattctcctgcctcagcctcctaagtagctgggattacacgcatgcgtcaccacacacacctaatttttgttattttttgtagagatgggttttccccatgttggccagcctggtctcaaactcccagcctcaagtgatccgcccaccttggcctcccaaagtgtgggattacaggcatgagccaccacacctgacccacattgggaaatcttgttaatatcagattacaattaagtgggaatagtggtgaggctgagactatttctaataagttccctggtgatactgaggctgctgttcctcaaatcatacttgggagtagcaatgttctagagatgatctagtgggtttttttgagacagagttactctatcgcccaggctggaatgcagtggaaatctcggctcactgcaacctctgcctcccaggttcaagtgattctcctgcctcagcctcccaactagctgggattacacgcacccaccaccatgcccggctaatttttgtatttttagtagatacagggtttcgccatgttggccatgcttgtcttgaactcctgacttcacgtggtccacctgccttggcctcccaaagtgctgggataacaggcataaaccaccacgcctggcaagatttgattatgacttatcagatctaaacagagttcctgaactagtcaagtagcaatctaattctacattagaacaaaacgcaagagataggccaatggttagaactgagggtataatagggtttacctgtatgaaattcactgtttattaagtcacttttatgtacagaaagacctgccctagttaccatatcacttttagggtttcaaggcttcatctcacattcttcagctgaaaacaggtaaatctggtgaaggtattatctgaactgcccgtcacagagctagagagaagtttttcttttgttttttttttttttgagacagtctctcactctcaccctggctggagtgcattggtgtgatctcaactcactgcaacctccaccttccaggttcaagcaattctcctgcctcagtctcccgagtacctgggattacaggcgcctgccaccaagcccagctaattttttttagtagagacggggttttgccaccttgcccaggctggtctcgaactcctgagctcctgcaatccactcacctcagcctccctaaatgctgggattataggcatgaggaaccgcacccagcctaaagagaagtttttcttttttttttttttttgagacggagtctcgctctgtcacccaggctggagtgcagtggcgcgctctcggctcactgcaagctccgcctcccgggttcacaccattctcctgcctcagcctcccgagtagctgggactacaggcgcctgccaccgcacccggctaatttttttttgtattttttagtagagacggggtttcaccgtggtctcgatctcctgaccttgtgatccgcccgcctcggcctcccaaagtgctgggattgcaggcgtgagccactgcgcccggccaagagaagtttttcttaaaatcctttttttgggggggccaggatcggtggctaacatctgtaatcccagcaactttgggaggtcgaggcaggcggatcatgaggtcaagcaatcgagaccatcctggccaacatggtgaaacctcatctctattaaaaatacaaaaattagctgagtgtggtagcacgtgcctgtagtcccagctacttgggaggctgaggcaggagaattgcttgaacccaggagacggaggttgcggtgagctgagaacgcaccactgcattctagcctgacgacagagggagactccgtctcaaaaataaaaaataaaaataaaaataatcccttttttttttttaactatgcaagtctcattacatttaaaacccttttttaaacttggtcccttttctgtgccaactttatgtttgtttttgttcttgtttttgtttgagatggagtctcgctctgttgcccaggctggagtgcggtggcgcratctcagctcactccaacctctgcctcctgggttcaagtgattctcctgccttagcctccygagtagctgggattacaggcgtgcaccaccacgcctggataattttttttgtaattttagtagagatggggtttcaccatattggtctgaaactcctgacctcgtgatctgcccgccttggcctcccaaagtgctggcattacaggtatgagccactgtgcctggcccctattttttattttctgagatgaagtctcgctctgttgcccaggctggagcgcactagcatgatctcagctcaatgcaacctccgcctccaaggttaaagcaattcttctgcctcagcctctaagtagctgggatcacaggtgcctggaacgtgcctggctaatttttctatttttagtagagatggttttgccatgttggccaggctggtctcaaactcctgacctcaggtgatctgtctgcctcggcctcccaaagtgttaggattacaggcgtgagccattgtacccggccgagttacataatttgaatacattgttattaatctgcaataatctgtaaggtattatctccattttacagatgagaatgtgaagaaaatgacttgttcaaggccctcattgcaataaccagagctaagtttgcaaccacgtctcttagactccaaggcccacacactttttactttatgacactgcctccctaaatgctaaagattaaaaactctggtaggatgaatttttacatctctgtcagcagtgggattagaatccatgcctgtgaagagatgggaccgtaactcagcacctaaatggattattttttgtattaaaaatttcataattccctttctcagggaaatctgtaaagataaaatattaaagataaagayctgtaaagataaaaaatattaaatcctacaggcaagcctgagggcagcactaatgtgttaatggcttaaaaaatgattccaatgtttgcatgccctcaggcctggggcgtttattagtgcaggccaaagggctcttgggatttcttttgccttgatgagatacggcagaaacaacctgggggtttgaagagtggggctgcaaaaaggatttctgcaactccaatgcaaaatgatagtccatgtgttctggcawatcccataccggtaccagggagccacacttctcacagggcacttggtcctcagcagctagaagacttggatttggggttgctttctgagtcacctccagcacagatttggaagctgaagaggcgtgcatgctttggctgttgtgggccaaatccayctctgcaggagttgctktagaggattcttctrgcttcgacaccccttcacaaacagggacacaccctggatactctgttggtaaagagtttggtaatgctttacagttggaccatgggttttgttggggggaagaaactkaagaattattaagctgtttctgctttagaagcagactttyctgcttaaagaagggctcagttcctgtactttgactggtttraaaaggtaatgagggcttggatggtgaattgctcatgggagcctgagtgggagcagtaagagatgaaagcgaagcttctttaactttctgcctttctgcagctttttggaagaatgattccagagaygtggttgctttcttagtggctgtcaccgctgggccacttccctgggtcttagcttctgagctggtaactggcacctttggcagagaacttgggtcactgctcaagaagctggtgatgtctgtagaagatgaaggggcagaggcagaaaattttgtagcacagaggaaaagcattgtgagaggaggagacctatacagaaagtaaagaaataagatgattagcaatttagaagattaaaatagtgacctattgctaattccatgaattgtatctgttttatttcaccataggacagatttaatccatagatgactagcattctggttctgccacagaaattattctttactgcagtggttctcaaacgttaatgtgtatcagagattaacagacctgggatgacagagaatttaatttcctaggtgatgctgatgttatgtcttgagaaccactaatttagcaaccactcacctcccgacagctagagattattgttttttataaggtaccactggaaagctgctgtaattcagggttggggcaagaaattttattcaggacaacaaaaagctttagaatatttagactagaaagacttgaaaaaatcctcttagccattatcctgtttttaaacagggcactacctaaccctgactgacttaccactctggaatttctagagaatgaaattccacaactgcttttcgttactagtcccaatttcagaaacattttaagaaattcttgtgatagccgggagcggtggctcacacctgtaatcccagcactttgggaggctaaggcgggtgggtcatgaggtcaggagtatgagaccagcctgaccaacatggtgaaaccccatctctactaaaatacaaaaattagctgggtgtggtgacacacgcctgtaacccagctacttgggaggctgaggcagaagaattgcttgaacccgggaggcagaggttgcagtgagcggagattgcgccactgcactccagcctgggtgacagagccagactccctctcaaaaaaaaaaaaaaaaaaatcagaaatttttgtcataaagttcctcattgtgtctaatcactcaaattttcacataagctgaatttcagaagatgaaatatgcttttatgtacagattagtccttcaatgaggtaaagggtaaatgtcattttaaagttattattacactattggccgggtgcagtggctcacgcctgtaatcccagcactttgggaggccgaggtgggtgaaacacctgaggtcaggaatttgagaccagcctggccaacatggagaaaccctgtctctactaaaagtacaaaatttagccgggcgtggtggcgggcacctgtaatcccagctactcaggaggctgaggcaggagaatcgcttgaacccgggaggcagaggttgcagtgagccgagattgcgtcactgcactccagcctagacaacaagagcgagattccgtctcaaaaaaaaaaaaaaaaagtatcccaatatcctcaggtttcatgctttgggacagtcttataatcagataattttgatgcttccctgtgcatcacggagtttcacaccgttggtgagtagtatttgttatagtttgtcaatttataacttttcaaataaggtttcatgtgtacattagtaccacggttgttatttggttttgtaaaacttcaatatttgaaaataaatatatcaggaagtattaagtaaattattctcagaacaaagactttatttatttatttatttatttgttgttgttgttgttggagacggaatttcgctcttgttgcccaggctggagtgcaatggcgcaatctcggctcaccgcaacctccacctcccaggttcaagcaattctcctgcctcagcctcccaagtagctgggattataggcayccaccaccatgcctggctaatttttgtatttttagtagagacagggtttcaccatgttggctggggtgctcttgaactcctgacctcaggtgatctgcctgcctcggcctccgaaagtgctgggattacagccgtgagccaccgcgcccggccctatgaacaaagactaggagactccaccatattataggtctgtacacataattatactgccaatatatttagataagtaataagcgattaactaaactttgattttattttgtataatattcaatatacatctgtaagtgagcaactgacttacctctctctcataattatatttctattgtgaatttggaatactttaaaaaaagtaagggctttattaaatatgcaattaaaggattccaatcctgaaaatcattaatatctggacagaaaatgaagatgctccaaaaagaggcttatatttcatgaccaacagaagtgaagtttactaatgaatatgacatttggtataataccagtggagcttgtaactgagttgggatgtcagatagagaatatcagtgaacacaggtcacctttataatcaagaaatatgcttttaagatagaacaatcaagtagtttgaagttcccaaatgtatccttgaaatttgagctctgttctccaagtgcaactggtcatttccctgaccaagccaatacagagtaagggtctaacctcctgggaactggaatgtatcagctgtcggcaaaggatctgtgctgagctgtcttgtttctgaggttggtactgtattttctcccagagtaacaggtactggtagtctgagtcagagtctatcccagatggaagagctcagattcctactacttgtagagctaagacagagattcctactacttgtagaactgagacagacctcaggtgattcacccacctyggcctcccaaagtgctgggattacaggcgtgagccactgcgcccggccgatactttaataataactttaaaatgacatttaccctttacctcattgaaggactaatctgtacataaaagcatatttcatcttctgaaattcagctcatgtgaaaatttgagtgattagacacaatgaggaactttatgataaaaattatgtcttgtagagctaagacagagctaagaatcatcatctattctgagaagatgagctagaaaagaactcaccattctgtctggattccagaagtattacagttcttgatgacagtaaatgcatcatggctcatcttgtgagcatcatagcgggtaagggcacagcagcggcgcaggctgctgaggcgtttgtctccttrtacacgaatgctcacaaccagctgggtggctaccctgtcattctgtgggtggaaaggatggagaccagaaataaagttatgaggagcatctgaattctaggtactgaactgcaggagaggaaattaaaagaaccagggtgacaatggtttggaaacagtagtttaaaagtcaagaataaaggtaaactgagttctgcaaagagtaaagataaaatataaaaaagagaaagaggccaggcatggtggctcacgcctgtaatcccagcaccttgggaggctgagacaggtggatcacctgaagtcaggagttcgagactagcctggcaaacatggcgaaatcccatctctactgaaaaatacaaaaaaactagccagtcgtggtggcaggcacctgtaatcccagctactcgggaggctgagacaggagaattgcttgaacctgggaggcagaggttgcagtgagccaagatggtgccactgcactccagcctggatgacagagcaagactctgtctcaaaaaaaaaaaaaaaaaaaaaaagaatctatatatatgcaacagaatgcattttctgaatagaaatctgattacatggttccacaaaaaagtgttaatgctatttctgggtgtaaaaagtaactgaagaagacataatttggattatggaacatcggagtatcctaggatgttttgacagatgatgggaacaggacagcacaaatgaaaatgggactcccctaaatgtttttcatggtgtctaagcaggacaattataacaaatatctacaatactagatactattttgtgactgaaggaaggtttcaggtaagtaattgtctgaaagcaaagtggaactaggcttcaagtcatatctttttttctgccctggggctcttatggtaaacaaacattcgccaccaattccagaagtttctaccaacacctttttacagcttatctagagaagataccatatagtgagcctgccttgagagagcaagatcatgactcacttttcagtgaagtctgaagcatctgaatgctgtaatctcagcaaactgagacataatggtcaagaggcagaaatataagaaggtgaaaattctacataagggacccctatcaaaagatgctagtgagaagaagtatccctaaggcaaacaagctaagagcaggaactactttttggataaaaaatacatttgtatggatttatatatcttgagggaatacaaattagcaattataaaggagtccttgttgaccaaaattattcaactataactgcatgcctagacagtgcctagagatgcaggagagaacaaaataaagtccaggtcctcatggatcctatgttgtagtaggaactatagataataaaaaatagacatgtaacagaaatgaccacagagatgagtgctatgaagaaaagcagaataaggcagagagtgatggaggctgctgctgtgatagggtaactagggaggacctcctggagaatgtaatacatgcacagagatttgaataaatcaaggaagcaaatattaagaatatatgaacaaagagtctccagggcaaagaaacgggaagtgctaaagtaagagcttacttagtgtgttagataaagggaaggaggccagtgaagtggagactagaataagtgaggggaagataagagatggggtcagagaagtagcaagaaattagattatatttggctttatagaattacttttaaaaaattccttaatatgccttaagtgtgaagggaaaccactggaatgttttaaacagtgaagtgataggatctgctatgtcctgaattatttttggcataaagtcctttgaagcttaaaagatagattttcagggatccccactggatacaaagagggaagaaaaggctaggcacagtggctcatgcctgtactcccagcactgtgggaggctaaggcaggaggattacttgagcccaggaggttgaggctacaaggctgcagtgagctaaggttgtattactgtgctccagcacggatgacagccaagaccctgtctcttaggaaaaaaaagtggaaagaaaggccccagggacttagagagagatgagaaacaagtgccacctagtgggcaaaagcggaaaagggcgataacgcaactggatcaaatccctctttatgatgcctaccaaaggaacaaacatttaccacccattccagctaaaaaggagcaacgagcagttttggactattcttgacatgtacagttgacttgtagaactccaagacatttcaaaagaagaggatgcatcaaacaataccattaggaaagtgagaagaaaacccacagaatgggagaaaatatttgcaaatcacgtatctgacaagggacatgttaaaactcaataataaagagacaacccaatttaaaaaaggggagaggatttttgttttttcttttttatttttgaggtggagctttgctcttgttgctcatgctggagtgcaatggcgcaatctcggctcactgcaacctccacctccaggttcaagcgattctcttgcctcagcctcctgcgtagctgggattacaggtgcccgccaccacgcccagctaatttttgtatttttagtagagacagggtttcgccatgttggccaggctaccctcgaactcctgacctcaggtgatctgcccacctcggcctccaaaaatttgagccaccacgcccggcccaggaacaggatttcaacaaacatttccccaaagatatacaaatgtccaacaagcacatgaaaagattatcagagaatgtaagccaaaccataatgagataccatttcacacccactagaatggctaaaatttaaaaagtcagtaacaaggatgtggaaaaattggaaccctcttacattgatggtaaggatgtgaaatggtgtagccactgtggaaaacagtctggcgattcctcaaaatgctaaacatagagttaacatatgacccagaaattatactccaaggtatatgctggaaagaaaacaggtgtctacacaaaaacttgtagatgaatgttcatatcaacattattcataatagccaaaagtggaaatatactcaaatgtccattcactaataagtagataagcaaaatatggtatatattaatacaatagaatattattcagccataaaaaggtgtcagtcctggccgggcgcagtggctcacgcctgtaatcccagcacttttggatgctgaggcaggaagatcacaaggtcatgagattgagaccaccctggccaacatggtgaaaccctatctctactaaaaatacaaaaattagctgggcgtggtggcgcgtgcctataatcccagctactcgggaggctaaggcagcagaatcacttgaactggagaggcggatgttgcagtgagccgagactgcactactgcactctggcctggtgacagagcgagactccgtctcaaaaaacaaaaacaaaacaaacaaaaaatgactaagtactaatacatgctacaatacggctgaacctgaaaacatattaagtgaaagacttcaagccagtcacaaaagaccacatattttcacaaaagaccacatttatatgaaatgtccagaacagttaagcagtgtagtggttgcctagggctggggagtagctgggagagaaatggggagtgactggtaatgggcacaggatttcttttggggggtgataaaaatgctctaaaattgtagaatagttgtagaactctgcaatatactaaaaccactgaattattttaaatgggtgaattttgtggtatgtaaagtatatgtcaataaagctatttaaaaaggagagagaaactgccgggtgcggtggctcatgcctgtaatcccagcactttgggaggccaagatgggcagatcgcctgaggtcaggagttcgagatcagcccagccaacaaggtaaaaccccgtctctactaaaaataaaaaaattagctgggtatggtggcaggtacctgtaatcccggttactcgggaggctgagacaggagaatcgcttgaatttgggaggtggaggttgcagtgagccaagattgctccactgcactccagcctgggcgatagagcgaaactcagtctcaaaaaaaaaaaggagagaaactaatcatcagatgtctttaacattagaaagaaaaatgtacaatgctcagaattttttttttaagtcaaatatacagagatagagaataaaacagtggttacctgggatgggggaggggaggaggaaatggggagatgtaagtaaaaggatataaagtagcagacacgtagggtgaacaagtctattgagctaatgtacaagtgaggactatagttaataaaattctattagagattttaagtagattttaactacttttttttttttttacaaaaaagtatgtgaaatgatagatacgttaatttgctacactatagtaaccattttactatatgtatcccatagcatcatgttgtaaacatcaaatatacacaataaaatgtgcttaaaactgccactactggctgggcgtggtggcttatgtctgtaatcccaacactttgggaggctgaggtgggcggatcacctgaggtgaggcattcaagaccagcctggccaatatggtagaaccccgtctctactgaaaatacaaaacaaaaaattagccgggtgtggtggtatgtgcctgtaatcctagctacttgggaaggtgaggcaggagaatcacttgaacccagaggcggaggttgcagtgagccaagatcatgccactgcactccagcctgggcagcaagagggaaaactctatgtctcaaaaaaaaattaaaaaattaaaaaatttaaaaagatttcttaaaatttccttggctggagttcaagaccagcctgagcaacctagcaagaccctgtctctacaaaaaataaaaaaatttagccagttgtagtggcatgcacctgtagtcccagctactcaggaggctgagttgggaggagagcttgagcctaagaggtagaggttgcagtgagccatgattgtgccagtgtactcagcctgggagacagagtgagaccatgtctcaaaaaaaaaaaaaaaaaaaaaaaagaaagaaaacggatatttcctatgctaatacttttttctgtctttgttcctgctccataaggtaaagagcagctgatatgtaaattgcaaagcccaccccaggaataaagaaagaaaatcttacatcatttcggtctttagtcagtctctcctctagttcctgggctaattgcaacagccaccattgtacctaaaaaagtattgagactttaatctttcatttaaacactcgaagtctattaagaactagatggtgttatttgttcttttttttctcccaaacagaattgtgcaccaaagactccccataatcaaaggatcaccagatcatagaaatgttcccagtccttctgtcctgccctagctcaagcctttcattttcttttcctgcttgtttgccatcaggtgactttcaagcatgttccagctctgagaaaaagacaagacccaaacttgaagcataatatcctaggctttccaagtctccatctactaaacaaatgagaaattccattttatttcgatagacgaaagagaaaaaagtaataatcataaactagtcaattttcaacccaaggacagaacatctgttttcttcatactttataaaggtctcctctaacctattaaaccttccacagctaccaaaacctacccactgacccctttaaaagaggtagtgttctgtcaagaatgccagcttacctgttcccgagtagcaagagctgtttttcctgggaagttcttactacagccaatggttttgggtagttgcctgggtttaactggatcatgttcaatccctcggcacatggcatatagccaagacctaataagaccagcaaaaaacgttaaggtgaaattaaatgattattcttgttaaaacaaaaccaaataactatattatattgcccttttatctttttcatgaaaaaggaaaaccttgtccaaaatttagtgtaccggacctctgacgaaacccctgcccttctcagtgaattccagtgcaatatatggacaatgagaacactggttttgtcttctaaagccaagtcatcatttgtatttttggaaaaatgccaagcaagccactgattcatatcccaaaatgtgtgtgtgcttgctagggcattaaacacaaggattttaagagaatatagcatctcagcatgcatgaatgatgtaattagtatatactcaggcatcaaagtaacaaatcttatctatcaaccacctaggtacatggaaaaaactactctagactgatgggccatagtgacccaagatattgaagcaagaagaaccagtgaaataatctcaagaaacaaatgttaacctaaagataggtctggattttactagatggttttgtctatatttgaatatagcatctccataaaggttatgattttaaaaaaaatgaatcacttacccattcttctccccaaaatgactctggagctgggattcagtgaactgggtcagttcacccatgtattctatccctaggatctcaatgacagaggcccctagctttcctccaagactacggctgataacaaaggagacaaagaattgataggtcacatcataactatctaattagcagcaaacgtaagacattctactttgtaaacagctctccaaaaggttcaggacaaatgagagcatatattctgggaattcagttactctgggagttagaatttgagaagaagattaaaaataacataaccaaaaggttaaagtccttgattaactatcaagtaaactgtatataaaacgttcaattgtacaacgcctgctgtcctgtttggggattaaaatcccaaacacaaaataaatcccttccatggctaaaactttacttaagaatatataatctggccaggcacaatggctcacacctatgatcccactttgggaggccaaggcgggaagattgcttgagtccaggagtttgagaccagcctggacaacaaagtaagaccctaactctacaaaaaaaaattaaggccaggtgcagtggctcactcctgtagtcctagcacttgggaggcagaagcgagtggatcacctgagcccaggagtttgagaacagtctgaacaacatggcgaaaccctgtctcaacaaaaaaaatacaaaaaaattagtcaggtgtggtagtatgtagctgtagtcccagctacttgggaggctgaggtgggaggatcacttgagcccaggaggcagaggttacagtgagccgagattgtgccactgtactccagcaaattaactgggcatggtggcatgtgcctgtgctcccagctacttgggaggctgaggcaggaggattgctggagcccaggaggttaaggctgcagtgagctcttaattgtgccactgcactccagcctgggagacagagcaagactctgtttcaaaaaaaaaaaaaaaaaaaaaaaggaatacataacctaaatataaacagtcagctgggcacagtggttcatgcctgtaatcccagcactttgggaggccaaggcaggcagatcattggaggccaggagtttgagaccagcctggccaaaatagtaaaacctcatctctcctaaaaatacaaaaattagtcgggcgtagtggcatgcagctgtggtcccagctactgggcaggctgaggcaggagaatcgcttgaacccaggaggtggaggctacagtgagccaatatcgcgccactgcactccagcctgggcaacagagcaagacttgtctcaaaaaaaaaaaagtcaaaattctttagcccagcctttgaggctccctgtaatctgtctttaaaccatcttttcagtctatttccattatcctcctcaatatggtgcagctaaactactttaggtcccagttcactgaaaatatctcatactttcccttctttgtgctaaaaagttctccaaatcagtactgctttgctgtttttgtctgactctccaaattttgccaaatctcaaaacaaaatcccatgcctttttataaatccatctccaaatactcccttcttttgtgaagtttgttctactgcacaattcatttatcaattatgcagtcttatgacagcacttttactattgctttttaccttgtcctttctacaatattataagtccttgtcaaggccacacaactggtaggcacaacctgttcatttgacttggcttcttctctaatgcctactttgagagctgaaattcagcagccctgaacaccttgatatgctattagaggaaagaaaagaagtaaaattcctatttgttacttaataacagacttaaataaaaaagtctagcgggaagttaaacatttagctaaaacttggtttatttatttattttttatatatttttaagacggagtcttgctcttgtcacccaggctagagtgcaagggcgccattttggctcactgcaacctccgcctcttgggttcaagtgattctcctgcctcagcctcccgagtagctaggattacaggcacccgccaccacgctcagctaatttttgtatttttagtagagacagggtttcaccatgttggccaggctggtctcgaactcctgacttcaggtgatccacctgcctcgcctcccaaagtgctgggattacaggcgtgagccaccgcacccggcctatttatttattttttatagagatggggtctcactatgttgcttagactggttttgacctcctgggctcaagcgatccacccaccctggcctaccaaaagtgctgggactataggtgtgagccaccacacctggctcatttttttttaattcaggattaagtatctgccacagataacccagaattgaaggttcaataaaagtctcagcgtggctggacgcagtggctcacgcctgtaatcccaacactttgggaggctgaggagggcaaatcacctgaggtcaagagtttgagatttgcctggccaacatggtgaaaccctgtctctactaaaattacaaaaattagccaggcgtggtggtgggcgcctgtaattccagctactcaggagcctgagacaggagaattgcttgaacctgggaggtggaggttgcagggagctgacaccgtgccattgcactctagcgtgggcaacaagagtgaaactctgtctcaaaaaataaataaataaataaaaataaaagtctcagcgtgtgtttcaaaatgttctgtgttgttttccttctaactgcctggtatgtatttcccctggctccagtccttaattagtaacacaagaaactacaaccagagagtttctacacatggatagaagtgaaatttaacatgctgcctgaatacttacattttgcgaatgggcatttggctgaagagctgtgggactgacccatgtgaaaccagggtttggcggttgggcttgtttagtccacaggccagttttgccaggacctggaagcatgcaaagtataaaaacctcattactgtcaacccatcaaagttggtgaatataaacatacacataacatacacacacacagagcttaatagctgtaactaatggtttctacattaaaaacaaaaataaaaccagaaactcaagacatctctaaaacttggtatcccacaacatccccagtgggaaacatgacgcaatatcattatcctcactgttcttcccacatctctcccattctgttttcctctagtcattttttccttcccatctattcctacttcaagaggtttgaaaagcagaaactgcaggagaaactcaagcaagatgcatttctcagtatgtctatacaaaaatgccgaaacatacttgttttaccctatcccatttacatttcttgattaatagttggtccattttgagtccccaatttaacacaaattatcataatatagtatctgttatagagattgggctcaaaaccaccctccaataacaaacaccttcttataaatagcacttaaaaaatgaaaaagcttaaatccttgagaactttttttttttttgagacagagtcttgctctgtcaccaggctggagggcagtggcgtgatcttggctcactgcaaccgcccccgcaccgggttcacacaattctcctgcctcagccttccaagtagctgggactacaggtgtgcgccaccatgtccagctaatttttgtatttttggtagatacggggtttcaccatgttggccaggatggccttgagatctgtcgacccgcctcagcctcccaagagaactctttttctttttttttttttgagacagagtttcactcttgttgcccagcctggagtacaatggcatgatctcagctcactgcaacctccacctcctgggttcaagtaattctcctgcctcagcctcctgagtagctgggattacaggcatgagccaccatgcccagctaattttgtatttttagtagagacggagtttctccatattggtcaggctggtcttgaactcccaacctcaggtgatccaccagcctcgggatcccaaagtgctgggattacaggtgtgagccaccgcactcggccaagagaaatcttttctaagagtaaaagcacttcaatggtatcattttgcaaattataaaaatataatttttaattttttaatataatttaaaaattatatttgtatgttttaaaatataaaattattaaattcattagagagattcgttaagaacttctactaggcaacatttagtctggtttaaattacattgaagttattgtttcctttcccttcatccaaccaggaaaaaaaaaaacaccaaaaaaattcagatgggtagtttggcaactttccttgtattgaagggaggcggagaaggtatcaaccagggaaaatcagccactgcccaattactgagctttggtcagaaggggatgaaagtcctgggctcttgctacactttattcataattaatcagaaaaccagttattctgctcctggattgttgagaattgtctgtgtaccctaaattaaaatagtggtctaaattaataaaattgtattattccttttattgctctcataagaaaacagggaataggcaaaagcataaaatacccaggcaattccacataaca

SEQ ID NO: 96871 - DNA, 65203 bp, Homo sapiens
  misc_feature (1)...(65203): n = A,T,C or G
caatgctctaataaacatttcctttgaatgctgtgttggtgcaaaaaattttttggattttggaagatttcaaatttcagattagggataccctgagtggaaaaaacagtttttaagattctttcactcgatcttgagaggaggtcgcggcgccggaggccctagaaggctcgaaggcgccgcgggctggggtcggtggcttagggagcccgtccggccatggtggccgcgggtggtggttggcgcggctgcgctgcggcccggggcagtgcggagccgggacagtcgcggcgctgacgcccgcgggccccagctgcagatatgaagcggagccgctgccgcgaccgaccgcagccgccgccgcccgaccgccgggaggatggagttcagcgggcagcagagctgtctcagtctttgccgccgcgccggcgagcgccgcccgggaggcagcggctggaggagcggacgggccccgcgggcccgagggcaaggagcagccgcctgccttggcctcccaaagtgccgagattgcagcctctgcccggccgccaccccgtctgggaagtgaggagtgtctctgcctggccgcccatcgtctgggatgtgaggagcccctctgcctggctgcccagtctggaaagtgaggagcgtctccgcccggccgccatcccatctaggaagtgaggagcgcctcttcccagccgccatcacatctaggaagtgaggagcgtctctgcccgcccgcccatcgtctgagatgtggggagcgcctctgccccgccgccccatctgggatgtgaggagcgcctctgccctgccgagaccccgtctgggaggtgaggagcgtctctgcccggctgccccgtctgagaagtgaggagaccctctgcctggcaaccaccccgtctgagaagtgaggagcccctccgcccggcagctgccccgtctgagaagtgaggagcctctccgcccggcagccaccccatctgggaagtgaggagcgtctccgcccggcagccaccccgtccgggagggaggtgggggggggtcagccccccgcccggccagccgccccatccgggagggaggtgggggggtcagccccccgcctggccagccgtgccgtccgggagggaggtgggggggtcagccctccgcccggccagccgccccgtctgggaggtgaggggcgcctctgcccggccgcccctactgggaagtgaggagcccctctgcccggccagccgcccagtccgggagggaggtgggggggtcggccccccgcccggccagccgccccgtccgggagggaggtgggggtgtcggccccccgcccggccagccgcccagtccgggagggaggtgggggggtcagcccccctgcccggccagccgccccgtccgggaggtgaggggcgcctctgcccggccgcccctactgggaagtgaggagcccctctgcccggccagccgccccgtccgggagggaggttggggggtcagccccccgcccggccagccgccccgtccgggaggtgaggggcgcctctgcccggccgcccctactgggaagtgaggagcccctctgcccggccaccaccccgtctgggaggtgtgcccaacagctcattgagaacgggccatgatgacaatggcggctttgtggaatagaaaggcgggaaaggtggggaaaagattgagaaatcggatggttgccgtgtctgtgtagaaagaagtagacatgggagacttttcattttgttctgcactaagaaaaattcctctgccttgggatcctgttgatctgtgaccttacccccaaccctgtgctctctgaaacatgtgctgtgtccactcagggttaaatggattaagggcggtgtaagatgtgctttgttaaacagatgcttgaaggcagcatgctcgttaagagtcatcaccaatccctgatctcaagtaatcagggacacaaacactgcggaaggccgcagggtcctctgcctaggaaaaccagagacctttgttcacttgtttatctgctgaccttccctccactattgtcccatgaccctgccaaatccccctctgtgagaaacacccaagaattatcaataaaaaaataaatttaaaaaaaaaaaaaaaagattctttcactcaacaacaatcaataaggtagacttctgtgaccaaatgtgtgaggatttctccccaccaacaaacaagcaatcaattctgcagcagacaccaagtgggtatcctccaattcgagtctgacattatctacctggagaaagcgtcagatctcacaggttgatggctcagtcccacaagactgccccctacttctgatgccaatcacaagccacaggttgttttacctgtgcttctaactgactggatataaattgggaatctcatgagcccctctttgggttcagttaatttgccagagtggctcacagaactcaggtaatcaaatttactagtttattataaaggatatacagatgaagagatacacatggcaaggcatgccctccctgggaacaccactctccaggaacttccttttgctcctatccagcagctcttcgaaccctctcctcttgggccttttatggaaacttcattggataggcatgactgacatccgtgtagaaatgtgactggacaaaaaagatatgatctaatactaatagactggggaaacccagcaaggcctgtccagattcttcctggcctctctgggtagcattcctttctccagggtatggggtaggaactcttctgaaatgaaagtcttatgacccataatcagaaaggcaggggaagattagagtcctgctttgggcaggtgaaaggagggcagaaggccagagagagattctgttttctgaggcttgcttcaagagctccaacattataacgaaagctaggggagttatgagctaggaaccgtggacaaaaactaacatacatatatcacaatatcacagatactcaacctgtactgctggcataaggataaattagtacaattttatgaaggcaataggtattaaaagctttaaaaatacttatccttaaaagaactaaccacaaaatacaaacatagccaattggcacataaaaataggctcaccatcattagtcatggggaaatggaaattaaaatgcacatcaccaggggaagagaaccaatacggaatcagttgacagacaaatctcaagtataaattcagagaaaagagaaggagaaaataatatataacatcatagcattcatgaaaaatgtcaaccttttactctgaaatacttttagacttacagaaaatcgcaaaaatggtagagttctcctactcccagtttcctgatgttaacatcttacttaacacaattaccaaaatttaaaaatgaacattggcatattattaactacatactttactgccccccaatctgtggcatttcctcggttgttccttgtttttcatgaccatgacacttttttttttttgagacaaagtctcgctcttgtccccccgccaggctgctttaaatactactgatatttgacttccacaactatatatactaacttaattggtatgggtatgacctgggcatgagttttttgttgttgttgttgtttttgagttagagtttcgttctcgttgcgcaggctggagtgcaatggcacagtctcggctcactgcaacctacgcctcccgggttcaagcgattctcctgcctcagcctcctgagtagctgggattacaggcgcacgccaccacgcccggctaatttttgtatttcgagtagagactgggtttcaccatgttggccaggctagtctctaactcctgaccttaggcgatccacccacctcggcctcccaaagtgctgggattacaggcgtgagccatcgcgctcggcctagcatggggatttttttttttcctagacagagtctccgtctgtcacccaggctgaagtgcagtggtgagatctcagctcactgcaacctccatctcccggtttcaagtgattcctctgcctcatccccattagctgggactacaggcgcgtgccaccccgcccggctaattttttgtatttttagtagagacggggtttcaccgtgttagccaggatggtctcgatctcctgacctcgtgatccgcccgcctcggcctcccaaagtgctgggattacaggcgtgtgccaccgcgccaggccggggatttttaaaagctctccaggtaattccaatatgcagcagtttgggagccaagacctaaataagacaatcgaaacaccagcaatccatgatttaaatacgagaaacacaggttatacagttgagtgagcacccaactgtattctaaaaaaagtttttcaaaaactaacattcaccttgaaaaaaaaaacgtcttacaactgcaaagcaggaaggtgagtggaaagaaaaataattaaaatcagagcagtcaaagcattaattccttataaattccaatcgaccacgcctaaaacaggcagaatgtgatactttaaacatttacaagttaaaactataacatgccagaagtccctctactttgaagtggcttttcagtagtactggaacagactgagccaacaaatagtattgtaacacaaaaaaacacaggctaagcaccatattagatccaaataccagaagtggagcaagaataggaagcagtgatttatgttcagcacacaatttactaagcacacaatcacaaaaacagacatgcagactttaacagataataaagctgttgaggttttccgtttatgtatttactggagaaagcaagagctttatttatttatttttgagacggagtttcgctctgtcgcccaggctggagtgcaaaggcgcgatctcggctcactgaacctccgcctcccgggttcaagcgattctcccacctcagcctcccgagtagctgggattacaggcgcgcaccgccacgcctgtataaaaatactaaaaatgcaaacataatttttgtatgtttagtagaaacggggtttcaccatgttggtgaggctggtctcgaactcctgacctcaggtgatccgcccgcctccgcctcccaaagtgctgggattacaggcgtgagccaccgcgcccggccaagagctttataaagatggaaaatgaagaagactttctgcccaagccatgcttttggataaggattacactactttgaaaccttatacatagcacttggccaattatcaaaactgcacaaaccttcactgattgcaattattccctttaaacatctcgagttaccccaatccgcacaaaacaagtttagtgcccaccaggtaataatacatccaggaaagtaattccaagagagaggtttaacaactacagggaaaaacatacttttttctacaagaaaaatcttagaagacagtaccagggccttatccctgttagcatgatttatatttcacgcaaccttggcccagtcactgctacattataaaaccaatagccaaggcaacatagaaagtctgaacacagtgacagcgaacggttctaaattttcttaccaaggtaacaaacacctggcaaaactgccagcagcggttgccgaaaatgctgggttcggtgcctactggaaggaaaatggaagggctcctgaatatcttttcgcctttctaggagcggtccagtgagtttcgagcgagatttattccctgtgacgacggagaaaccgagaagggatcgtaaaggatcctgcccgggcaaccgtccccagcagggatcagacgagagcggcgcgcccagcaatgcagccgccagactgaggtctgacagcgcgcccgctgcgaagggccgttgacgcggctgcgcaccgcggcccttccgcctcccgccccgcccacctaggctcaacctgcacacgggagccgccacttccgcgggcgcgtgcgcagtggcgggccgggcgcgtgcgcagcgccggcttcttcccagcgcgagttgctgctaacgctcctcctccagcttcccacccccgccgcccgccgcggcccggtaccaacgggtggtctcgccgagggagctgtcgtgcctcgtggtcccgggactgcagtggtgtgcgctctcggcgcgtggcgctaggcatggcgatggatcaagtaaacgcgctgtgcgagcagctggtgaaagcggtgacggtcatgatggaccccaactccacccagcgctaccggctggaagccctcaaggtagctggggtcctggcgtcctgggccggtcccgacaccctctcccagccccagcagctccggcgccgcctgtaactggggtagtctcccgcccacgcggcccctggacctcctttcccaactccccgggaccttcccctcgcggccctccgcgcctctcccaaatcgccgccttctctactcgccgctcctgtcctttgcctgggacactccggtccctatgctgcttctcatctcgccgcagcttcccacagccctctcctccccctttcctcgcttctgtgcactcttgtccgcaacatgaccctcgcccattttcattccccaagcccgacatcccctcgccttcccgaggcgcacgtgtagatcccgcccccaacaccagcttcgttctttatggtctctcctgcactaaacgttttcctgctggcccactcccctggccctgaccgagctccagcccctctggtacccttatgcttatatgctttaacatctcgctaactttcgtttgtgtcttggacattttccggggaaattctcgcacccctacttctcccatgtttttgagtgtaatatttttaggctattttgcgcaaagataacttctaccacttactttgcattttaacaagggcactttggtttcctgaaagtagtttgcgtgagacccgaatgctctgctcttgggactgacttatgttgcagtttgggggtgttaatacaattcaagcttacttgcccataaaacaacgtgtgtgggctgtgagaaatggccatttaggagaaaatacttgtgctgtacatttttaaagtgatgttaacttcaaaaaagagagtgaccaccacttggaggaaatgttacaatatgtagatgtctgccacagggtttggaatcagaaacaattgggttccattagtttggtttttattattaatatttaaaatagacacaaaagtggagagaatacgacagtgattctgcatgttcctgtcacntaaattcagcaatcaaagattttaccgcatttactttttccaccgcctatcctctctccctgcctcgaaggtttttaaaagaaaccctagaaattgttatttcacccctatgtacgtcagggggatgtctctaacaaataatttcttattcctttgtgtccatttttttccaacactagtagggctactgttggccgtagcatggaaaaaatctggaaccatcacgctggaaggaatgtttatcagttctttattcataatatatatataatatatacacataaaatagagtgaacaccacttggaggaaatgttatatatgtgtaacttttatatattttatatttttatttttatattaaatatatatttttaaagcaactgtgcttggagatccacataatattgatctaggttttgcaactttaaacatatagcttaggttggagtttctttttgagtagggtctcactctggttgtccaggctggcgtgcagtggtgagatctcggctcacttcagccttgatttctcgagctcaagtgattctcctaccacttcagcctcctgagtagctgggattacaggcacctgccaccatgcccggctaatttaaaaaaatatttttagtgggccgggcacagtggctcacgcctgtaatcccagcactttgggaggccaaggcaggtgggtcacctgaggtcaggagttcaagaccagcctggtcaacatgatgaaaccttgtttctactaaaaatacaaaaattagctgggtgtggtggcgtgcacttgtagtcccagctacatgggctcaggaggctgaggcaggagaactgcttgaacctgggaagcagaggttgcagtgagccgagatcatgccattgcattccagcctgggcgacagagtgagactccgtctcaaaaaaaaaaaaaawatatatatatatatatatatatttaatagagatggggtttcgccatgttgcctaggctagtctcagactcctagactcaagtagtccacccatctcagcctcccagagtgctgggacaggtgtgagccaccgcacccggccctggttggagtttcttaagatgaaattcttttagtccctattctctcagccctcgaaaggaaacactaacttttcttctttcagttttgtgaggagtttaaagaaaagtgtcctatctgtgtcccctgtggcttgaggttggctgagaaaacacaagttgccatcgtcagacattttggccttcagatcctggaacacgttgtcaagtaaggagctcttggacattaccactgaagtctgagagaacagatctttatatcttatataacctatagagatgctgtttaggtgagtagagwagagcaatctccaagaagagaggaatgatcccctagatgttatcagaacctcacaggagctctcattcaagatttaacctttcttttcttcagtttcttcatccatgtaaagtgtgtggtacatattacccattcaacaaatattacctgccatttagccaatacttactgagctctgactatatgtcattagccctygaagcctttttagagtaatgcaatgtataggtcaatgaatctctgattaggcactgtggctttcttttttctctctgtctttctgagtttgtgtgccttctctgggtggtacatccaaagcaggattgtatgagaataactgaaaacccatcctaacttgattgtcctaccctcaacacctatcagaagaggtagcctttaagacttagccatagtttttccagaattgttttgtaagccagcacagaaaatgactgatgtcaaaactgcattttctgaaaagcaagtacattgttgcagttgacctagatgtatattcacttttggcccatcaataaaatcatgaggcaaagctgacgtgtggtacaaatcttgtgcggattccagttaatggaycactgcatatataaaaccttttcccaagaatttttgtgttagtattttggttaaatgtagatcatttttgcccattcattgacaggtacaaaatcaaaagtataatttcttaatgaaatctccagtgtaatcaaatgtagaaatccatgctattctcttgtaaagacaagacttctaaagtggttctattgactttatgcattttggtggtcaggtttcggtggaacggcatgtctcgattggagaaggtgtatctgaagaacagtgtcatggagctgattgcaaatgtaaggaatgggtggttgggagacatgtttccaaggtagtttaggcaaagcgtgacttcttcaatagggagtttgtgtaaaaattcactgcttctaaataggtcagacagcacaagaaatcataatttaggccaggcacagtgactcacacctgtaattctagcgctttgggaagccaaggtaagaggatcacctgcatctaagaattcgagagcagcttgggcaatgcagtgagaccccatctctaccaaaaatgcaaaaattagctgagcgtggtggcgcatgcctgtggcccagctactcaggaggctgaggtgggaggattttctgagcccaggaggtccaggctgcagtgagctgtgatggtgccatggcactccagcctgtgcaacagagcaagaccctatctcaaaaacaaaacaaaacaaaagcagaaagcataattcagcatatgtctcttactaggtttaattaatcatgcttatgtattgacttctattttttaaattataaagacagggcagaggggattaaatattttcaacaaatcaataagattcttagatctaaattagattgaaacactattttcttttattccaaacaactactatgtgatactaatgatgaaaaacatgcagaattttaagtatgcagaatgaatttgtttcaagtattagaatatgacttttttttttttttgagacagagtctctgttgctccggctggattgcattagcatgatcatagctcactgcagcctcgaactcctgggctcaagtgatcttctcgccttagcctcccaagtagctgggattataggcatgtggtaccatgcccagctaattttgtttttggtttttagagagacagggtctcactgtgtttcccaggctagtctggtctcaaacccctggcctcaagcaatcctcccaccttggctttccaaaatgctgagattacaggtgtgatgactggatgactgtctctttaaacacaaaacagaatatgactttaaacatgttcaaaattgtagccttttttctttcttggttttttttaaataacagacatgagagatgggatcttctaatacttctgcgtcttctagtgttagaactattggtaaaatattcatttgccccttcatacccttccattttaccagctactcactatactccttatttctatactcttcctccctggccttctgcaaactgaaacaatcaatatgagaatcttttcattttgtaaagaataatgatgtcatcctagctctcgatatgacagccttttaggtgatgcaaccctcacttaagctttaagcggaagagtgattagcaagaatgcaggacaagtgactcaggctgaagaacaggttcatttgttctgtttggtttaaaagtaggcctgctgataaattttttacaactctacagcccagcttttttctggaagtctggaatccagtcttgcatatctcttaatatctcttgttctttttcagggaacattgaacattttggaagaggagaaccatattaaagatgctctgtctcgaattgtagtggaaatgatcaagcgagagtggccacagcattggcctgacatgctaatagaattggacactctttccaaacaaggggtatgaaacacagctrtatcagtttggtrtacttttccttggaacaaacttcagggtttgttgtttgattttgtttgtgggtttttttttttggcaacagaaaatagcctttggatatacataaaakgaaaagatattttagtttttaactagcttatttctattggtgtaggaaacacagacagaattggtgatgtttatccttttgcgactggcagaggatgtagtgacttttcagacacttccccctcaaagaagaagggacatccagcaaacattaacccagaacatggaaaggatcttcagttttctgcttaacacacttcaagaaaatgtaaacaagtatcagcaagtggtaagggatacccctmcctataacatttctrttttccaatatgagtgtttttgattaatcttacagtaaggaactagggtgtctaggtcagcaaaatgaaatcctattttataagcaaaaaaataaaaaactaggaaatgacagaaaaactggagctcattttctttctttttttttttttttttttttgagacggaggctcgctctgtcacctaggctggagtgcagtggtgtgatcccggctcactgcaacctctgcctcccaggttcaagcgattctcctgcctcaacctcccaagtagctgggactacaggcgcccgccaccaggcccggctgattttttgtatttctagtagagacggggtttcactatgttagccaggaaggtcttgatctcctgacctcatgatccgcccgcctcccaaagtgctgggattataggtgtgagccacggcacctggccttttttaaaaaaaaaaaaaaaaaaaaaaaaaaaagatagggatctcggcttactgcagcctccacctcctgggattacaggcatgtgccaccacacctggctaatttttgtatttttagtagagatggagtttcgctgtgttagcaaggctagtctcaaactcctgacctcaggtggtctacccaccttgctctcccaaagtgctgagattataggtgtgagccaccgagcccagccctaggtgttattcttaattttattttcagaagttctttaggaaaatactaattttttttttttttttggagagggagtctcactctgtcacccatgctggagtgcagtggcacaatctcggctcactgcaacctccgcctcctgggttcaagcgattctcctgcctcagcctcccgggtagctgagattaccggtgcctgccaccatgcccgtctaatttttgtattttagtagagatggtgtttcaccatgttggtcaggctggtcttgaactcctgacctcaaataatccgcctgccttggtcttccaaagtgctgggatggtaggcgtgagccaccgcgcctggcctaattttgtatgcttgtaagttaacattatgtgcctttgtatggatttgaaatataaggataaaaatcaaccatatttgtatattcactgaatagccactattctgatgtatttaacatcatatatatatgtattttttttkkttgtttttttttttttgagacggagtttcacttttgttgcccaggctggagtgcagtagtgcaatcttggttcactgcaacctctgcctcccgggttcgagtgattcttctgcctcagcttcccaagtagctgggattacaggcatgcgccagcacaccggctaatttttgtaattttagtagagatggggtttcaccatgttggccagactggtctcaaactcctgacctcaggtgatccacctgccttggcctcccagactgctgggattacaggcgtgagccaccacgcctggccaacatccagtatttttgagtacatggttttcatatacttaggctatacatacatgttcatgaattgtattcatttaattatgcttctgactttacttgttctccctaggggaatatcagttatgcrtgcttagtaaagttgtgttattttccaagatgaaaaattgcatatatttaagaatcattattcaagggcattgatttgtggggggtagaaagttattatgtggccttttgctcattaaaaacactggatctttatacttcctttcagaagacagatacttctcaggagtcaaaggtaagagctctttataaagtttgaaggagacctttgaacctttcagrtgaggggatacgtgcccctagtggatggtgacctcagccttgcttgtgttgtattgttttggagacaggtcttactgttgcccaggctggagtgcagttgtgtggtctcagctcactgcagccatgacctccccagctcaagtgatcctctcacctcaacttcatgagtagctgggaatataggtgcgcaccaccatgcccagctaatactttctatagaaacagggtctcagtgtgttgcctaggccggtgtcaaacccctggcttcaagtgatcctccagcctcgacctcctgaagtgactgtgggccactgcatctgtcgtttgttttttttgtttgtttttgtttttgtttttgagacggagtctcgctcacttgcccaggctggagtgcagtggcgcgatctcggctcactgcaagctctgcctcctgggttcacgccattctcctgcctggcctcccgagtagctgggactacaggtgcccgccaccacacccagctaattttttgtatttttagtagagacggggtttcaccatgttagccaggatagtctcaatctcctgacctcatcatccgccctcctcagcttcccaaagtgctgggattacaggtgtgagccaccatgcccagcctgtcctttgttctgtttttgatcactgagctatggttgaagggaagtaaaaaaaaaaaacaaaaacagacttactttttttttttttttttgacacagggtcttactttgtcacccaggctagagtacagtgacgcaaacgtggctcactgcagcttcagcctccaggcttcaagtgagccttacctcaacctcatgagtagctgggactatagatgcacaccatcatgcctggctaatttttgtatttttttggttagggtattttttttattttattttattttttgtttttttggtagacactagttttgccatgttgcccaggctgttgttttaactcctgggctcagttgattcacccaccttggcctcccaaagtgctggtattgcaggtgtgtgccactgcacccagccttgggaagtaaaatgataagatttggggttttgtgaaaaagataaaatggccacacatgccagtatggtcttgtygttggatgttgagaatgtcattgtttgagaagtgattgtgttccctacctgtgactgttacatgagtatattcttaaaaaataattttcttagaattagaaaatgggagttcagttataaccactgattccttacctgttaccgaggacttcatggtccaaagttacttcttttctggtaggcgcaagcaaactgtcgagtaggagttgcagcactgaatactctagcaggctatattgactgggtgtctatgartcacatcactgctgaaaactgtaaactcctggagatactgtgtttgctgttgaatgaacaggaacttcagttgggagccgctgagtgtcttctcattgcagtcagcagaaaagtaagttaccacttcaaactgacttatcctcagtctytgaagtaggctgtgtatgtgtttaattgcatgttgtggcagaaagtcatttaaaggtttgggtttttttccttggggccaacttactgcctgcttccaacccccttggacaggagtttgccaatattcaagggatcctttggcagaatgtggagatttatcaggctgcatggttcttgaaatagccatgatacttggcaatttacagttaacagataaaagtaaatgtttaagtttaaagctcacttaatgaatgtcaaggaatcttggatggtggctacagtaggtttatatctgtcttttttttttttttttttttttaattgaaacagtcttgctctgtcacccaggctggagtgcagtggcgtgatgttggctcactgcaacgtccgccttccgggttcaagcgattctcctgcctcagcttcccgagtagctaggactataggcacacgccaccatgcccgactgatttttgtattttttagtagagatgaggttttgccatgttagccaggctcttctcgaactcctgagctcaagtgatctgccctcctcagcctcctaaagtgctgggattacaggcgtgagccactgckccaagcctatgtctgtcttggctaaccaatggaactgtgactcttttctccataggaatattatctacaaatgtaatttactttgctgtcatatcagcattattgcccaacacatttatttatttatttatttattttttgagatggagtctcgttctgttgtctaggctggagtgcagtggcgcaatctcagctcagtgcaacctctgcctcccgggttcaagcaattctcctgcctcagcctcctgagtatctgggattacaggcgtgtgccaccacacccagctaatttttgtattttttagtagagatggggtttcactatgttggccaggctggtctcgaacttttgacctcaagtgatccacctgctttgacctcccaaagtgctaggattacaggtgtgagccacggcacctggcctaatttttgtatttttagtagagacagggtttcaccatgttgaccaggctggtctcgaactcctgatctcagttgttccgcctgcctcgtcctcccaaagtgctgggattacaggcatgagccaccgcactcggcctgccgaacacatttaaaaatgtaagtttatgctttttcactaaactgatagttttgagaaaaaatatgtagtttatccagatttggttttaaagagttgggcttctttctagtgtttcactaaaccctggggtatataagaaattatgaagtcaatatatttgattatatacttacagaagatgtcggtactttgaagtatagtttatatgactatgtttccctaaaattgggtctagggcaagttggaagaccggaagcccttgatggtcttatttggagatgttgccatgcattatatactctccgccgcacagtgagtatctttacttttcagtgtgttttctaatttctttgtcatttttctatcttatttggatttatctgaagttctttttttttttttattttgagatggatctcgctctgtcacccaggctggagtgcagtggcgcgatcttggctcaccacaacctccgtctcctgggatcaagcgattctcctgcctcagcctcccgagtagctgggattacaggcgcaccaccatgcctggctaatttttctatttttagtagagacagggttttgccgtgctgaccgctctggtctcaaactcttgacctcaggtggtctacctgcctcagcctcccaaagtgctgggattacaggagtgagcccctgtgcccacctgaagttcttacttaaatgctagctgtcaatcgacagtgtttttggataagaaaatgaggcattggccagatgtggtggctcacacctgtaattccagcactttgggagtccaaggcaagtggatcacttgaggccaggagtttgagaccagcctggccaacacggtgaaaccccatctctactaaaatacaaaaattagccagacctggtggcgcacgcctgtaatcccagctactcaggaggctgaggcaggagagtatcttgaacctgggaggcagaggttgctgtgagctgagatcacaccactctactccagactgggcaacaaagtgagactctgtctcaaaaaaaaaaaaaaaagagagaaaatgaggcagtcatggctgaatgtgctagctaacatttgtaacctcagcacctggggaggccaaggcgggaggattgattgagtcaggagtttgagaccaacctgagcaacatggcaagagtccatctctacaaaaaaatacagaaattagtcgggtgtggtggtatgtgtacttgtagtcccagctactcagaaggctgaggtgggagggtcactagagctgggaagtccaggcaatcgtgaaccatgatcatgccactacactccagcctgggcaacagactgagaccttgtctcaaaaaaatagtttttaaaagtttataaagttaaaaagttacagtaagctaaagttaattcattattgaagaaaggaagtttttttttttttgagatggagtttcgctcttrttgcccaggctggggtgcaatgatgcratctcagctcactgcaacctctgcctcccgggttcaagygattctcctgcctcaccctcccaggaagctgggattacaggcatgcaccaccatggccagctaattttgtatttttagtagaaacagggtttctccctgttggtcaggctggtcttgaattcctgatctcaggtgatccacccacctcagcctcccaaagtactgggattataggcatgagccaccgtgcccggctggaaaattttttaaataaatttagcgggccaggtacgctgggtcatgcttgtgatcacagcactttaggaggccaaggcagatggaccacctgaggtcaggagttcaagaccagcctggccaacatggtgaaaccccatctctactaaaagtacaaaaattagccgggcgtggtggtgcatgtgtgtattcttagctacttgggaggctgaggcaggagatcgcttgaacctgggaggcgaaagttgcagtgagccaggattgtgcccctgcactccagcttaggcaacagagtgagactccatctctaaataaataaataagtttagtttagcctaagggtacagaatttataaagtctacagtagggtccagtaatgtcctaggcttccacattcactcaccactcactctggacccacccagtacagttttctgtcctgcagtcattcatggtaagtgccttctacaggtataccatcttttatcatttataccatatttttactgtaccttttctgtatttagatacacaaatacttaccattgtgttacagttgcctgcagtattggctacggtaacatgctatagaggtttgtagcctaggagcaataggctatgctatatagcctagatgtgtaataggctattcctgttgtgtaagtttgtgtaagtacactctatcatgttcaaatggtgataaaatcacttaacgatgcatttctcagtacacatccccagtcgttaagtgatgcatgactgtaagggcttccatgtactttcttccagttgctctagaaaatactaaagcaaggccgggcccaatggctcatgcctgtaatccccatattttgggaggccaagccgtgaagattgcttggacccagaagttcaagaccagtctgggcaacatggcaagacctcatccctacaaaaaatcaaaatgaaaataaattagctgcgtatggtggcatgcgctttatagtcccagctacttgggaggctgcagtgagaggatcccttgaagcccattagtttgaggcttcagtgagccatatttgagccactgtactccagcctaggtgtgacagcgagatcgtgtctcaaaaaaaaagaaaaaatattaaagcatttcttgataacatgtttcttaccaggaagtcaggcagaactatatattataagtagttgaatctgttgcaacaccatctttttgatactctttacttttggtcccaaggagaaatgaaaaggtatgaggcacatgtgttttacttaaaatctcttactacccattctaatacacatttttcatggcttccttccctgtagagactgcagcactgttttaagggatcctgttaattaaatgaataacgttttttgggtagttactatttttaggtccaattcttagttccatagacatcatgacactcatactaagtggtgtcccgtttctgtttgtgctgtgggtgccataccacaaccatggttcataaagcggtgattccaacccaggtagtcaaactccagagattgcattggacaccataataccatcctgtccttcaatgttcctaaagcctaggcctcgtttaccccaaggtccttgccttttatgtgatactgtcctcctccagaagacagctaatatagttgcttttcacactcatagttattaattgctgtttgtgtgaatagtcctatatcattttaggtcaggttttgccaccaaataagttaaaaagattttaaaaaatttttaatttagcaaagctattggaattctgctgaattacagacctaactaaatgacttggagaaatgagacacaaagtgatgtttttattacagcctttttaattttgttggtgatataaggaattctcatcttacaggactgctgatggaggaggtttggtagaaaaacactacgtctttctgaagaggctctgtcaggtgttgtgtgcgctgggcaatcagctgtgtgcattgctggtgagctagtgtttgctttctggagagcttcaagcccatttgggaagagcatttagaaacttaygtttcaatgaggggttgcaaatgtcattgattttagcctgatggggcagtgccatacaagttattgcatgattctatagattaaattatcttaatagaatagtgtttgagtgatctaaatttcttttaacaataaaatagttataccaacgtcagatatccacgtctattattccataaagtcaacgttggtttcttgtgaattttggtacttacagaacctcaatctgctgagtgctttatgcttttacattctgttagcccacgaaacatggacttgaataaagaactcttttcccaatctaagggatgtattattggagcacaaaagaaaacttgagtctgattgacctggaaaacctgccattagagaaatatttaatactcagtcttataagttggaagataggacattggaacagacatttgcaattgatgttatatctttttgtggtggtttaaatggttagagaggatagtttcagagataagcaaccattgagggggccaggtgcaatggctcatgcctgtaatsccagcattttgggagggtgaggtgggcagatcacctgaggtcaagagtttgagactagcctggccaacatggtgaaaccctgtctctactaaaaatacaaaaattagccaggcgtggtggtgcatgcctgttatcccagctactcgagaggctgaggcaggagaattgcttgaaccctggaggtagaggttgcagtgagccgagatcgtgccactgctctccagcctgagcaacagagtgagactccatctaaaagaaaaaaaaaagaaaagaaactattgaagggattaggtaataggttgggacacagagatgtgaataggtaaggtctgaggaagtaatacagattttttttctttctgtaatttctgaaatgagtgttttttattttactgtttgaccacagaatgggttttaatgatgatgattgagtaggcaaagtaatgatgatgattgagtaggcaaagtaacctatattttagcccttgaagtgatgcctttctttagccaaaaggaaatacaaagtccttttgaaacaacattttttgagggtttaatttatctgtttttattacttccctgctttttcctctcctgcttttctcgatcaacaccgttaatatagtggtcttctcctacagggtgcagattctgatgtagaaacaccatcaaactttggaaaatacctggaatcttttcttgctttcacaacccatccaagtcaggtaaactttatacaggtaacttctcaaaagtttagttaggtgaaccaatgtcaagcactgtgtcctgaaatattattgtagatcatgtataaaatgtgactcttcaggccttggggaatgaccgtagtgtcatttcattaagagaattattggctcttcttcctgagccaaacagtgcacttgtctaggtcagcagcttttccctttaggtaatattctrattgtactcagtcacatgtgaggtgtgtcccaggtggtttagtactaaagttataaagatttttgaaacaaaagtctgattaattgtattataaaattaatttcactctgttcaaaattgtccttctaatatcactctgagattccagtatccttttttgcaaagaagagaaagtagtaaaattcagctcacattccaggtaatttccttgatccacagcctgtcttactaacatgtggtccatagtgggtrgtcattactgataaattgcagtagagacagcttcaaagtattgtacagatttatttctatgaaaaaatgtagttgataactgctaagtaataatctgggttatatagaatccaaatcctttgacgttttcttttttttttctctttagtttctacgctcttcaactcagatgacttggggagccctcttcaggcatgaaatcctgtcccgtgatcctttgctattagcaataataccaaaatatcttcgtgcttccatgactaacttggtcaaggtatataatgggaatctaaacatgtggaatgtaggtgaatacacataataagactttgaggctgggtgcggtggctcacgcctataatcccagctctatggaaggctgaggcgggaggatcgcttgagcccaggagttggagaccagcctgtgcgacatggcaaaacctcgtctctactaaaaatacaaaaaaattagcagggcatgttggtatgcacctgtagacccagctactggggaggcttaaggtgggaggatcacctgagcttgggaagttgaagctgcattgagctgagatcgcagcactgcactccagcctaggcaatgagagtgagaccctgtctcgggggaaacataaaaaagactgattggcattattaacagcccttcttcatcactaagattcctttactggacatattttcttattccttaggaagaaatcagtccttactggttattataactgctcttccatatgagagtacttaatatatcataagtattgggctaggtgctagggcaagagcagtgaccatacaatgtaataattgctattcaggggttaaaagcagaatgctttggaagtacataggagggttgagtcaggaagattccaagaggaggcaatatctaagcattgcttctggaggccaagtgagagttacaaagggaaatgaggggagtgagagtggaagcaaagattgctcactacctcagtagagagttgctcatgaattccctgctaagagctcttgcagttgacagattgttaatctcaatttgtaacatcagagaatggtgcacattcaagggtccccttattttcttaaggaatttgcctagcacatagcacacactggtgttctgtgtttttttttgagacggagtctcaccctgtcaccgaggctggagtgcagtggcacgatcttggctcactgcaacctctgcctcctgggttcaagcaattctcctgcctcagcctcccaagtagctgggactacaggtgcccaccaccacacttggctaattttttgtattttagtagagacagggttttactgtttttcccaggctggtctcaaactcctgagctcaggcaatccacccgcctcggcctcccaaagtgctgggattacaggcgtgagccaccgcacccggccacactgtgttcttattttctgccatggtcttcaattcttttctgaatgaaacatacaaagttctacaagtttattctcagtgttcagtatttgaggcaagtagctctcagttctttcttccttactacatactgaattgtcattttttctggggaccttaaaagaattcaagaatttaattctccctgaggaacttggaggatggtatcaactaaaagtattctcttttctaccactgaggaatactggaactgggagcaaactgtggacctgtgatagaactgaagyggatatttaccatacaatatctcatgcaaacgcttaactcttaaataaattaaaagtgcttgaactcctgaagcttaaaaactctttcagtgggtccactttcatcccctmccccaattacctttctttttccagatgggctttccttctaaaacagacagccctagctgtgaatattctcggtttgattttgatagcgatgaggacttcaatgctttcttcaactgtaagtgatgttggccttggatttctctcaacagtctcagaatggcatctagtattatgaatcatggtgcatggtgtttggggtttttacgaaagatccccaaatctggatagcagcctacttattaggccctagtttcccattgcagaagagtgctggggctgtattccaggcataatattttgttttacaccacaaacccccacagcacttagacattgatgtttagggatggtaaccatacttaagacgctcttgactttttttcatacttaggattaaataccatcttaccttatggttatttctttcccccaaaaagtggaaaaatccattttattctaatattctagttctgttctgtgttttctgtgccttatttcctttttgtttgtttttttttttgagatggagtttcactcttgttgcccaggctggagtgcaatggcgcgatctcggctcaccacaacctctgccttctgggttcaagcgattctcctgcctcagcttcccaagtagctgggattacaggcatgcaccaccatgcccagctaattttgcatttttggtagagatggggtttctccatgttggtcaggctggtctcgaactcccgacctcaggtcatctgcccgcctcagtctcccaaagtgctgggatttacaggtgcgaaccaccgcgcccagcctcctttttttttttttttttttttttttacagctttattgagacaaaattcatttaccatacagttcacccacatacagtatataatttaatggtttttagtatttttacagagttgtgcagccatcaccacaatcaattttagattatattttcatcaccccaaaaataaatcctatatccactaggagtcatcccccaattccctcatctctcccagtcctaggcaaccagtaatctactttctgtctctgttttgcctattctgaacgtttcatataaattgaatcatacatggtctattgtgactgccttctttcacttgcataatgtttttaaattcatccaagttacaacatttatcagtacttgatttcttttttttttgagatggagtctcgctctgtcgcccaggctggagtgcagtggcacaatctcggctcactgcaacctctgcctcccggattcaagcgattctcctgcctcagcctcctgaatagctgggactacacacacgtgccatcatacccagccaattttttgtgtttttagtagagacagggtttcactgtgttagccaggatggtctcaatctcctgacctcgtgatccacccgcctcggcttcccaaagtactaggattacaggcgtaagccaccacacccagcctttttttttttttttttgagatggagtcttgctctgtcrcccaggctggagtgcaatgacacactctcggctcactgcaacctctgcctctgaggttcaagcgatttttctgcctcaccctcccaagtaactgggattataggcatgcaccaccatgcccagctaattgttttatttttagtagagactgggtttcatcatgttggccaggctggtctcgaactcccgacctcagctgattcacctgccttggcgtcccaaagtgctggattataggcgtgagccaccacacccggccttcatttctttttattgctaatatttcattgtatggatataccacatttactcatttattcatctgttgatggacatttgagttatttccattttttggctattacaaataatgctgctatgaacatttatatacaaggttttgtttagatataagtttttgtttatcttagatatataactaggagtagaattgctggataatatggcaattgcaagtttaatattttcaggaactgccagactattttccacagcagctgcaccattttttattaccaccaacctgatttactttttaaaaatttttttttttttttttttgagacatggtctcactctgttgtccaggcaagagtggtgctgcgatcatggctcactacaatcttcacctccctgggctcagctgatcctcctacctcactctcccaagttactgggactataggagcatgccaccacacctggctactttttgtattttttggtagagactgggtctcactgtattgcccaaactggttttgaactcttgggcacaagcagtctgcccaccttggcctcctaaagtgctaggatttcaggcgtgagctactgtgcccaatcctgatttccttttaattcaaacagaaatgggagactaagtttagtttgccacttacaggatctagctggtaatacagtttccagagatcatttattttcaaaaacttctggattcgttaataaagttttattgagtgattattacatgcaaagcacaagtctgcaaaacagttcctttgaatgcttttcccctagggtggtaaattaataaacattaagtacttattttataccagttattgattcctgtccttcccttggcattttctcttggcagcctcccgagcacaacaaggagaggtgatgaggttggcatgtcgtttggatcccaaaactagcttccagatggctggggagtggctaaagtatcaactatcaacttttcttgaygctggttctgtgaattgtaagtttttttcattactgaatgttagtgaaatgttaggacagtatcaaaactatatataggaaatgagcctgagctatacacacatcagaacgatatacttatactattcaaaaatagctttgctcatcctggagagggagcgttttcattggctgacacaaagaaagcagatgacacattttaaatttgttttaaattagggtaaaaccatgtccttatcagttttgccatcattttccatttctaacagaatcaaccaattatttattgttgattttatttgcttcacttcaggcaccagcttaacaaatttcatgcgtagacctaactttaaaacttttcagccaaagtcttgcatagcactattcctgaaatcagaaaggatctcctgttagacataacaggaataatacagggacttctcatatcactcagccactccaaagcttttgtgaaattatactttacataaattcagaataatccccctctaccgaatgcctcagccagttaacttctctgtactccaaatgttttgtctctcatcttaatgcatgctatatgtgtgtgacagtattaataaagcaaaaaggctggatgcagtgactcacgcttgtaatcccagcactttgggagcccaaggcgggcagatcacctgaggtcgagagtttgacaccagcctgaccaccttggagaaaccctgtctctactaaaaacacaaaaaattagctgccgtggtggcgcatgcctgtgatcccagctacttgggaggctgaggtaggagaatcgcttgaacccaggaggtgtaggttgcggttagccgagatggcgccattgtactccagcctgggcaacgagagcaaaactccatctcaaaaaaaaaaaaaaaaaaaagtgaattaactagtgcacgtcactgctttagaaaagcaccatactactggctgacatttgagggacttaacattcagctttatttacaattgactctaaattctctgatatttggtaacttgaaaggttgaggaagcccaaatgtgttgcactaagatgaaactagtaaataggactacgctgtatgtaagcaagaaaagcaattggtaaatcttaggccaggcagggtggctcacgcctgtaatcctagcacttcaggaggccgaggctggggatcacctgaggtcaggagttcaagaccagcctggccaacatggcaaaaccctgtctctactaaaaacaaaaaattagccaggcgtggtggtgggcccctttaatcctagctactcaggaggctgaggcaggagaatcacttgaacccaggaggtggaggtttcagtgagccaagatcgtgccactgcactccagcctgggcaaagagcgggactccatctcaaaaaagaaaaaaaaaaaaaagaaaagaaaagcggctgggcacagtggctcacgcctgtaatcccagcagtttgggaggctgaggtgggtggatcacaaggtcaggagtttaagaccagcctggccaagatggtgaaacctcgtctctactaaaaaaaaaaaatacaaaaattagccgggcatggtggcaggtggctgtaatcccagctacttgggaggctgaggcggagaattgcttcaacctgggaggctaatgttgcagtgagccgagatctcgccactgccctccagcctgggtgacagaggagactccatctcaaacaaacaaaaaaagaaaagcagttggtaaatctttttgcttgtgccttgctatttgagtgctgtgctgtggtaatagttgtaaacttgaaggatggcacccttctctagacatagcccttaaggctgtcatgaggctattggatgtgaagcagtattttgtatattacattgtttccttattgggaagattctttatggtctcaattttaattatttagattctcatggaaaagattataaagggggaggaggggagaaactaattcatgtttatcaagtgcctactaatgggccaggcaatgtttttgatgttcacctgcgtattctcattcattactcaaaatggttttactacaaggctcatagaggtgaattcagaccgctcattgttagaggaggaggaggcatggtaggaaccttcacctacctcattgctttcagcacacatcatcttttctttgccccagctgagaggggttagattaccctgctccttcaatcatgaaattctcaggtgttctctaaggctccattgtctctctgtgtcttctgcgatctttcaatgctgataattgtgtgtgtgtgtgtgtgtgtgtatgtgtgtgtgtgtgttttaaagcttgttctgcagttggaactggagaaggaagcctctgttccgtcttctcaccttcattcgtgcagtgggaagccatgactctttttttggaaagtgttatcacccagatgtttcgaacactaaatagagaagtaagtaattatttcccatgctgactgcatgattattttgacctttttcttttcttttctctttctattttgggacgctatatctctctgttgctcaggctgaaatgcagtggcacaatcatagctctctgtaacctccaactcctgggctcaagcaatcctcctacctcaggctcctgaggatctagaactacagttacttgccaccacacctggctaatttataataaaaatggagtctgtgttgcccaggctgatctcaaactcctggcctcaagcgaccctcctgccttggcctcccaaagtgctgagattgcgggcatgacccactatgcctggccagtaaactggtagtagaataggaaaatctatggatgtacatcttacagaagaggaaacagatttagagaggctaaatagcatactcaagttcaaacagctaataaatggcaaaatggggaccaaaactcaggtctttctaactctaagcactaccacatttagtatacattttaagtaccacactgctttagaatactgtacgccaccagtatagtggccacctgtaggtctgaaaaggagggtatgcacagagagcctcaactgtatcagtaaaatcatatttcttaaagtaggcagatgaggatttactaaattatagagaaatagacaaaagatataatccaataatgtatagaggagaacctaaagtagctgataagccgggcgcagtagctcatgcctgtaatcscagcactttgggaggccaaggctggctgatcacttgagttcaggagttccagaccaccctggccaacatggtgaaaccttgtctctactaaaaacacaaaaattaactgggcatgctggtgcatgtctgtaatcccagctacttgggaggctgaggtacaggaatcgcttgaacccaggaggcagaggctgcagtgagccaaaatcacgccagtgcactccagcctgtgtgacagagtgggattctgtcttaaaaaaaaagaaaagggtggggcgcagtggctcaggcctgtaatcctagcacgtggaggctaaggtgggtggatcacctgaggtcaggagctcaggaccagcctggtcaacatggcgaaaccctgtctctactaaaaatacaaaaattagccgggcatggtcatgggtgcctgtaatcccagctactcaggaggctgaggcaggagaatcacttgaacccaggaggtggaggttgcagtgagctgagatcgtgccattgcactgggcaaccaagagtgatatataaataaagtagctgataaatatgaaaaacattcagcctcttgatcagttgaagaaatacaaaatttaagaggttttagggaataatacactgctgagaagatggtaagaagggcacgcacagctgagtacggtggttcacacttgtaatcccaacactttgggaggccaagatgggaggaatgcttgaacccaggagtttgagaccagcctggacaatatagtgagacctcatctctactaaaaatttaaaaaattagccaggcatggtggtgcgtgccagtagtcccacctacttgggaggctgaggccgtaggatcacttgaaaccaggagtttgagaccagcctggtcgacataacaacacttctacaacatctctacaaaaattttagaaagtatccaggcatggtggtgcccgcctgtagtcctagctactcaggaggctaaggcaggaggatcccttgagctcaagagtttgaggttacagtgagtgatgattgtgccactgtgcactccagcctaggtgacagaatgagaccctgtctctttaaaagatgaaaataaaatgtagccaaaatggttatttctaagtggaggcagccattgtcaacctgttttatgtctttgttacaggaaattcctgttaatgrtggaatagagctattgcagatggttctgaactttgataccaaggatcccctcatcctgtcctgcgtccttactaatgtctctgcactctttccatttgtcacctacagaccagagttcctgccccaggtcttctctaaggtataaagcccatctcctttgtaaattttattttgacatttctaagttaatttttatttattttatttttttggagacaggatcttgctacattgcccaggctggactcaaattactagtctcaagggatcctcacacctcacccttctgagtagctgagactacaagcatgcacaascatgcctggcctaggctaattatttttgtaactatttttaaaattatgtgaggcaaactaataaacacagctatttattcatttattaaatatctactcagtacttactgtggatcaggtaccatgctagtgcctcactctttaggaacactctgggaagaaaggcacaaaaacagttaatgttacctatatggcattgcaatgaagacttgtataaaggagagtattagagtgtgctgtcgggcagggaggggatttatgagaggaaggaacactttccaggtttccagttcagttgactaggtgggtgatagagccactccctgagtcagaataccagatcacaaaggagaacgggactaaagaagagaaagcatgagtattttggaatactgtgtttgaagaatatgtagaacatctttatggagacatctcacaataaattggctatttgaggttgaagatctagactctagaaagtaatgagataaaattaaagcatcatcatcatagtagtcccacgactaaaagtgaagtcttactgaagtgattatgtatgtagagttaggagacatgtgagtcaagcgaggaacctagtgaatcaccatcattggaggagtggagaaaaaaatgagaagcccccacagaaggaaaaagagccagagaaatgaagaaaatgttgtgtcacaagaccagtaggacttcagaaaagtgggctcatttgttgcaaattatttgagttggagaatgcccagtgagtttcttgactacactcttgtctgagtttaattccataatagtggccaagtaagcagccatatttcattggaatgaggagtaaatgggaaataatgaaatggaatagaagggatagaccatacaacttttgataaaagaagagagaggcgtttccatagccaagtgcttgggtgatggcatgaattgttctgggatcctattgtaaaatgttttgatggtaaaattgtgactccgatgactcttgtagaggttatctgagaaaatggacagtatgaataagctcatgcccgtagtcccagctactcagaaggctaaagcaggagaatcarttgagcccaggaattcaagtctagtctgggcaacatagcaagatctcatctctaaaacaaataaacatgagtgaccttttttcctcctctcccttagctattttcatctgtcacttttgaaactgttgaagaaagtaaggtaagaccattaattaaaccaatagattctaacttcttgagtacaaatgtatgaatacctgatactcagtttatatttttatataaatgggagrgggtagtaarggtggtagattatcatatatgttgttttgccactatagggcatacaagaaacatggattcttggtggctataaatgttactccattatactcttagggttgtgaaaaatcattgtgaatttgcccctgactgagatattcacatgagtctatgcagcacctgtatattatattaaaagcagctccgagtttgttgaatgtctcttttcaggcccccagaacccgggcagtgaggaatgtgaggaggcatgcttgttcctccatcatcaagatgtgtcgtgactacccccagcttgtgctggtaagctgctggaccctggctgaagtagccaagtttggttacatttgtgtgtaaatccagctttcagtgtacctcacataaagaaaaaactagaaactatagctttgcatcatataagcatccttggccgggcatggtggctcacacctgtaatcccaacactttgggagactgaggtgggtagatcacctgaggccaggggttcgggaccagcctggacaacatggtgaagtccggtctctactaaaagtacaaaaaaattagctgggcatggtggtgcatgcctgtaatcccagctagtcaggaggctgaggcaggagaatcacttgaactcaggaggcggaggttgcagtgagccaagatcacgccattgctccagcctgggcaacgagcgaaactccatctcaaaaataaataaataaacattcttgaattggtgttttcttagtatacttagtagtatagttagaaatgtgatggcaaatgtaatctctcttcaaaatacaaatagttctctgccatatagattactaagtttacccctataattctacaactctttactatgtgatgatcttaattactactgccaaatgatgtgcctgatcttgagaaaagcagatgcaaatcacaaccctttttggggcatggggttataagaaatttaacattactccagattacaaattatccagaaatttcttctctgaatgcacagcagttatctccatatatatatagatatacatatatatctatatatatatataaaacaagctgatcttttcacagttgtagtatgggaaagtgcagttatccaaatactcaagacaagagctatcttccgcctaaattgccttgcttatttaggcaaaataaagacatataacagaattaccaaataataaccttataggcctgactttcctgggactgctttggttttcttctttcttccttgagtaagccacctctccttgaaaatcagacctttaccrcctctggctttttttctttttgatctgtagcccaattttgacatgctttataaccatgtgaagcaactcctctccaatgagctactcctgacacaaatggagaagtgtgccctcatggaagccctggttctcattagcaaccaatttaagaactacgagcgtcagaaggtgttcctagaggagctgatggcaccagtggccagcatctggctttctcaagacatgcacaggtaaaggagatcccttgccctgactyttactatactcaagcacccattttggtttaagagctaggcccagggtggggtaggggttaaggatattgaagtgtgatggcattatccatgatatctgaagttctctaaaagcagtcttttgtaatttaatctctggttcaattagattgtgggtggggagggcacagagtgagactcctgtggtgtctgcattgcagcaccagcacatttagaraaatgagaacagctaggaagggccatacaaccacacagacacttatctgtgctcacacagtagagaaattattttctttatattttgaagattatattcttgtttaattcttaaattgttactaataatatttgggagtgggaagggaaatttaaaccttcaaatgacaactgacaattagtatgattatactcctctcactataaaaactgctcttaagggccaaataatgatagcctgttaactcctgtggaagaaactgtccttgtttaaagtcatgatgtaacttgtttttccccctccaaccttcagagtgctgtcagatgttgatgctttcattgcgtatgtgggtacagatcagaagagctgtgacccaggcctggaggatccgtgtggcttaaaccgtgcacgagtaagactttcctgggaatgggaagtggcattggccatgggtaggagtagggtgttgtcttttgtcaagtttctcatagatttgttttttctatactggtgagaaacgtgggagtctccacttccctaagcttctcctttcttttcttctttagtcttgaattcttgagttagttcccacagcagagcagatggtcttttctatgaagtcattattttggctttaaggatctctaaatagctctgaagactgaaggtgtaatgaggaagtaggtcagaacttggtcagcagggtgagtcctccctgccattgctctctggcatgtaaagtcttaagtgatggcttaacttgcaaacctgagatttttcagtgctttgctatttaaataagcattgttcctggctccattatggcacaagtcccattaattaacctggcaagtagtaggttgattcagagtaccgtgaggggggattaggacactagctgtcaaggcccaataagggtcaactcaaagaagatgaagtgatggcattttaaacactttgttttggatcgtatctaagccaccttctcatcagggtcctgtgggtgggtcactgcagctcctagaaagacagcttactgcaagggaagtttccagagcctaccactggccctgaaaatggcagtgagaggatccctcttggacttcaccttaaaggaagggatgggggattgccggggagcagaggattatttcattctctctggcctctgtgtcacttttgccagaaccttgaatatatctaacagtatttggtctttttttttttttccttttaatatttatctgtcattcttatttttctatagatgagcttttgtgtatacagcattctgggtgtggtgaaacgaacttgctggcccactgacctagaagaggccaaagctgggggatttgtggtgggttatacatccagtggaaatccaatcttccgtaacccctgcacagagcagattctgaaacttcttgacaatttgcttgcgcttataaggtgagtcagaataatggcttttctctgttgttttctactttaccttaaaaatttcaaaagtttagtctgtttacatgtcttcatatcttagtggtattaatgagggattgatttaagtcttatttctttctagagggtgtctcagttttaaaaaaaataacatcagctctcacttgcataaatcttaatttccatgtgaacccaaggggataatcccaaaagggcttttcccattttgagcctcctctttgttgttcttccatttctttatacttcatccctatttttacttgtaagttttatttggtctaaattttttagtaaaggaattgctcattgggagcagggcagttgccttctataatgatgcttgtctaggtggtattcatatgagctaatctgaatttatcaatactgagtctgagctcagatgaaccaaacaaccgctggctgaacatgctaaacaaaggaattataaatttttcatctgagtttgctagatccttggttctcaaagctgagtcctaagaccagtagcattagcatcacctgagagcttatttcaaaggcagaatcaaggccccaccccagacatactaaatcagaatctgcattttaactagatgcccagtggtttatatacacattaaacattcagaatcactgttttagatcacatgagttaatatattcaagtggaagtaggccagtataggcttatcagttactagatatagatatttgatgactcagggatggtctctaaatgaaaagataggtttttttatataattcagttattggccaaagagtgctttttgtatctcacaggattggttttttttttgtttgtttgtttttttgagacagagtctcactttgtcacccaggctgggagtgcagtggtgcaatcttggctcactgcaacctccgcctcccaggcttaagcgattcttctgcctcagccacccaagtagctgggactacaggtgtgcaccaccactcctggctaatttttgtatttttagtagagacagggcttcgccatgttagccaggctggtctcgaactcctggccgcaagtgatcagtccacctcggcctcccaaagtgctgggactccaggagtgagccaccacacctggcctctcacaggatgtttaaattacattgttagagctctgtttcagtactttttggccccttctccaaggagtaaaagcagtctcaacggggcaaaccaaattattcatgtcgcagtgaaactctcctgggaatagacacccaagacctgaagcctgagaaccaaagattttaagttaatgttgacaaattggagggctggagtgtctgataaagttgtcattgtggacatgtctgtggaaatagacaatattttggcggggtgtggtggctcacacctgtaatcccagcactttgggaggccaaggtgggtcaatcacttgaggtcaggagtttcagaccagcctggccaacatgatgaaaccctgtctctactaaaaatacaaaaattagctgggcatggtggcacatgcctgtaatcccagctactcgagaggctgaggcaggagaatcgcttgaacccgggaggcggagrttgcagtgagctaagatcacgccactgcactccagcctgggcgacagagtgagacttccatctcaaaataaataaataaataaataatattttcttttgatttctaaaggaggaaagagatctctgaaaagaagtaggacttgtactgagagggttaaacatttagtcaagaagaggcttatttctatcgtgatgtttttattaatagagatggggttttgccatgttgcccaggctggtctcggacagctgagcctgcttcagtctcccaaagtgctagcattacaagtgtgaaccaccacacccagccccatagtgatgttttttaaaaccacaaggttcttctgcagctagagaaacgtgaaagtgatggaaatcatagggcaagaagctaatcacctagacctttttaggcctgtggccagaatctatgtggccaacccagacgtggaaacagggttcatttctggttgactctagaggccacaagacaacagtatgattatctttttttatataattttctttttttaaaaaagtataatctcttttcaatttctagtcaccttcctatcaatcagtagaggaagattctcatgtgttcactatgtctttctccagttttttcctctataaatttactactcctattttctatagaaagacaatggaaagtgtataattgctgtcggtagataagtaggtcttgaatttattttgcaaacaagacctgttctgtctatcctttcatttaggaggctaacagcagactcagcttgactttaaggactctattttcttagtcttcagatggttatcattttgatacttttctaagagttcagtgcttttagagaattccaaaaatcaatcaaaaggcattttgaaaaatgcctagcatgtaatgatagagtagattgcttgaatagtgtgtagctggagctattaagagttttgcttttttagtaaattttattggctgggcgcggtagctcatgcctataatcccagcactgtgagaggccaaggcgcatggatcacttaaggtcaacagttcgagactagcccaataaacatggtgaaaccccacctctactaaaaatacaaaaattagccaggcatggtggcgggcgcctgtaatcccagctactcgggaggctgaggcaggagaattgcttgaacctgggaggtggaggttgcagtgagccaagatcacagggaagagtcttccctgtccctgggcaacagggaagactccgtctcaaaaaagaaaaaaaaaattaaataaattttatcttgaagtgtaacatttatgtagaaaagggcttaacttgtgagtgtgtgtagatgaattttcacaaagtggacacattcatgtaatcagcactcagatcaagaagcaactttacctaatacctcttttcagtaattacctgcccctcaaagataactactattctgatttgtatttatttatttatttacttacttacttacttttgaggcacgatcttatcctgtcgcccaggttggggtgcagtgttgcgatcacggctcactgcagcctcgacctcatgggctcaagcagtcctcccacctcagcctcctgagtagctaggactacagccatgagcagccatgcccagctaatttttaactttttggtagagataggttctctctatgttgctgaggctagtcttgaactcatgggctcaagagatcctcccaaagtgctgggataacagatgtgagccacctcacccagcccactattctgacttttaacattttgtccaggtttttgaactttgtgaaaatgaaatcagaagtatgcaccttttggtgtctgccttcctttcgctcaatattttgtttctgaggttcatccatgttactgcatgaatgtacttgtgttttttttgttctccttgcttgtatgatacttcattgtgtgaatatgctgtaactattcagccttgatggacctttgggtgatattttaatattacatatcatgctgctgttgacattcttatgtcaaatacgttttgtgaacatatatatataatttctgttggatacacacataggagtagaattcctagcttataagaaatgtgtattttctgtttttatagatgcaacctgctttttaaagtggttatactaatttatattcccaccagttatatgctggagttgggagttttaaattactattttttggctgggcacagtggctcacgcctgtaatccaagcactttgggaggccgaagcaggtgaatcacttgaggtcatgagtttgagaccagcctggccaacatggtgaaaccccgtctctactcaaaataccaccaccaccaacaaaaaaaattagctgggcatggtggcaggtgcctgtaatcccagctactcaggaggctgaggtaggagaatcgcttgaacttgggaggcggaggttgcagtgagctgagatcatgttaccgtactccagcctgggcaacagggtaagactccatctcaaaaaaaaaattgaaaaataaataaattactatttttttagtagagaaaagtttgctttaagaatgtagcaaggtattcatagcacctcctgcgtcaaataatctgataatagaaggtgttgaagctgtgctgtccagcatggaagccacttgccacatgaaactattgagcacttgaagtattactagtcaagtgttacagtactttcagaattggtctggtaggctttccagttttctctggaaagctccttagagaaaaaaaataaaaattaaaaaataaaaatgactagcctgaattgagatgaactgtaagtataaaatacacactagatttctaaaatcggccgggtgcggtggctcatgcatgtaatcctagcactttgggaggctaaggccttaggcagatcacttgaggtcaagagttcaagaccagtgtggccaacatggtgaaaccccatctctactaaaaatacagaaattagccaggcgtggtggtgtgcatgcttgtaaccccagctactcaaaaggttgatgcaagagaatcactcgaacccaggagatggaggttacagtgagctaagatcgtgccactgcactccagcctgggagaaagaatgagactctatctcaaaaaagaaaaaaagaagtattggattactacagtacttacaaaatgaagtactgataattactacactgtggatcaaccttcaaaacattatgctaagtgaaagaagccagacacaaaaggccatatgttgtatgatttcatttttatgaaatatctagagacagaaagtacattggcgattgcctcaggttggagaggagaagaaagtgtagatcaactgctactgcttaatgggcctggcagttattttgggggccatggaaacgttttggaaccaggtagaggttacttatgcaaccctttgaaagtattaaataccactgaattgtgaactttaaaatggttaggttttggtggggatgttttttgttagttttttaaagttttgtgggtacacagtacatacatatatttatggggtacataagatgttttgacacaggcatgcaatgcataataataatcacatcaattaaaatggggtatccatcccctcaagcatttatcctttgtgttacaaacaatccagttatagtcaactgcagttatgctttttaaatgtacaatcaaaattattattgactatagtcaccctattgtgctaggaaatactagatcttattcattctttgtgggttttttgtacccattaacaatccctaccttacccctaacccaccactaccctccccagcccctctgctaaccatccttacactctgtatgtccatgagtcgaattgtttaaatttttagattccacaaagagtgagaacatgtgatgtgtctttctgtgcctggcttatttcatttagcataatgacctccagtgctatccatattgttgcaaatgacaagatctctttttttttttatggctgaatagtactcctaaagtggttagttttatgttatgtgaattatgcctcaattttttaaaatcttaataaaaataaagctggttctttgaaaatactagtgataacatcagtaaattcaaaagcttaagaaaaatggggctgggcatgttggctcatgcctgtaatctcagcactttgggaggccacagcaggaacattgctggagaccagcctgggcaacgtagcaagaccccatatcgattttttaatttattttttttgaaacggagtgtcactcttgttgcccaggctggcatgcaaaggcatgatctcggctcacttcaacctctacctcccaggttcaagcgcttctcctgtctcagcctcctgagtagctgggattacaggtgtgtgccaccatgcctggctaattttgtttatttatttatttattttgagacggagtcttgctctgtcgtccaggctggagtgcagtggcgccatctcggctcactgcaagctctgcctcccaggttcacggcattctcctgcttcagcctcccaagtagctgggactacaggtgcccgccacctcgcctggctaattttttgtaattttagtagagacagggtttcaccgtattagccaggatgatcttgatctcctgacctcgtgatccgcccggcctggctaattttgtatcttcagtagagacagggtttcaccatgtttgccagcctggtcttgaactcctgacctcaggtgatcccccctccttggcctctcaaagtactggggttacaggcgtgcgccaccatgcccagctaattttgtatcttcagtagagacagggtttcatcatgttggccaggctggttctcaaactcctgatctcaggtgatccgcccatcttggcctcccaaagtattgggattataggcgtgagccactgtgcccagccccgtcttctatttttaaaaataaaatatttaaaaatggataatttccagggaaaatgtaacttattctaactcaacaagatagaaaacctaaagagatataacttcatattaattatattggtagtagttaaattagaccaaaaaactccaggcctaaatgattttacatgggagttctcccagaccttcaaggaacagataatttatctcttagacaaactattcccaagaatagaaaaatgtagcttcttctccgagaaaacaccaaatggcggatgacgccggtgcagtgggggggcctggaggccctggtggccctgggatggggaaccgcggtggcttccgcagaggtttcgccagtggcatccggggccggggtcgcagccgtggaccgggccggggctgaggccgcggagctcgcggaggcaaggccaaagataaggagtggatgcccgtcaccaagctgggccgcttggtcaaggacatgaagatcaagtccctggaggagatctatctcttctccctgcccattaaggaatcagagatcattgactttttcctgggggcctctctcaaggatgaggttttgaagattatgccagtgcagaagcagacccgtgctrgccagcgcaccaggttcaaggcgtttgttgctatcggggactacagtggccacgtcggtctgggtgttaagtgctccaaggaggtggccaccgccacccgtggggccatcatcctggccaagctctccattgtccccgtgcacagaggctactaggggaacaagatcggcaagccccacacygtcccctgcaaggtgacaggccgccgtggctctgtgctggtgcgcctcatccctgcacccaggggcactggcattgtctccgcacctgtgcccaagaagctgctcatgatggctggtatcgatgactgctacacctcagcccagggctgcactgccaccctgggcaacttcgccaaggccacctttgatgccatttytaagacctacagctacctgacccccgacctctggaaggagactgtatttaccaagtctccctatcaggaattcactgaccacctcgtcaagacccacaccagagtctctgtgcagcagacccaggctccagctgtggctacaacatagggtttttatacaagaaaaataaagtgaattaagcgtgggaaaaaaaaaaagaaaaatgtagtgctccataactcattttatgaggcttatttattttgataccaaaaccagacattaacagtaccaaagaggaaaattataggcctaaatcacttgtaaacatagagacgaaaatcccaaatcaaaagcaatatggagctagtaataagtcttttaatataaccacatttccattgttatatctcaaaatactaccagtaattcaatatccagtatacaatcagtattcaaatatcaccgaatgttttccttttttctgtttatccacacaaggtttatatatatttaagatatctcttagtcactaaattaggcttagcgtggtgcctcacgcttgtgatctcagcagtttgggaggccgaggcaggcggatccttgaggctaagagtttgagaccaacctggccaacatgacaaaaccccatctctactaaaaatttaaaaaagtaaccaggtgtggtggtgcgcacctgtagtctcagctacttgggaggctgaggcacgagaatcacttgaacccagcaggcggaggttgcattgagctgagatcacgccattgtactccagcctgagcgacagagcaaatctctgtttcaaaaaaaaaaaaaaaaaaaaaaaaaaaagatgtctcttaggctctaaatttataagttccttgccttttttttttttttttttttgagaccatcttgttctgtcacccatgctggagtgcactggtgctatctcagctcactgcaccctccgcctcccgggatcaagcaattctcctgcctcagcctctcgactgcctcagcctctcgagtagctgggattacaggtgtgcrccaccacgcctggctaattttttgtatttttagtagakacagggtttygccatgttacccaggctggtctcaaactcctgasctcaastgatccacctgcctcagcctcccaaagtgctgggattacagscgtgagctaccatgcctggccctctttttcttttcaatttatttgttgaaaaatgtggacttgtatttccagagtttcccctggtgaaattttgatgattgcatctctggagtattgtttgatcttgtctactttcctttatttttgttattttgttacacgtgaatatgtctagaggacatatggcactctgcagcctgaggaccaaatgtaagtctccacatgtttgtaagtaaacttccgttggaacataccttggccattcatttacctactgtttatggctgctattgcgcttcaatgcagagttgagttgtcgaggacagacaccatattgccggccaagcttaaaacatgtatgaatgtgacctctggtctagaaaactgacctcataccagttcagttttttagcagataatcctttgtagatgatgatgggttcaacacaatagtaaaggtttagcctttaaaagactcccaggtatgtattacaggttgatctatgacagaagtaatgaaagttagaaaaagatggctgggaatagtggctcatgcctataatttcagcactttgggaggccagggcaggaggatctcttggggccaggagtttgagaccagcctgggcaacacagacactttctctacaaaaaaaaaaaaaaaaagttttaattattcacgtgtggtggtgcacacttatagtcccagctactcgggagcctgaggtggaagggccacttgagcccaggagtttgaggctgcagtgagctatgaacacaccactgcaatccagcctgggcagtagagtgagaccctgtctctttaaaaaacaaaaaacaaaacaaaaatcaattattcaatgctgggacagttggctttctatgcagagttgagttgtcgaggacagacaccatattgtctgtttcaccgtgttagaaaaaacaattagattcctaccagccaccacacacagaaaaaattttcaggtgttttaaaacccaaaaagtaaagctgcttttttttttttttttttttttttttttttttagatagagtctcactctgtcgtccaggctggagtgcagtggcgcgaccttggctcactgcaacctctgcctcccgggttcaagcgattctcctacctcagcctcctgagtagctgggatttacaggcgtgtgccaccatgcctggctaatttctgtattcttagtagagacagggtttcaccatgttggccagagactggtcttgaactcctgacctcgtgatccacccacctcggcttcctaaagtgctgggattacaggcataagccaccgcatctggccaaagtaaaacttctagaccatatttacagcatgaggttagtgaatgactttttttttttgtcgagttggagtctcactgtgttgcgcaggctggagtgcagtggcacaatctcggctcactgcaatttccgcctcctgggttcaagcgattcttatgccttgacctctcaagtagctgggattataggcatgcaccaccacacccggctaatttttatatttttagtagagacagggtttcaccatgttggccaggctggtctcaaactcctgacctcaggtgatccgtctgccttagcctcccaaagtgctgggattacaggcatgagtcactgtgcctggccagggtagcgaatgacttttttttttgagagggagtctcgctctgtcacccaggctggagtgcagtggcacgatcttggctcacctggattcaagtgattctcctgcctcagcctccggagaagctgggattacaggcatgcaccgccatactcgtctaatttttatatttttagtagagacagggtttcaccatgttggccaggctggtcttgatctcctggcctcaggtgattctccggccttggcctccctaagtgctgggattacaggcgtgagccactgcgcccggcctagaatgacttttttttttttttttttgagatggagtctcgctctgtcacacaggctggagtgcagtggcgcgatttcagctcattgcaagctccgcctcccgggttcacgccattctcccacctcagccttccgagtagctgggactacaggcgcccgccaccatgtctggctaatttagcttttgtatttttagtagagatggggtttcaccatgttacccaggatggtctcgatctcctgacctcgtgatccaccgcgcccggcctctagaatgacttcttaagcaagaacaaacagaacaaactatggaggcttaaacatggtctgaaagatgttttcagtttgcatcttaaacctgtagctaccatgcccggcacccaccaccacacctggctaatttttatatttttagtagagactgggttttaccatgttggccaggctggtcttgaactcctgacctcagatgatccacccacctcggcctcccaaagtgctgggattacaagcgtgagccactgggcccagccatagaaacacttctgttttttggggttttgttgttgttgttgttttttgagacagagtctcgctctgttgcccaggctggagtgcagtggcgcagtcttggctcactgcaagctcagcctcccgagtagctgggaccacaggcacccaccaccacgtccggctaattttttgtatttttagtagagacagggtttcactgtgttagccaggatagtctcgatctcatgacctcgtgatccacccacctcagcctcccaaagtgctgggattacaggcatgagccactgcgcctggcctttggggggtttttttgagatggagtctcactctgttgcccaggctggagtgcagtggtatgatctcggctcaccacaacctctgcctcgcaagttcaagcaattctgccttagcctcccaagtaactgggattacacgcatgcaccaccacacccatctaatttttatatttttagtagagacagggtttccctatgttggccaggctggtcttgaactcctgacctcaggtaattcgccagcctcggcctcccaaagtactgggattataggcgtgagccaccgagcccagcctagaatgacttcttaagaacaaaaagaacaaactatggaggtttaaacatggtctaaaagatgttttcagtttgcatcttaaacgtgtagccatcagtttgttcagtggggtcatttctgtgagtaggtaagagtgctgtggacagcgggtatatcaagttcacagtccttgctccttactcaaagcctataattgctcaggtaggtcattttggtgggggacagcatgtgttgggaattgtgttcctctatcaggtccaaacagctgttgcaaggtccatgctcttggaattaagacaaaacattgaaaaatggggcaaattaccacctcctctgtgttcctacctgtaaatccacagtgttgcacacatttcattccgtatcactggtggtcaaaaaactcctgggaccacctcagatttaaaagaattttgctttctagctttggactctgatactgtcctgtgtcttggggtttagttctcatgttaatttatcttaggtattgtatactaagataattatatctatacaagtctgttccctcctccagcgagcattcagatatttataccttcttttctttcccctgccaggagttgatgggcagatctgtgtgraactgtagtatcactggattacaagcaaaacccactctttccttctgcatcagatggaaaagctcaatagcattcttgtttctttcagaacccacaatacattatatgcaccagaaatgctagccaaaatggcagagcctttcaccaaggctctggatatgcttgacgyggaaaaatctgctatattaggtaagaaatgtaaccttttttctcctaaggtttatcttatccctaatggatgtcccctttttttgttgttttttaagagtcatagtctctgtcacccaggctagagtgcactggtgcaaccatagctcactgtaggctcaaactcttggactcaagcagtcttcctgcctcagcctcccgagtagttggaccacaggcagatcacaacgccagacgaactttaaaatttttttgttgagacagagtcttgctatgttgcccaggctggtcttgaactcttatcatcaagcagtcctcccaccatggcctttaaagcactagaatcctagtgattacaggcgttcttatgggttccttgagcagcttcagcctatcttgtgcttcttccatcttgtcttgcactgccttgaccatctatttgttcagaaatgcagaatgtggagttcctataagctctatatgaacaagtgtatttacttcattatcttagcatacagagaaaatcgaaggcaatttattttttttccccgttaaccccttcttcaatttagccagtaggttgtggtgggtgttacagccattcaattataaataaatcatggcctttaacctgaaggatatttgtatactttcctgcctcctcgtgtgtgtgtgtgtgtgtgtgtgtgtgtgtgtgtgtgtgtgtgtgtgtgtagataggtatcaaagtttttaaaggaatagattttaagccatttcccaattgttaccttttttgttttgttttgttttcttgagagagtctcactctgtcacccaggctggtgtacagtggtgcaatctcagctcactgcaacctctgccttccaggttcaagtgattctcccacagcctgctgggactacaggcatgcaccatcacacccggctaattttttgtatttttagtagagacagggtttcaccatgttggctaggctggtctcgaactcatgacctcaagtgctctgcctgccttggcctcccaaagtgccaggattataggcatgagccaccacgcctggccttccagttgtgaccttgttaggatactgctttaattcattttcccattgaaaataarcatgaaaataactgtgcagtcataattgtggtatttgctgtgaaggaaagtggcagggctctgagtgtttatcgggagacctaacccagtctcagagggaagtcagaaggctgactcccaatggggacttgaaggatgagtacgaactagctaggttaggggcatgaggaaatgctgggcattctggacaaacagaatggcaggtataagatctgaggcaagagaaaaaggccttggtatgtccagaacatagagatggttgaatcatgtggctggagcacagggagctagtctgggaatgtgggatgaagttagagctagaggcatcagttgtctaaaccttgttcccatctcagaagcttcaggctggctcaccatcacagcccccatagtttgtctttgtcatcagctataacctgtgtctgagcccrgctgtggtcaagcaatccaatggcattcctcagctgtgaagttagccaaaggaaggatgttaatttgcctttccagaactcatgtctgtctgtttcagcctagatagtcctgaatcttttcctttgacaccattccatttaagggttatgttgcagacaccagtaaaagtagaaattccaagaaatgtatagctattaatataaaaagtaggtgttgcttaccacacacccccatgccattattcaagttaagtcaggaactcctgctatagaaataagtggccaaccagaaatactagaatggacaaacagttcccacagatagcttctgactataggactcgaaatgtaaaacctctgattacacttaaaaatatagatattttaaggcagtttttaatactaaggtaagtgggtttcatttttagctgctacacatcttagtgttttgtgtaagattttgcttaaaaaaggggtttcataacttaattgtgggagcatccccagagctttatggaaaaatacttttgagttgtcactttttttggtacaggttccatctgggggaaaaaaaaaagcagataaaagagtacccgggtctaaagtcctgggtccttaagtagctttcaccttctcctaccaaaagagtgcagcaaatcacgtagccaactgctttgcagtacagcaccagacatgcacacatcttcacccctgaacaacagcttcctgctgtagagtgttggccaattgagactcctgacagtggagcatcatgttcttgacccgtatttccctgtaggattacctcaacctctcttggaactcaatgactctcctgtcttcaaaaccgtcttggaaagaatgcagcgtttcttctctaccctctatgaaaactggtaaggaaccaatgctgcctctccatattttcttcctcgrtatgtattgtataggaatgtccatgggttggacttttcatctagtgtacaggtaaggcgaggcaagagtttgataggaaacttatcattctagtgttaaatagaaatgaaagcctgctttcctgcatttgctttttttgtaattgtcatatgagcctcacaatcccagcctgcttcatgcccaacttgtctgtgtttctagtgtataaaatgatgaaacccaagtcgaagctaaaagtggtggggattgcttagaccctacactgcttgcggcatacttctcataggagtcgggtggctggatactggttgtgggttggggaggtaactggccctcatgggctttggcctcactaaccactacactaatcagccaagctaatgagatcgtccattgtaagtccacattaaatagtaatgaaagctactgctgatctcggccaccaacatctgtctttaaaaagatgctgtatctataagttctcttaagtaaatacaactgctyttctggctgaaaaaccttattgtaggctagaaatgaaattcatgggacagggctggcagtaacagatgttggatttgtcattttcaatgctctttttttcccctttacagttttcatatcctagggaaggcaggcccttccatgcagcaagacttctatactgtggaggaccttgctacccagcttctcagctcagcctttgtcaacttgaacaatattcctgactaccgactcagacccatgcttcatatcctttcaaaagtctctacataacccaaaaggtcagaaaatyagagagagaaacaaaacaggtcacagcaaccagagggaagaggcagaactggaaggaagagatgagattatgtatctaagtgtatcatgtcattaaaaacactggcagattgcagggaaaacatgaaggcagtccagatggccataaacttttccttaggggtaaatttttaccttcccccttctcggaattattacagataaaacttttttttttttttgagacagtcttgctcactctgttgcacaggctggagtgcagtggtatgatctcggctcacagcttctgcctctcaggttcaagctattcttgtgcctcagcctcctaactagctgtgattacaggtgtgcaccatcacgcccagctgatttttattcctattttttgagacagagttttgctctattgcccaggctggagtgcagtggcatgatcttgtcttactgcaacttccacctcctgggttcaagtgattcatgtgcctcagcctcccaagtagctgggattacaggcgcatgctactacgcccagctaatttttttgtatttttagtagagacaggttttcgccatgttggccaggctggtctcaaactcctgacctcaagtaatccgcctgcctcagcctcccaaagtgctggggttacaggtgtgagccaccatgcccagctgtgaaagataaaacttttatcccttttctgtatttttagaagcacttttttttttttttttttgagacagggtctcagtgttacccaggcaggaatgcagtggtgccatcaaagctcagtgcaggctcaagtgatcctcccacctcagcttcctgaagagcctggactggaccacagatgcgcaccaccacacccagctagtttttattattatttgtagagatgggtctgtattatgttccccagggtggtctcaaactcctggctcaagtaattctcctgcctcagcctccaaagtgctagaattacaggcctgagccaccacacccagccagaagcagcagttttaacacttcattctcattcagacccttattaatagttgaatctctttctttcttttctttttttttttttttgagacggagtcttgctctgttgcccaggctggagtgcagtggcgtgatctyggctcactgcaagcttcgcctcccaggttcacaccattctcttgccttagcttctcgagtagctgggactacaggcgctcgcccccatgcccgactaattttttttttttttttttttttttttagtagagacggggtttcaccatgttagccaggatggtctcgctctcttgaccycgtgatccactcgccttggcctcccaaagtgctgggattacaggtgtgagccaccgcagccagcaaatctttcttacctgaaattataaggagaatggtgaaggagagtttgttacaaggatgtcctccttcctatttttttattcctactttttgggccagtgaccataatgtgcagcctgacggaaatgcagytaaactaagagtataatggaattcaatatcagtgccatttaggattttaggaaaagaactttaagattttttcactgttaacacaggatatttttgacatctggcaaatcctttagggattgattctgcccaggggtgcaacccaccacctggcaggtgagagatgtgtgcctatgcactaaaatttcttaacttgttgcagcacgkgtctttgtaaagcctctggtgctcttctgtcccccagagcactatgaagccctggtatcccccatcctcggacctcttttcacctacctccatatggtaagagataagtcaggaacaggaagcaaagagtactattaaggcctctggccatttctgagctttgcaagtcaggagctcctagaagtgttgtctactagccctgccagactggctgggcagagcttctaccccagctgactatccttgctgtaggatcgagcagcccccaaagaactaaactgatttaattgccacaagacagcttcagttgcagattctgctcctaacctcctgttaactgaggagaggtaaaaagaggaatgcttgctcacagacccttgccaggaatgctgggtctgttatccttactctagaattaagcagggggaccagctgggtggagaacaggtatgtctagagacccaggaattctaaaaatgttgttaattctttccaagcaaagaggtgtttgagataccaccttcatcagggatgtgggataggttacagaaaccatagatgttttttttaaccttgtggtgtggagtctacagaagttgtcattgatgcctagaatcatccttggctaattttaatcatgaagtggacttgactttagatattatgtgttccaatcctttccccaattctagcatttatttcctttgtgttttcccagaggctttctcagaaatggcaagttatcaaccaaaggagcctgctgtggtaagggatacctacccactcttcttggtggatgaactggcagccaggtttggggtgggaaaaggaagcgggcagggattctgctgtcccagggtagaagagcagtaggttgtagtcattctcagcctaggtgatacatggcttgtctggacaggctgttaccagcaggcagactctgagatccagccttcataggggctactgttaccttactcacttattttaattctgtaatgtctatccaactggacasagtcactagtaataatgtccttcagtggatcactgctgtccattcccaacttttgcataaaacgaagacccaaaggagaagaaagtggtcagagwgagtctgattagggtcgctgctttccttgtccttccttttctgcactcctgtggaacttggccccctggttttctgcagtggagaagatgaggctgcagatgaaaacccagagtctcaagagatgctggaggagcaactggtgaggatgttaacccgagaagtcatggacctaatcagtaagtggcatgtcgaaactggggctatagaggattttcctggaagaagagctggtcgctcagccaactccatgaaggcctgactaatgcaaaggattcatgtttgcggcgggcatggtggattgcgaggtcaaaagatcaagaccatcctggccaacatggtgaaaccctgtctctactaataatacaaaaattagctgggcgtagtggcgcgcaggcctgtagtcccagctactcaggaggctgaggtaggagaatcgcttgaacccgggaggcggaggctgcagtgagccgaaatcacgccactgcactccagcctggcaaaagagtgaaactccgtctcaaaaaaaaagttcatgtttgtagcaacactgacagatccaaaagaaataactagatagaagcaaggcagtccttaagtcaacctaaggatactttatgaattgcaagctgaatatggggaaacaaaaatagcagaaggaatttggattcattaggaataacttcctagttttgtcaaaatagggaaatgttttaaattcttggacatggaggctgttaattttctttttatttttactgtgtcattttgtttgtttgagattcaaagtagaccagggatgtatcaagcatcctttcctagtcactcactctcagagaattctgtaattttctctcagctagttgaacttgaaggaccaaaacagttcggtcatcagaatgcctctatttctattggtgaagctaattcttgtgccttggacggtacccccatcttcctccttcctcacctggccagagacaggttgggatcagtgggcctgaggtggctgttgtggtagtatatacccacccttcacctagtaaccctgctttcttgctttagcggtttgctgtgtttcaaagaagggtgctgaccacagtagtgctcccccagcagatggagacggtaagtgagcctgtgagaccttggagttctgctcttagcctcctaaatactgttccttctgaaccaggtcagtttccttgcagtctggtgaggagaagacaccytacatgtagttatcatctctggaccagccctcttgctgtgtgcctccatcatactcccacctccaagcctttgcacttgctgtttcctctgtctcagatgatttcctcccaaccatatatgtgatcttttctcttgctttattccaatgtcacctcttcccagagatcgtccatgaccaacctatcaaaaatggcaaccccagctactctgtattcctctgctttattcttcttcatagcagttgtcactacccaacattatgtttttatttatgtattcctttcttacctatctcccatgttagaatgtaaactcccatcagggaagggacctattgtcctataccttttatccccagtaactaaatcagtgtctggtgctcaaatatttgtccaacaacaaagtaacttcagtatttgcagcattttgtgtttctgcctagaagctcccatttccctcatgtacagcttgagtgcatctctagaagatcagccatgggcatgggcattatgtggaggtgggagggctcctagtactacttagccaccacttagcctagaacactcagctttgctttgttttttgcgcttctgtcagaacaagatattcttctctgttctgaaaggatggagcttaacattctactctctgataacagatgaagaaatgatggccacagaggtcaccccctcagctatggcagagcttacagacctgggcaaatgtctgatgaagcatgaggtgggtagaaggagcaggtgatacctttactccttgcccaggtggggagtcaccttttacttttcttgctctatggtgctatcaagagttttttgtaatactcctttgttacataagttcctggttccaaaggccccagaaaaaaccgagggaaaaggtgcaatgccatggtgtctcccataccagcataggcaggagctctcaggaaaacacatagtaggcacactgatgcagatccctggtgtttagcctccccaagccaggcctgagctttgtctccatcctacacatacaggttttctcacattttgattttttctttttgactggcaatacacaaaaatagaggaagtaaactccttttatttttcctgcttagctatttaaaactccagctcctaagccaggcatggtggcacacacctgtagtcccagctattcgggaggcttagatgggagaatagcttgagcccaggagttcaggaccagcctgggcaacaaaacaaacccatctttagagggggggaggaaaaaaaaaaaaccctccggctcctgatgtgtaataatcatcagagaaaactgtgcttctttttccattgtaactcttcatcttttcctgttcaggatgtttgtacagcgctattaattacagccttcaattccctggcctggaaagatactctgtcctgccagaggacaacctcacagctctgctggcctctcctcaaacaagtatggttattcaccccttttccctgcccctcatggaaggtttgggtcatgcagactgactaaatcattcagaagaactggggtgctgaggccttgagagaggccccctgtggccctaaagcacagttgtctccccaggtgctgtcagggacactgctcgcagatgcagttacgtggcttttcaccagtgtgctgaaaggcttacagatgcacgggcagcacgacgggtgcatggcttccctggtccatctggccttccagatataygaggcactggtgagtggggaaggcatgggggaaggatggctgcagcttcatcactcagtctgctcctagtctcttgggccttatcctaaattcaggcacctgccaaattgctggtgcaatctctgagaaatgggtgtggcaggaaatggggagggtggcaatatccaaacctacatccagtaagtttatccctgctgatatcagcgccccaggtacctggagataagagctgtaatggagcaaatccctgaaatacagaaggactcactggaccagtttgactgcaagcttttaaacccctccctgcagaaagtggctgacaagcgccgaaaggaccaattcaaacgcctcattgctggttgcattggggtaggtcatgcaccttcaatagtgctcccaacccccttcttaaatcatgtgtatgggcaaaccataaaccagctgtagttattgaccattatggtgagatttttttttttttttttttgagatggggtttcactcttgttgcccaggctggagtgcagtggtacgatctcagctcaccacaacctccgcctcccaggttcaaacgattctcctgcctcagcctcccaagtagctgggattacaggcatgcaccaccacgtctggctactttttgtatttttagtagagacggggtttctccatgtcggtcaggctggtcttgaactcctgacctcaggtgatccacccgccttggcctcccaaaagtgttgggattacaggcgcgagccactgcgccgggccaagagaatcttttaactactactgagggcccagcattaattctttctcatttgttttccacagaaacccttgggagagcagttccgaaaagaagttcacattaagaatcttccctcacttttcaaaaaaacaaagccaatgctggagacggaggtgctggacaatgatgggggtggcctggccaccatctttgaaccctgaatcaagcttttgggcatccttcctcggcctttcttgtcatctcttctttccctttgtagccgatctctaggcccttcttgcactgccacctcactttccaccactgtcagcctggaaagagatccaggtctggagctggagagaacaggccctgtgcaggaccaraagtaattatactaaagtatcaagaaagggagttagggcttaaactattctgtctagatgtcccagatagttcccattctacttggagatttggcttttccaagaaaagctagagcagagcagcccttctcccacaagccctcccacccccgtgcagccacatacctgtacagaatggtaactaagggtgctgtgcccaaccctgcgactagcaaggctcgcagcaagagcacagccctcaactacttgtgccagagtttctcttggaccactccaactcccactgagcccttttgctgctgggctggcaggaaactttccccactccctaaggggcatgtctgggttaggtgctaagtgctgaagagaacttggtcagttctctcaactttgctttgggcaagaatctggtcacctgatgggatccatggtacaggctactgctaaacttggcacagtatcaagtatagtacctccaaggaccagggctgggmagtctttagtgctaacatcccctttagagttcacacatcttgcccttccatgaatgacccctcagtctggcctccccagcctcaaggtccactcaggcacaagagccacagtaccctagatagtgtcacatgacaccgttgtcatccaaggataatacagaccaactaggctacatctgtgatgagcagctagcaaagccgctggtcttctcctaggactaagtccaggtgccttccacaatctcatggtctttcaggtccctggttacttttctcaaaggccatttccaaaagaatacatgccttcacatcacaacctgtactgtgagtccattctagaggtcactgaaaggccctgtaaagagaggacatggatacgggacctggccctgaggttattactggccgtaaggcagagttaatccatacagaaaccagtgtgtccatgtgctctgcacaaaaacagacctgttgtccatccagtccactgacaagagggtttccccgagagccgaagtggactgaagctacagtttttagctggtgcgggccacaggcagggtcagattgagaagaagcaaagctggggaagcagaagttgggagtcttgtgttgctccctcttcctgtgtggtgctctgggtttctgtggatcgtgaaggcgatctcaagagtgtttccctccaaacctgatagctgcctattcctgtctggttggggctgtggaggatgtagttgtatttattgcattgtaatatttttaacatcctgtgacttcatgctagaaattttctattgtttatagaaactttttgtagaaacattaactctaaagcacatctgcatgtcagtaaaaatctcagtttcgtacagaaagggacccatctgcctttttcaacctagtcttaaaaccagtgacatactccagggttacttcatgagcacccgggactaaaacaggaagaaatgtgactgatgattctggtctttcaagctttctgaaatggtgtgccagttagaaaaggatttctattcctgacatacccagactaggcagcccataccattctcacagtgtctttcgtgtgtggctgctgggcctggcccacaggaattgctactgttctttgttggagctgtcaatagcaacatgaacttccctggtaaaccaggagataggtgaagtggcacattcactctagcttgaatgtttttctagggtttggctgtgctcccagaaaccaccttaatttgccaattctcaggaggtgttctttctgttgtttttgaaacagggtctcactgttacccgggctggagtgcacatctgatgttcttaattggtaaatgctaaaccagttctgaagtgaggccccctgtttttcgcggtggctcacacctgtaatcccaacactttgggaggccccaaggcaggcgtatcacttgaggtcaggagtttgacaccagcctgaccaacatggtgaaaccctgtctctactaaaaatacaaaaaattagacatatagctaggtgtggtggtgcatgcctgtagcatcagctactcttgcctcagcctcctgagaattgcttgaacccaggaggaagctgcagtgagctgagattgcaccactgcactccagcctgggcaacacagtgagactgtctcaaaaaacaaactcaaaagtagtctcaaaaagtttttttgtttgggtgagtttatttacatctaaggccttataaaggcgtaaaaagtctcattttatggcacatttaacaaaatgtattgattaaagctggaattgtcccagaaaactcaggatccctagtcacactgggctctctgttcagcagtcctgtagggtgggtcagtcagaacccaaagcttcagcttgcctcagaagcatccaagctcagtccatctgaaccgcatctagttcatccaagaagcgccggcacttccccatcagtactttgatggcttcactcaccagcacatctggtggcaacacccccgttgactcaacagagactggggaccaaagagacactttagtctaggcagggcttgcctgtaaaacttactcataaacttcacatctagactggaaggaagctgcagcaccaaagagcactgcccactcatctcaccacttcatactcacagatataatgatctcgaacccgggcaagcctcacaaccttctttagcttctcattccggaagatttctctgctgaaggtatccagccgggggttggcaactctggccacctttttacctaatgagaacaaaccatgtttttttattcctttttctaatttgccacttggtagcaaaccaggttatacttttaggagcccagggtttttatttctgtcaccttgaaagaaaatataatttaggtcctaacttgaacagcatcccaaataccataccttggacttcctgcacctcaataacaccaggtgagaagcacctgctcaactcctcagctgcctccccttccacgggctcaagcagggtgatgtctggcaggagcctgtaactggctgttgccactggtgaaaacttggcatgatctttgcctggagaggaagagggaacgtgcctataggaaacccttctagggttaggaagaatactcctcctaagctactaacagcaaaagcacaaccctcttggctttctacctgccgggaatgtctcagctgagttccctagtcagcttgccccactgcaaccgaactatcccccttcccaggaaggcacacagggttctcaccaatgcccttgacacagtgcatgagcaggtcaatttcttggccaggccgcagctgagcgatgaggatatcatcatgcactggtcggatagtgccctctggaaagagatcagcctggttccccagggggatccatgtcatatgcctggtatacactggaggaaaaacatgtcagaagatctcagtccctaaaactagcagctacccacaggtggggcctcttcctcaccctaccactactcacctttgtggttcacgtacagttcgttggggtcagaggaatctttagcagcatgggggttccgagtgcatctgacctggagacgaaactgtagagtatctatctctgtgccttcttcatctcctgcacaaatggagggagctcctaagaactagtaaacgtctgagtgccagcactatgctgaatgctttacgtgtttcccatttaattatggcaaacttgggagacaaggcaagtgttctcacagatgaaagacactgatgtacaaagataagtaacttacccaacatcacagtcaaccaggatttgaacccagatagtccacttctcccaaaatttcattttctcaccttggttccgatactcaaaaagacggggatcagcatgaatgggaatgagccccagacggtgagcaagaatctcatcctgaacaatggatgtattattgtacaccaggaccttctccacagccatagttggcacctgcccaaggaaaaataaccacttatctgcaaaaacccaacagaccccctacctatccccgtaaccccaacctccagaggtagggagctatctctcttcctagaatgtttaatgagaaatttacaaagaatgagaaggtaaaatgctcagcaaaattccaggaaaattaaggagggaaggacagcttgagacacttaattctccaagtgaggtgtcagtgcagttcccaaagcaactccagccttgtcaccatgcctgccaatacctcagctagcagaattcgtcgaaaagcattggcaatggctgcgtcaattcccaccatgtcaaactccagtgagttttcatccatgtgtactacatccacacggaaattctagagggacaggaaaaaacatttaagtgaaatctgctctctgtgtaatatctcttcatacctcccccttagataattccctcaagtattatcctctcatccaaaaacctccctttgcccaaatgtctcttattaaatattctatctcgcccagtgttttaagtttcatgaaaagtctccatttttgtcgtccattcattaaaaccctatgcaatatggcttccaaccaaaccatccacagaagctattctactgaagaacagaaactaccatagtgcttagttttgttgacactactcagtcctcttactagacttctgttatgcttggcattgattaaaaaaccccctcctggcccggcacagtcactcacacctgtaatcccagcactctgggaggctgagacgggcagatcacaaggtcaggagtttgagaccagcctggccagcatggtgaaaccccgtctctaccaaaaatacaaaaaattagctgggcatagtggcgcatgactgtagtcccagctactcgggaggctgaggcagaactgcttgaacccgggaggcggaggttgcagtgagccaagatcgcgccactgcactccagcctgggacataagagtgcctcatgaaaagcaaagaaaaaaatctcctccttttttgaactattcccctggtttctgagctctgagctccactcttcttccttctctgatgatcgacttccacccatctctaaatttgccaggttcttgtctctctcccaggtcaccttaactgtactaacagttttagcaactatctgttctgacaactcccaaaatgttatctcacttctgatctcatttcaagcatgcagtcttctagcctgctagatttctccacatgcagaaaacaatgcatcatcattcccgttccccagacccatttctcctctcagtaaatgataccacaatgcatcaaagcagttcccaagccaaaaagtcattttatgctacccccacagcctttaccaaagcaatcataaatttaccttctattctacctttgctctatttctaccatcagtcttagttcatgtcttcaacctcagcttcccttacaacagatctgcctgctccatatgatcctcctcaaactcattccctcccagccaccaaggttgcaaatctcatcatgtctgcttaagaactattcaatctccctatcatcaacagtgcccaagacacacttcaaccttgcctaccactcatgccagaactacttggacatgcccggagcacacttcacacaagccataattttttttcaagcattaacctttttcattgttcatactttattccttgtatcaacaggttaaaaaagtaaaattttcccaagcactgatttacagatcatgtttataagctgcacgcaaaggtcagttgcctaaacggtaacattcagtaatctatttaaatgcaattttaacccttattttaagctaagtgaaacaatacaaaagactaaatacacacaaaacctgtatatcctgaacttcactgacttgaaacaaacccttcataatttaactcctgttcttttttacttaccattcaaggctcaattgagatgtaccctcctcttgaaatgttaagtacctctccgcccctcttcctggtctcagcgtaatgctccccaccccaaccctgccgtcttcatcgctatcaaccaccttcaccatattacactagattcactgtttatacacaccattcctcaacaagactgaacatctttgcagaactgggtagaaaccgtgtctaatttggcctgtaaacggagcgtctagcacattgctcaacaaacttacaaacggagcgacccccaagagcagcttctgagacagacacaggctgctcagaccacaaggtctggccttcataaccctccccagacaactccggccccacttaccttctcgaagcggtcctggtcccaggcatcatcataaccggaatagttaccgggaaagtcagtagtatggacctagagcaaagggacgaatttgtccacgaagggacagtgagcccacagctatccccacgccaatcccaagacccatccctgttccgctctcattcctcccgcccgagctcaaggccacaaggcttacattgcgaaccccaaactcccccagaaccacgcggctccgcatttcctccaccgcctgagaagccgccatcttcaatctctccacgagactagaggttctatctcgcgcgtgcgtcctagtagccctgctccgtctccgtggcaacgcaccgcctcctggaatcttaaatatcgcgagatttttccccgcccccgtccacgtccccagcttccggaagttgcttttgtccaaacatccgggcttctcctttttgtgttccggccgatcccacctctcctcgaccctggacgtctaccttccggaggcccacatcttgcccactccgcgcgcggggctagcgc

SEQ ID NO: 96872 - DNA, 26071 bp, Homo sapiens
agtggaagattttagagtaaaaataaccacaacctcccccttatagattataacaatcttctgcatcatgacagctaattgttttctagagaaaatagctaagtgacctgcattgtgttttgtctttctcttttttttttttgagacagagtcctggtctgttgcccaggccggagtgcagtggtgtgatttcggctcgctgaaatctccgcctccagggttcaagcgattctgcctcagcctcccacgtagctgggattacaggtgcctgccaccatgcccggctaatttttgtatttttagtagagatggggtttcactatgttggtcaggctgctcttgaacacctgacgtcaggtgatccacctgcctcggcctcccaaagtgctgggattacaggcgtgagccaccatggccagccgtgttttgtctttttacttcagtgtatatttaacaattccgggccagacacagtggctgacgcctgtaatcccagcattttgggaggccaggtgggtgaatcacctgaggtcaggagttcgagaccagcctggccaacatggtgaaaccccgtctctactaaaaatacaaaaaattagccaggcatggtggcgggtgcctgtaccagctacttaggaggctgaggcaggagaatcacatgaacccaggaggcggaggttgcagtgagctgagatggggccattgcactccagcctaggcaacaagagtaaaactctgtctcaaaaaaaaaaaaaaattctgaagtatttttgttagggactagttactcacaaatggtcccaatgtcattaaggactggataccacttcattttgagacagggtctcgctctatcacccaggctggaatacaatggcacagtcactgcaacctccacctcccggactcaagccatcctcccacctcagcccttaccccaagtagctgggactacaggtatgccccaccagacctggctactcttttgtatttttttgtagagataaggtttcactatattgcccagactggtctcaaactcctgggctcaagcaatccgcccaccttaacctcccaaagtgttgggattacgagcatgagccacctcacctggccgacaactccatttcttgagaaaaagaacagtactaatgggcaagaagaacgtattcagtataaaatctcccaaagtatctctgacaggcacagcacctgaacacatggaaatgactgttcatctgttcttatctggagaggttacctaatatatacccactatcccttgacgccaccaacattttcggaccaccttccacatcccagacacagcactaagttaggaattagaaatgcgagcaatcacacaataagaatgaaattcctttgaagtaattatattaccatgattaacagaaattatttagaaacaacacattctctagacctcatcaaccactgcagggctttgagcagaggagtgacatgatctgacatatttttaaggatctctctagcagttgaagctgaaaacagaatgtagggagaggcaagggtacaagtgaagacataagatgggaggctactgcaataatccaggtgacaggtgatgctgacctggccctgatggtggtagcaaagtgataagatgtcactcaattctgggtgtatttggaacatacagccaatgtgatttgcaatggatgggatgtgggctgtgaaagaaagaaaagtcaagcatgactccaaaagtttttggcctaagcagctaaaagaacagtattacctttaattgagaagagaatgatagtgaagcatgatggcgtgtgcctgtaatcctagctacctgggaccttgagagcttgtttggaggttctagcaggggaacgcagctacttatatacccttgaccgaagattagtcctcctctattggggatggtcgttctcttcgacttgagtgtgcagcttcgggagggatatacatggagcagtgagggaggaaggagacaccggcctagccagccagatcagccggatcaaccctggtgatcaacggggtgagagatgtcacagccaggttgccctcacatcctacttgggaggcggaggtgggaggatcacctaagtctaggagttcaaggctgcagtgaaccatgatcacgccattgcactccagcctgggcgacacagcaagaccctgtctccaaaaaaaagagaagagaaagatgtctatggagtaggcttgaggggactatcaggagttcagtttacagagaagtgaagtttgagacatctattatatatccaagtggtgacaataagtaggcaagtggagaacaaagccaagttcaggggagaggtacagacatacaacagactagagatttggatgtatctgcatatagatggtgtatttgtctgcttgggctgtcatactaaaataccacagactgggtgacttaaacaacagaaatttactttgtcaccattctggagactagaagcccaagatcaaggttttggccaatttggtctctggtggcagctctgttcctgtcttgtacatggccaccttcttgctagtcctcacataatctttcttcagtatgtaagggtaaggggcaagctctccattcactcttctgataaggacactagtcctatcggatcagggccccacacttatgacctcatttaaccttaattatttccttactccaaatacaaccacacctagagtgacatctttgattctaaaagttcatgttctcacccattatgcaagacttacaatggtacaagctatttaaggcagacatttaaaagaggcccaagtgttcagagagcctttggctcctggtacttcttgttagccactcaagtttcatctgtcccagcattttccctacctagttggagcaacttgcgttctctgggctcccatcccaagaccaagctgaagtgtcctcaactcctcccgctgccaaggagcatttatctggtttcccagtgactcccagtctggaggttactttccccagtgctgtctcccatggtttcctacctaacatcttatttctctttctccagtttcttctctgccttctgtctgaaggcttgtattctatttttgtttcagaatgcatttctcttatgcattagaaatgttttcattatccattaactctaaacaagaacctaaaggcatataaaaaaacccttagcatagaactgctgaatgactaagtcacagagaagaaaaggcaaatacctccactgcttcgaagactgcacacgctaaaactacacaaatgccagaacagaacattggattatcattatcaaaattaggggaaggctgggtggggtggctcatgcctgtaattccggcactttgcggggccaaggtgggaggattacttgagcccaggagtttgaaaccagcctgggcaacatgacaaaacctcatctctacaaaaaatacaaaaactagccggatgtggtggcatgcacctgaagtcccagctactagggaggctgaggtgcaaggatcacttgagcctgagagattaaggctgcagtgagccgtgctcgtgtcactgtactccagtctgggtgacagggcaaacaaaaacaaaaattaaaaaatcagggaaagtacactgtgaacaaatgtttattcagcaaatttttcaaattattattattatttttttgagaccgagtctcaccctgtagcccaggctgaagagcacgatctcggctcactgcaacctccgcctgccgggttcaagcaattctcctgcctcagcctcccgagtagctggaactacaggcatacgccaccatgcacagctaattttttgtatttttagtagagacagggtttcaccataggggccaggctggtctcaaactcctgacctcgtgatccgcccacctcggcttcccaaagtcctgggattacaggtgtgagccactacacccagctcaaataatttttttaaagtatattttccagttttgttttgtatggcactgactctgtcactgtgaattccattttacccaaaacattgacacttccacacatatttatgaatcaaaattgaaagataattgcattaataggtacttttatttttttcttcttttgttttgttttgttttgtttttttaagacggagttgctctgtcacccaggctgcagtgcagcgtcgtgatcttggctcactgcagcattcacctcctgagttcaagcgattctcatgcctcagcctcctgagtagctaagattacaggcatggaccaccacgcctggttaatttttgtatttttagtagagatggggtttcaccatgttggccgggctggttttgaattcctgaccttaagtgatctgcccgccttggcctcccaaagtgctgggattacaggcatgagccactgcacccggccgacttttgcaaaggaaattctttgaatctgaagtgtcttgcaaggtagaggctattgcaaccatttcaactagtgtgtcaacagtcttctctaaggtgggctagaaaaatggtttcatattcaaattataactctgaaaaacaactgatggtaataaagagattccataatcagacagaactaagtgaaacaattagttttggtagagttctgtggtaatcatagttagaagtttatcctgggtagctgaaatataactaacttcagactccaggcctgtcggtggcttgtgccaatcaccacaacactttgaggggccaaggccagaggatcgcttgagcccaggagttcaaggctgcagtgagctatgatcacaccactgcactccagcctgggcaacacagctcttgttttttaacaagacattgttacttaaaaaaaaactgccctgatgaaacaattctaccatgaacactgatgttgttctgtggactacttcaggaagatggactaagaacatcattaaatagttccaaccagtttctgggtaattttatttttaattttttgttatgagggtcttgctatgttgcccagcctgggctcaaatgatcctcccaccgcgggctctcaaagtgctgggtttacaggtgtcacaccgcgacagccaagggtaacttttttttatttttatttttgagatggagtctcgaactgtcgccccggctggagtgcaatggcgcgatctcggctcactgtaacctccgcctccaggattcaagcgattctcctgcctcagcctcccgagtagctgagattacaggcgcccaccaccacgcccagctaattttttgtatttttagtagagacggggtttcactatgttggccaggctggtctcgaactcctgacctcgtgatccgcctgcctcggcctcccaaagtgctgggattacaggcgtgagccaccgcgcccgtccaagggtaactttttaagagctgccctacagctcattacctccttctcaaggagcatgagtgtcaaaccacctccagcaaagtagatgtagtcttttacagatttggaaagaaggatttaggaggaaagggaagtcgttcggaatgaaggatttcctcctctgacgcccagccgtcccccgttaagcctaaaggtgccagacctcaagactcttctagaaagagatttttcctttccaaggtgaatccatctgttccgaaggtcagaagctattttaccgaagttttccgttccactgaaaaaattaagggtcaatcaaagctccttgccccaaacctgaatatgagcttgcctcgggtcatattcgactctaaagactccaccacaccatcctggactcccctatatctaggacaaaaagcgaccagtttctcaggggctccttgcggggagcttaccgcgccctcactgtccgccggcccgagtgctaccggagatcaccagcggcccggacgccagcgagtggaacatctcggtcgcactctcattggttccagggggccggaagtgcgtgsgtccagcggaagtgctcccccggcgcggtccgccaggccagtgccctcaggtaggcggggcccctggccctaaactctgggactggcgggcggtcaggcggcacagggggaatcccgggggcctaaggaggttgtcycagtttttgtcaggtaggcccggaaggagtttcggggaccatgggtttacggctacctctggtggcaattggggcctgttggagcccggcygccgcgggacctacgtgccggacttcaagttcccgcgtggggtgggatttgctgcggtggccggagctgattcttcacccagtcctgttggttctgggccaaaccctcctcactttcaaggaagaggcgtgctctccgcccttaycttttccaagcctctgggtttgacgccatccctcaaggcgtgtccggatgcgggattttcctcaaagaccctctcggcctcgctaggaagaaactcagaaaggctgcggtaggcgcagtcgagggggaaagtgcccccgcccttgatgtctcaggctgctcamgtggaagttatctggactgccttagggcaagtttatatatagcaaataaaattacttgttaatggtttccttttttccagcatctccaccccgaggtggtttgaactttgagccttttgtagtcctgatgaataatttcattttcctcaagtttatgacactcggaacgtcaagaactggaggtttgtgcaatttgagaccggtcggcactgtgcagagatcagagtactaagagacaggtgagcatgaatgaggaccctccgctccagatatagtgtctgagagcggtttctgtagtttcgtaaaagtgaaaagtgcaccacatttagtgactactaggtggtgccaacgagttaatctttcggggataaatctcaactaatgtagtaccaggttaaggcttttaaaatgcacccatttttactgaaatgtattcagaatagctttagctccttaaaatatgttgagcctttatatacgtgaccaaattatcgacgttctattctgtattaggtactgagaaagctgagagaggaatcagactcatattctgttctccagagtttagtcagaggagataacgtattataataaaatcatatataattaaaggcagaaataagtgctaaatagagaataagatttgagctgggcgcggtgactcacgcctgtaatcccatcactttgggagactgaggcaagtggatcaccagaggtcaggagttcaagactcgcctggacaacatggtgaaaccccatctctactaaaaatacaaaaattagccagatgtggtgacgcatgcctgtagtcccagctactggagaggctgaggcaggagaattgcttgaacccaggaggctgaggttgcagtgagccgagatcgcgccactgcactccatcctggacgacagagcgagactccgtctcaaaaaaaattttwaaaaaaaagatttgaatgctaaagaagaagcaatcaattctcattattcatctaccagttgtttattcggcactttttgtctgtccaagattgtgctggatgctggtgtataaagaaaaggtaaaggccgggtgcggtggctcacgcctgtaatcccagcactttgggaggccgaggcaggcagatcacgagggcaagagatcgagaccatcctggccaatatggtgaaacccgtctctcctaaaaatacaaaaattagctgggcgtggtagtgcgtgcctgtaatcccagctacttgggaggccgaggcaggagaatctcttcaacctgggaagcggaggttgcagtgagccgagatcgtgccactgcactccagcctggcgacagagtgagactccatctcaaaaaaaaaaaaaaaaaaggtaaaggctaggcacgatagcttacacctgtaatcccagcattttgggaggctgaggcaggcggatcacctgaggtcaggagtttgagaccagcctggccaacatggtgaaacctcatctctactaaaagtacaaaaatcagctgagcgtggtggcgggcacctacattcccagctactcgggagaccgaggcaggagagtcacttgaacccaggaggcagaggttgcagtgaaccaagatcatgccactgcactccacctgggtgaccgtgagacgccatcaaaaaaaaaagaaagaggaaagaaagaacgaacgaacgaaagaaagaaaaggtaaaatccctacttaaataattcacaacctagtgattgggaggaaatcaaggaagaccttgtagagaaggtgacacttgaactagactttgaagaatgaactgggcttcataggtagaaaaaaaaatgcaggctcaaaaaagtgcatgacatttttggaacagcaagtcatccagtgtggttagactgtaggaaactaactctgaaaagacattgtcagttacatcttgggtttgccttgacttttactggaaaattccacagacttaagagaaaaattaaaatggacaatttccaggaaaaatccactaaactattatacataagatgtagctacaataaattacacttctgggtataatacttgtttatgtttgcatatcattaatgatcatagatgacttatgccaattttaatagattaggtagtaattttttgtcattatatttaattttgaatatactgtaagaatcctctccaatgaagtacacatgtcaaatcatctggtaatgatttcattatgtgtaggaaaataaaacatgctttaatgctgtgtgcggtggctcacgcctgtaaccccagcactttgggaggccgaggcgggcggatcacgaggtcaggagattgagaccatcctggctaacatggtgaaaccctgtctctactaaaaaaaatatacaaaaactaggccgggtgcagtggctcacgcctgtaatcccagcactttgggaggctgaggtgggcggatcacgaggtcaggagatcgagaccatcctggctaacacgatgaaaccccgtctctactaaaaaatacaaaaaaaataagctgggcgtggtggcgggtgcctatagtcctagctactcgggaggctgaggcaggagaatggtgtgaacccgggaggcggagcttgcagtgagctgagattgctccactgcactccagcctgggcgacagagcaagactctgtctcaaaacaaacaaaaaacatgttttaataagttacctggaaagttttgtggtttgttttttgttttttgtttttttttgagtaggagtctcactctgtctcccaggctggagtgcagtgtcacaatctcagctcactgcaacctctgcctccaaggcttggatgattctcccacctcagcccgccaagtagctgggactacaagcacacaccaccatgcccagctaatattttaatttattgtagagacggggtttcgccgtgtcggccaggctggtctgtaactcctggtctcaagtgatctgcctgccttagcctcctaaagtgctgggattacaggtgtgagacaccatgcctggccccagtcaataggatatttaatgaaacttgacatactgattgttaaattcatctggaagagaaagtgcacaagaagagccaagaattttggggaggagaaaacaataaaggcaagtcattatcagttatcgagatatatcagtgataaagccataataatgtaaatagcaagaaatgttgcctgagggctggacacagtggctcatgcctgtaatcccagcattttaggaggccaaggccaacatggcgaaacactgtctctactaaaaataccaaaaaaaaaaaaaaaaaaaaaggcagatgtggtggcacacctgtaatcctagctactcaggaggctgaggcaggagaatcacktgagcccaggatgtggaggttgcagtgagctgagatcacatcactgcactccagcctactgcactccagcctgggtgacagagcgatactctgtgtcaaaaaaaaaaagaaaaaaaaaaaagccaagtggggtgcctcatgcctgtaatcctagcactttgggaggctggggtgagtggatcatttgaggtcaggagttcaagaccgacctggccaatatggcaaaaccacatttctactaaaaatacaaaaattagccggacgtggtggcacgcactcaagaggctgaggcaggagaattgctgaaacccaggaggtggaggttgcagtgagccgaaatcgtgccaccgcactccagtmggggcgacagagcaagactcagtctaaaaaaaaaagaagtgattccttaggaacagaaaattatcaatgactagccaattgccctaataccctttactagtcagtcttttatttattaatcaatatgccacctttattgtagaccaaattctcctggatcaataaataaaagactgattagtaaarggtgtttttgaaaggaaagttagacccctacttcaaagcataacaaaaaatgttgcaggtggcttttgtctgcagctagaaaacaaaaatttgtaaaagtcttgaatataaagatgtataaatcttgagatggttagggcctgccttcatgggtcacaaaacgaagaagatttaaaggagaagatagatttgtctattaaaaaataataatttgccatgacaaaaaaacataaaatttagtcaggagacgaaataatatttgcaattacaaaggcttcattgcttgatcttaggaggtcaaagctgcatgagccatgatcatgccactgcactccagcctgggtgacagagcaagaccctgtctcaaaaaagccaaaggctttgtatccatgttataaatcagtaagagaaagataacccagcagaaagatggtcacatttccaaagaagaaattcatattaaaagatgttcatcagctgggcttgtgggcttacacctataatcccagcattttgggaggctgaggtgggaggatctcttgagcccagttcaagaccagcttgggcaacatgggagaccccatctctacaaaaaaataaattagccaggtgtggtggtgtgtgcctgtgtttgcagctactcaggaggcagaggtgggaagatggcttgagctcgagaggttgaggctatagtgagctatgattgtgccactgtgcttcagcctaggcaacagagtgagaccctatctcaaaaaaaagttcatgctcacaagtaattaggtcaatatacataagaccaataagataatatctggagtgtttggggctataatgattcattttataaagcaaagtcacatttgatctacatatatatatatatttccatttaccaaatttgtttagagtaagatagaccaataatgaagacttctaattaatatgtcaagtcacataaagaggactttcaggtatttttgtggggtgttattactatatgagtttaaacttttatatctaaattaagattttctttgtttaactatctttcatatacctgtagcttttttttttttttttttttttttgagtcagggtctcgctctgtcaaccaggccagagtggagtggcaagatcatggctcactgcaacctcaaattcctgggctcaagcagtcctctcacctaagcctcctgagtaggtgggactagaggcatccgccaccatgcctagctaagattgtctattctttgtagagatgaagtctcactatattggccaggctggtctcgaactcctgggctcaagcaatcctcccacctcaggctcccaaagtgttgagattacagacatgcgtgagccactgcacccagctgcctttttttttttctgaaatgtagtctcactctgttgcccaagctggagtgcagtggcgtgatctcagctcactgcaacctctgcctcccaggttcaagcaagcctgctgcctcagcctcccaaatagctgggactacaggtaatttttttttctttttttttttttgagcctgagtcttgctctgtcgcccaggcaggagtgcagtggcgtgatctcggctcactgcaagctctgcctcccgcgttcacaccattctcctgcctcagcctcccaagtagctgggactacaggcgcctgccaccacgcctgcctaattttttatatttttaggagagacggggtttcaccgtgttagccgggatggtctcaatctcctgacttcatgatccgcccacctcagcctcccaaagtgctgggattacaggcgtgagcaccgtgcctggcctttttttctctttagagatggggtttcccccatgttgctcaggctggtcttgaactcctgacctcaggtgatccacccacctcggcttccaraagtgctggggttacaggcgtgagccaccacatccggccttttttgtatttttagtagagatggggtttcaccatgttagccaggatggtcttgatctcctgaccttgtgatccacccgcctcggcctcccaaagtgctgggattacaggcctgagccaccggcgcctggccgcagctgcatatttttaattgcactagggactgggtgtggtggcttatgcctataatcccacctctttggtagtccaagatgggagggtcactttaggccagatgttccgagaccagcctgggcaacatagtgagactctgtctctacaaaaaataaaacttmaaaaaattgcactggtatgttaatttcatatggtatrtgggtttattgtttcacatagagattaaaatggcttccagaggaaagacagagacaagcaaattaaagcagaatttagaagaacagttggatagactcatgcaacaattacaagatctggaggaatgcaggtaagagtttaattgtatgttgttatgctggaaactggcgttttttctgcagctagctccgtggatgcaggcccatgtgtgatgattctgcattcccctgtagtgttctttgcagtgctttgtctattagagaagtaaacttattgcaggctttggagtcataaaggctgggaaatgaaagtcattcagttaactactaagtgcatgtgaacttgagcaaaatacttaccttccttgaagtagaaataacacctactttgtctttagtatttaaatcagtcctacctgctgtcaggctaagaaggtactacttgaacttctggcatgtagtttcagccttacctgcacaaaggaccacaacagttcattgcagctttttttttttttttgagacagagtcttgctktattgcccaggctggagtgcagtggcgagatctcagcccactgcaacttctgcttcccaagttcaagcgattctcctgcctcagcctcccgagtagctgggattacaggcatgcaccaccatgcccggctaattttgtatttttagtagagacggggttttaccatgttggctaggctggcctcgaactcctgacctcaggtgatctgcccatctcagccttccaaagtgctgggattacaggtgtgagctacggcaccctgctttattatgtggtttcttaagtatcctcattttggtaaaagaaaaatgtttaccaaagtaactatattgcaggaaaatgccctcactactactatgtgaacacattcaccatcagcattttgrtatttcccttcagtctttctctaatgtacaagtattaagattgcatttttcacttggaactcttcatttttccatatcatgatgttcacctatttcagagaggaacttgatacagatgaatatgaagaaaccaaaaaggaaactctggagcaactaagtgaatttaatgattcactaaagaaaattatgtctggaaatatgactttggtagatgaactaagtggaatgcagctggtaagtataacatataggcgacagaggacagactttgtttttttgtttgttcttgtttttgtttgagatgcattcttactctgtcgcccaggctggagtgcagtggggcagtcttggctcactgcaacctccgcctcccaggttcaagcgattctccttactcagcctcctgaggagctgggattacaggcatgtgccaccatacccagctaattttgtatttttagtagagacggggtttctccatgttggtcaggctggtcttgaactcccaacctcaggtatctgtctgcctyggcctcccaaagtgctgggattacaagcgtgagccactgtgcctggcctttagttttttttttttagagatggggtcttgctacatttccaaggctggtctcaaactcatgggctcaagcaatcctcctgccttggcctcccaaggtgtaacttctagatgagtgtctgtttatgcatacacaacatatccttccagatcttcatttagttgtgtaattgcttccatgacaggaaccagtaaaccttgataaaaattaaggatccgtcaatyagttattgcaatatctgatttgttggactattttggttagtttttgccttcttgtgtttctaggctattcaggcagctatcagccaggcctttaaaaccccagaggtcatcagattgtttgcaaagaaacaaccagrtcagcttcggacaaggttagcagaggtaaaatttctttaaattgatttggttgctgtgtgtttttcatttcctaggccaattcattatgatatcctatggcttaaaaatttgccaggtgatttyagagccacaactaacaattttctgacaaaattagtactttgagcaattatagttgataatgaatgtagagctttaaacaatatacggcagtttaaattgccactgaccacttctacctggactccacctttaatgttttaccatttacttctggagctctaacttaaaatcacattgagaattaattagcagcattgcttgtatgcatgtgtagcctatctcatctaagaatttcaagtatctttgtaaacctgatacttccagaagtctgtttataggcttggatgtaattaagagttaccaaattatttgtaagtatgggcaattcagtagcatagtgattcagagcatggactttggtcagactggctggatttgaatycctgcttcactactgaggtatgtgacaagttttttatgtttttttttttttttgagatggggtcttgttctgttgcccaggctggagggcagtggygcaatctcggttcagtacaacctctgcctctgggttcaagtgattctcttgcctcagcctcctgagtagctgggactacagcaggcacatgccaccacgcctggctaatttttgtatttttagtaraaatggggtttaccatgttgtcaaggctggtcttgaactcctaacctcaagtgatctgcccgcctcagcctcccaaagtgttgggattatagatgggagccactgcgcctagccttttgtttgttttttgtttttttttgttgttgttgtttttgaggcagggtcttactttgtcacccaggctcagtgtagtaatgcaatctcggctcactgtagcctctgtctcctgggctcaagcgtctcccatctcagcccctcaagtatctgggcccacaggcacaacaccaccacaccccactaatttttgtatttttcatagagacagggtttcaccatgttggccaggatagtcttgaactcctgagctcaagcaatccacccacctcagccttccaaagtggtgggattacaggcatgagccactgtacctggcctggacaacttattttattcatcccctttgtgcctaggtttctctgtctgtaaaaacatgacaaagatagtccttacctcttatggttcttatgaggattaaatgaagtaatatgtgtaaaagtactttgaatattcccaatgtgtggtacatgctattagtgtttctggtggaagaggtgatattttactagatgatttactagaactgcatttaacatttctatcatatttgccttggattatatctgtagttctttataatattaatcagctagaggatttttttttaagaagtacgtctgaaaagctatatgtaygtgtrtatatatatatatatatwtwtttttttttttttttttttttgtggtggagtcttgctctgtcacccaggctggagtgcagtggcgctatctcggctcactgcaagctccacctcccgggttcacaccattctccggcctcagcctcctgagtagctgggactacaggcgcctgccaccatgcctggctactttttttgtatttttagtagagacggggtttcaccgtgttagccaggatggtcttggtctcctgacctcgtgatccgcccgcctcgtgatccgcccaaagtgttgagattataggcgtgagccactgcgcctggcctgaaaagctatattttgtatatggaatgtttttcacttaagtaacatatgccttgcattcatacgttttagatggatagagatctgatggtaggaaagctggaaagagacctgtacactcaacagaaagtggagatactaacagctcttaggaaacttggagagaaggtaccagtatttaatatattagttacaaagaaaaagtatgaattatttggtacagaacatcttgatctgtggtctagtttgtggtactaagacattctttttttttttttttttttttctgagacggagttccgctcttgttgcccaggctggagtgcaatggtgcgatctcagctcactgcaacctccccctcctgggttcaagcaattctcctgcctcagcctcctgagtagctgggattacaggtgcccaccactacgcctggctaatttttgtatttttagtagagatggggtttcaccatgttggccaggctggtcttgaactcctgacctcaggtgatccgcccgccacagcctcccaaagtgttgggattacatcggcctcccaaagagctgggattgcaggtgtgagccaccgcacccggccctcccctctaccttttttttttttttttgagacggagttttgcccttgctgtccaggctggagtgcagtgggtcgatctcagcccactgcaacctctgcctcccaggttcaagcaattctactgcctcatcctcctgagtagctgggattacaggcgtgcaccaccacgcccagctgattttttgtatttttaatagaaatggggtttcatcatgttggccaggctggtctcaaactgctgacctcatgtgatccacccccccccccccacgcctcccaaagtgcagggattacaggcgtgagccacggtgcccagcctcctaagacattcttacctggtttctagaaccacctgtaacatttacccactcaactggactttgtttcattttgtttagctgactgcagatgatgaggccttcttgtcagcaaatgcaggtgctatactcagccagtttgagaaagtctctacagaccttggtgagtgccctcatatttctgaaagctggtcgtatactactgtcatatattacatacaaactgatggagagtgtggttgaaataacataataacctttccttgagtttaagagtgaaaccagaattgttttctttataaatccattgtattggttttattccccaatattaaaaataaattaatgcagcctaatgtttttaaaatacttgtcaggtagacgtaactataacagaaaactaaaattatatgcttgaggccaggagttctagaccagcctgggcaacatggtgagaccctttgtcttcaaaattaaaaagcgggaggccaaggccgggtgcggtggctcacacctgtaatcccagcactttgtgaggccgaggcgggcagatcacgaggtcaggagatcgagaccatcctggctaatacagtgaaaccctgtctctacgaaaaacacaaaaaattagctgggtgtggtggtgggcacctgtagtcccagctacttgggaggctgaggcaggagaatggtgtgaacccaggaggcggagcttgcagtgagccgagattgtgccactgcacaccagcctgggcgacagagcgagactcatctcaaataaataaataaatgaataaataaacaaaattaaaaagaaaaaaaattagctagrtgtggtggcatgcacttacagttctagctacttgagaagctgaggcaggaggatcacttgaacccagatatttgaggctgcagtgagccaagatcatgccattgtactccagcctgggtgacagagcaagacctgtctccccgcaaaaaatatttcttctttctttatttttttttttcacagaaatgttttaaaataaattttatggccaggtgcggtggctcaagcctgtaatcccagcactttgggaggctgaagtgggtggatcacctgaggtcaggagttcgagaccagcccggccaacagggtgaaaccctctctaccaaaaacacaaaaattggctgggcatggtggcacgtgcctgtaatcccagctactagggaggctgaggcaaggataattgcttgaacccaggaggtggaagttgcagtgagccgagatcgcaccactgcactccagcctgggcgacaagagcgaaactccatctcaaaaaaataaataaataaataaattaaattttacatattatatttcatagctagaataaggatttataactaataagtccccctttgtagctggattgtttgtgcagagggaaggaaattgggatggcaatgggaacgtgtaggggttaatacactgataatggaggctaattatattttctgttttaatatctatatgatagattttttcccactttaccaggaattgcaactgcacttgaaataatctttttgtttattatgtgtcttttttcttaggctctggagacaaaattcttgctctggcaagttttgaggttgaaaaaacaaaaaaatgacatggtgcagaagcttgtaacattgatcacattcttaatgtaaatggtgtctttcttctggggttttcagttattgcaaagaaatgaagagattctggaaatgcatcaataacctaagaaaaagcgacataaaaatatacttatggcttgtgtttatgctcttcatcattgtgcgttgtgtgcggttacctgcttgagtgatcctgaacttgttgcgacagagggactcactggactctgttcgttatgatttgtctgtttaagagagaaaacaaagtggacttgatttttattaaggctgtttgtttttaagtgttgatagtgaacgaaaagatgtgaagtaakgatatttttctgcttacaacttatccccactcattggagtgaacagtgacgcaagctcaatagacttcataagtgttcatagaattttacaattctgagtgatcttagaaatcatttctgtttttacaaacaaggaaactgaggtccagaaagagcaagcgactttgcttaaagtcgcatcagagagctgagggtaagactcaggtgtcctgactcccagtttagtatcttttgaattttatttctgtaccatttaaaaaaaataattaacactatttgtgcaagtcagtgtttttgaaaattcagtgtcccaataaaaagtggactgcacactaagggaccatcccccagcctgtaagctgtctgtattaatggggcccgttgtatctcggaattttgaggttggaacaatgggagccctgttgagcgtttcctaaagtgacttagccgcctgcgttgtttgaccagggaagcaacaggaaatggcagctagaggccctccctgtgcgtgacctcttgtcacactcagaggggggtaactgtcagctgttatctactcttcaggttttggagaaacacaaaataagttatgaggaaaagcaaatttctctcctgagtatttacatgtctctgtatgctcaaatatgcagatgtgtccctatgcgtgtatattagcttattttttaggctctagccattttatattctttcatgtgcttctcaatattctttttctttgcactttatacaaattaaaagcatttttaaagcttcttctgtactgtaaactactaggtgctttgccaaccagacagattagaggacctccgctacactgatgccttatttggaacttaaaagaggtgaaattcatatatcataaaattcaccattttaaagtgtaccattcgttggcagaacatttacagtggtgtgcaaccatcactactctctagttgcagaacattcttatcacccccaaaggaggccctatacctattaagcagttagtccccattcccttctcctccgactgctaacaatagccactaatctgcaccctgtctctgtggatttacctattctggatatttcatataaatggaatcatatgatatgtgacctttttatgtatctggcttctttcacttagcataatattttcttttctttttttttttttttttgagacagagttttactcttattgcccaggctggagtgcaatggcgcaatctcaacctccgcctcccaggttcaagagattctcctgcctcagcttcccaagtagctgggattactagtgtgtaccaccacgcccagctaatttttgtacctttagtatagagacagggtttcaccatgttggcccagctggtcctgagctgacctcaggtgatccaactgcctcggcctcccaaagtgctgggattataggtgtgagctaccacaccgggacatcatcatattttcaagtttaaccaacattatagcatgtatcagtactttattcctttttatggctaaataatattccattgtatggatatcatattttgtttatccggtatctgttgatgatttgggttgtttccttcttttggctattgtgaataatgcttcagtgaacatttgtgtacaaatatttgtttgaatacctgttttcaatttttttgggtgtacacctaggaatggaattgctgcgtttgttgttgtgttgttgttgttgtcgttgttttttgagatggagtttcactctgttgcccaggctggagtgcaatggcgtgatctcggctcaccacaacttctgcttcccaggttcaagtgattctcctgcctcagcctcccgagtagctgggattaaggcatgcgccaccacacctggctaattttgtgtttttagtagagatggggtttctccatgttggtcaggctggtctcgaactcctgaccttaggtgatccacccgcctcaacctcccagagtgctgggatgattacaggcatgagccaccatacccggcctgagccaccacacccagcctacgtttgttttttaagccatagaagattcttcccaccagtcgggcacagtggctcacacctgtaatcccagcacttcaggaggccaaggcgggcggatcacaagatcaggagctcaagaccagcctggccaacacagtgaaactccatctctacaaaaattagccaggcatagtggcaggtgcctgtagtctcagctacttgggagactgaggcaggagaatcacttgaacctgggaggcagaggtttcggtgagccgagatggcgccactgcactccagcctgggcgacagactgagacacggtctcaaaaaaaaaaaaaaaaaaaaaaagaggaagaagattcttcccttaccctgcaatagtagaccagaaaaattaggaatatcttgaatttgaaagggacctaatgcctggcacagtggctcacgcatgtaatctcagaactctgggaggcagaggtgggcggatcgcctgaactcaggatttgagaccagcctggccaacatggtgaaaccctgtctctaaaaaaaaaaaaaaaattagccaggcgtgatggcatgcacttgtggtcccagctactcaggaagctgaggtcagaggatcacctgaacctgggaagcagaggttgcagtgaactgagatcacgccactgtactggctgacaaagtgagacccctgtctaaaaaaaagataaagagagttacctgaatctggaatccttaatcttggttttccttaaactttctataagtccagcatctgaaatattttgtcaattatcacattaatgtgttcattttgtaagtaagagtactcaatttaaaatgatcttactttaaaagtggcctagtttgcagtgcccagcaggacactgacagtcacagctgtgtgactttttgtgggttacttaatttttttgagcctccttttctcttctattcaatgaggataatagggcctacctcataggattattatgcattcccctctgttaatgcacgtaaagtttttacttggaaaactaactcaccatttaacaaccattctaagcaccataggatatattttgtttcacaaatttggtattcattcagaataagtatttgaaaagtgagtaaattctatgcaattatagttattaaatgacttataaactgtgtttctcttccacttcttgctacatttaatcttctaggtgttcagatatctttggagattataggcagcaataaagctaaggcagctaacctttcaacattcttgtgtcaggctaatattttggtgaaaggaattcttgtgtttctcaaagaactagagctgaagcagaaataagttccaatgagcaagtgtccaattggaccattgaatgaaatctagtgttttaaacaattctgatgtttcaatgttttgttctgttttcttttgatcttgtgagcagtaagacatattttatgtgggtggtaaaggaagaaatcaagtaacagaatgaggaattgttcccaggaagagttagagttgggacaaatgggttgttaactttgatttttagatcttctctgaagacattaaacatggaatggtcatctttagaaaaataaaagactatgcaactccaccactgaaatggtatcttattacagtgaatgatggataatctgaaattactatagaaaaaaataaacccagaccattttgcctagagcctttcaaccacctttctgtccacgtttttcttttttattctatttattgctaagaccagtgaatgttcttctttgccttccaaaatgttttccagcattagtatgtaaattaaaactgtcggcagggcgccgtggctcacacctgtaatcccagcactttgggaggcggaggcgggcagatcataagatcgagaccatcctggctaacatggtgaaaccttgtctctactgaaaatacaaaaaattagctgggcgtggtggcgggcgcctgtagtcccagctactcaggaggctgaggcaggagaatggcgtgaacccgggaggcggagcttgcagtgagccgagattgcacaactgcactccagcctgggcaacagagcaagactccatctcaaaaaaaaaaaaaaaaaaaaaaaaggcatgagtggtggctcatgcctgtaatcccagcactttggtaggccaaggtgggcagatcacaaggtcaggagttcaagaccagcctggccaatatggtgaaaccctgtctctactaaagatacaaaagttatccaggtgtggtggcgtgtgcctgtaatcccagctactcaggaggctgaggcaggagaatcacttgaacctgggaggcagaggttgtagtgagccaagatcttgtcactgcattccagcctgggcgacagaggagactctgtctcaaaaaaaaagagttcacaatggaaagtcgatactgttgaagagcttcagcaaagttgagaggtctgaggctgtcaactggaagcttcctaaatgcttggttatttttctaccagaaaatcacactgcttattgcttacagcctcaggcagttgaatacaattaaaaataaaccagcaaaaatatcatttattataaaagaagtcaaggagagccatcaagtttttctgtgtgtttgttttttagagtgaagataatgctggtaagggttttttgtttgtttgcttgtttgtttttgagacggagtttcgttcttgttgcccaggctggagtgcaatggcccgatctcggcttgccgcagggttcaagcaattctcctgcctcagcctcctgagtagctgggattacaggcatgcgccaccatgtccagctaatttttttttttttttttttgtatttttagtagagatggggtttctgcatgttggccaggctggtctcaaagtcccgacctcaggtgatctgcccacctcggcctcccaaagtgctggggttacaggcgtgagccactgcgcccggtggtaagggttatttctaagatgatacatcagccacagatcctctgcctcagcctctggcgactgtaactgaattttgaagccccccctgcaaaacctcctgctgagctgtgttacagttatgacttggtttgagagtttctgctaccttgtctatttcctgtaaaacatcgtagcaggtcaggtactgttttttggtcactactaaattgtcatattacacgaggctattctttactactaaaggagcttaattttgttgttgttgttttttccccaacattattccttcaatactcattaaccaggccagattgaaaacagagccagcctgagcaatgtggcggaatgccatctctacaaaaaaacacaaaaattaggccgggcacggtggttcacgcctataatcccagtactttgggaggtggaggtgggcggatcacaaggtcaggagatggagactatcctggctaacacggtgaaaccccatctctagtaaaaatacaaaaaattagctgggcatggtggcatgcgcctgtagtcccagctatttgggaggctgaggcaggagaatcgcttgaacccgggaggcggaggttgcagtgagctgagatcgcgccactgcactccagcctgggtgacagagcaagactccgtctcaaaaaaataaataaataaataaaataaaataatatggatattggatagagccttttttttccccaaataagacaattaagtgttttattgttaatacatttagatatatagcggcatccctgtagaggtttgttttacagtgagaaagttgtgttttaagttgacccaacaatgaaaaacaactattggctgggcacagtggctcatgcctgtaatcccagcactttgggaggccgaggcgggtggatcacgagatcaggagttcgagaccagcctggccaagatgggggaaccccgggtctactaaaaatacaaaaaattagctgggcatggtggcaggcacctgtaatcccagcactttgggaggctgaggtgggtggatcacctgaagtcagcagtttgagaccagcctggccaacatggtgaaaccccatctctacaaaaatacaaaaattagccgggcgtggtggctcatgcctgtaatcccggctactcgggaggctgaggcgggagaatcgcttgaacctgggaggcagaggtcgcagtgagccaagattgtgccattacactccagcctgggtgacagagcaagactctgtctcaaaaaatatatataaatataaataaaagcaatataatgctacttcacaaaatatttaaaatatttttttctctttttttcttgacccaatgctagcagaaaagcataaatcttaaaatatgcatttcaaaaattctatactatacttgggaggctgaggcagaaggactgcttgagccctagagttctagtccagcctaggcattatagtgagaccccatctcttaaaaaaaaaaaaaaaaaaaaaaaaagaagcattgggccaggtgcggtggctcatgcctgtgatcccagcactttgggaggctgacgcaggctgatcacctaaggtcaggagttcgagatcagcctggccaacatggcgaaaccctgtctctactgaaaccacaaaaattagctgggcgtggtggcaggtgcctgtaatcccagctactcaggaggct

SEQ ID NO: 96873 - DNA, 17923 bp, Homo sapiens
tctcatctgctgaccctgttctttcattatttatcggcgcctttcttggctatgaaaagcaggtgtggacagcctccctgcagagtgagcaggttaccattgaacatctaaaacccccacagggcaccacgggcaggaaccacctttcttctctcccttaaaagtcctaaaagggctggatccagtggttcacgtctgttatcccaacactttgggaggctgaggagggaggatcgcttgagctcaggaagtcaagaccaacctgggtctcacagacagacactgtcactaaaaaaaactttttttttaattagccgggtgtggggattccgttccaacatggctgaataggaacagctccgggctgcagctcccagcgtgattgacgcagaagacggcgatttctgcatttccaactgaggtgcctggttcatcctactgggactggttggacagtgagtgcagcccatggagggtgagccgaagcagggtggggcatcgcctcactcaggaagtgcgaggggttgggggatttccctttcctagccaagggaagccgtgacagactgcacctggaaaatcaggacactcccgcccaaatagtgcgcttttccaacggtcttagctaacgacacaccaggagattatatcccgggcctggctcggagggtctcatgcccacggagccttgctcactgctagcacagcagtctgagatccacctgcgaggtggcagcctgcctggggaggggcgtccgccattgctgaggcttgagtaggtaaacaaagcggcagggaagctcgaaccgggcagagcccaccgcagctctgcaaagcctgctgcctctgtagaccccacctctaggagcagggaatagctgaacaaaaggcagcagaaacttcggcagacttaaacgtccccgtctgacagctctgaagagagcagtggttctcccggcacagtgtttgagctctgagaacggacacattgcctcctcaagtgggtccctgacccccgtgtagcctaactgggagatacttcccagtaggggcccactgacacctcatacaggcaggtgcccctctgggacaaagcttccagaagaaggatcaggcagcaatatttactattctgcaatagttgctgttctgcagcctccactggtgatacccaggcaaacagggtctggagtggaccttcagcaaactccaacagacctgcagctgagggacctgactcttataaggaaaattaacaaacagaaaggaatagcatcaacatcaacaaaaaggacatctacgccaaaaccccatctttaggccaccagcatcaaagaccaaaggcagataaaaccacaaagatggggagaaaccagagcagaaaagctgaaaattctaaaaaccagagcacctcttctcctccaaaggatcgcagctcctcgccagcaagggaacaaagctggacagagaatgactctgacgagctgacagaagtaggcttcagaaagtcggtaataaccaacttctccgaactagaggaagatgtttgaatccatggtaaggaagctaaaaaccttgaaaaaagatgagacgaatggctaactagaatcaacagtgtagagaagaccttagatgacctgatggagctgaaaaccatggcaccagaactacgtgacgcatgcacaagcttcagtagccgattcgatctagtggaagaaagggtatcagtgattgaagatcaaattaattagccgagtgtggtgatgggcggctataatcccagctactcaggaggctgaggcaggaaaattgcttgagcccagtagtttgaggctgcagtgagctgtgatcgagctactgcactccagcctgggtgacagagccagaccttgtctcaaaaaaaaagtcctggctgggtgtggtggctcatgcctgtaatcccagcactttgggaggctgaggcaggcagatcacctgaggtcaggagtttgaggccagactggccaatatggtgaaaccccgtctccactagaaatacaaaaattagctgggcacggtggtgggagcctgtagtcccagctactcgggaggctgaggcaggagaattgcttgaacctgggagacggaggttgcagtgagctgagatcacaccactgcaatccagcctgggtgaccagagtgagactccatctcaaaaaaaaaaaaaaaaaaaaaaaaggcctaaaagcccccaaatgattgtccacgttcagcgagcacagctgtgagccatggatcagtatccttcagaatttcagagttttaagaaacgcagtttccattcctactggttgctatgggattattatgaagacgagcaggccagtgcttgtctgtttcaaacgaggggcactgagcaaccctccccggactctggtggctcgacgaggctgctgtggcaacaggagctggcctgggtggccctgactctccacttcctctgtggtcagggctgaccctccttaaccctattttccaaataaggagtggagacacagagtgctgctcgccctgggaggcaggagctgtgtgtgggccagagtggaacttgtcactgggtctcacctgtctccaaggccccagaagccctggagagcagagtgggccacgcaggtttcctcactcacgcagcaggtgcccagggtactacgaagccaggccgcgctggaccgtgggtcagtgaaaggccagggcagggcagccctggggagtgcaggtagacccgtccttgcccggctcagctccccctggacaggtgggggctcttgccagctgctctcacccctgagtcccagcttccccttctggtcccgactctgggggcaatggttctctcccgggtcagtgtgaccagttggagagtggcttctggccatgaggggtgcaataagctagttttggggacaacccttttctgaaactgcacttgcttagacgaaaggggggcccaggccccccactgcccagccacagaggactggatagggggagactgggctggaggcagccggtccctggagggccatgctccaaaatctgaacttgagacatgcacactcgtcctcaagtggtgctgggcccagagctgtgggtcatcaagccatcccatgtcatgccagaggccgaatgacctgttgcaggttcagacgccagcgccctggcagaaacaaccggtctgcagtgcaggaagaggtgtggacagggctgcggaggaagccccggactccaaggagagaagacagcctgtgaggacccccttgcaccctgggccacgtcagggcacctcggggctccactgtgagcttctgtggctctcacctgccagcatccctgccctgtcctggcagctgcaccatgggcccttcagggaaccccctctctgctgggtccaggcagatgagatgatcaggggcagtctcccttctggggtaggcccgaggctccgaggcctgggctggacaggtcagcatgtgcccctcccccagtgtgcttggcgcagggctgagacccacatcacgctaacatgacacgggcagagccaacctcccactgggtctgctgactgcaggggtgacttggagtcacctaggaccatcacaggctgagtgaggatgtggccagttcagaggcagcagagccacgaaaggggaaactcgccaggcggccctggtctgtcgactcaggagggccagggaatccccactgttgcttgtcactttgacttcatcttctgctgtctgcatcagaaagtccttacaagtacacctaccggccaggacacagctcctctggggttctttaggcgtcagctgccaaacgaccccacaagccacacagtggaggccacagaacaggtgcccaggtgggcggggcttcctgtcaccctcccccacatgtgccccggtggccacaccccacccctccaccctgcacggcctgaacccttgctgtcctatggaaacgtagggtgagtccacatgcaattccctatttaccgggagccacattagaaaagcagaagtaggtgaaatacagactaactttatattttatttaacccaacataaccaaaatattatttcgacaagtcttcaacataaaaaattattcatgagctgccccgcctcacccctctgtcctctgagaaagtcaggaaaagcagaaacttaacagggaggcttcacctgcagagcccagctcatccagcgaagctatgctggcccagaaggagttacacaatgaaaagaagaaattctgaaacaaagtatctacactggcccagaggaacttcaaaagtgaaaggatgaaattctgaagcaaagtatctttaggagggagatgccactcagtgcagagaaaggcccggctactgctgtcaggacacggacccctgggcgctggagagcgtgctctggaaagcagtcactgcacacaaataagacatatgagatggaaaagcagctgcccaggactgtcggctgtcacccctgggtggggaaattatgggtggtgtctgttatcttttcaagtatatctttatgttaaaaaaccattaatttaataaaattgttaagtgagatattttacattatttttctttcaccaagtcttctaaatctgtgtattttacactaccagcaccttccaattccgacagccacgactgcccagcccttgggtgtggcccgtggcccccactggtcagcacaggtgggtctgaaggcacctgtcagggtctctgctggtcggagccagcacacaggggctgagcgacaccgacggcccaaaactgtctggtactcggtgtcgtcccagtcctcacacacaacgtgagcacggcgggacaggtgtaaccccccaggtgtggcagctgaggttcaagaatggaagtgacccccaagcttggagacagtagggtttcaacccaggtgtgtctggggtcctgcacggtgacccatgccccaggcaggctcattcctgagtctccaggtggctcccacaaggagttagggaaggaggcctccaggctggctgtgacccctgaccccgcacttgcccaccaggagacattccagcctttcagttcttcagaccttagggacacctgaccttcgctcagcattctccagaggacagagacagccgtcaggtaagactggagcccagcggggggacccggcggcccgaggtggcgggagtgattcctagggcgacgcagctctcaggcagggcggcaggagcagcctcttcctccctttggggaggccacgctgcgcgcccacctttcccaagagtagagggcgggaaaggtcagacgggggaggcagggcccggtagcacgccggccacccacctgccagggaggacgctgtcccggtcatgcagcacagtggcagcgcgtgtggtgatcggtgaccgccgagaccccacgcctggaccccgcggccactccccgaggggcctccccctccccgcacggggataccccccgtcccctccccctcctcctcaccgagcggggcctccccccttccccaaggggcctccctcacctctccccccaccccgcccgcccttcccccacctcgctcctccctccatccgcccctcccctccccgccccaccccggccctgccccgtcccaccgcccgcactcacgtcgtccatgagcaggagcaggatgttggggggctgcggggcgcccgaggcccccatccccgcggcgctgagcaccagcaacagctgccaccacctcgtcgccgcgacaaccgccgccatggcaaccacgggagccgcggagccccggccagcgagccgacctagcgagcgtccgccggcccttccggctgggctgcggggcggggcctggacggccacgtgactcgcggggcggggccagagtccgcggagggacgggaggcggggcctggactgcctcgtgaccagtggggcggggcctgagccagctgtgtgcggatggggcggggctttggaggccgcgtgaccagcggcgggtcacgtgacgcggtgcctggcgccgagcctcccaagatggcggtgtgcatcgcggtgattgccaaggaggtgcgtacgcgcggcgtggggcgtccgggctcgcaccatcctcggctctccgctttctttctacttcttccctgggcytagaaggcaccttaggaaatgggayctggaggaggccttcgccgagctccagcggtcaggggcttcgcggtggacgagccgccaggcagaccctgactgagaccccagttccgcgctcgcccgtcccgctgctgaacgcacccctcggcgcagcaggtctcctccccgccaggacccaccagaaacctaggtggtcccgggcactacctccgtcctccgtcctcagcaggttctgcccgttctcccgtccagcgctggttccccgcggacggcggccccggscctcctgccagtctccccggagccgagttaaaaacaaatcggatcctgtcacgcctctgcctgagacctctgcagtggcttctcgttgccttaggatgctgtctgaataacctgctctgggatcctttccccccataacccttggcactctccgctccaaccaaacaattctgcagctccctggacatgctctgccctctcacctstgggcctttgcacgcggaacacctctccccagctcccatcctctttactggcccacatacatttcaactggaaagcattttctgaaggctaagactgagctgggtggctgcccacacgctcctgctgcacggagccttcatttcctagccagggtctcccgagaccagactcgagaccgctccctgctgggcggtggctgctgctaagctgctcatgggcttccctcttggccaagatgatcatttgcttgtttgtgggtttattgactaggtatcactccccacgagggtagcgaggactcttgttcactgtatttstgcaggacccagtgctgaacacacacagggtaaatggtggtgtgtgaaagaccgagaaagaagctgttaattctgggcttccaatggtcagaaatgcagagatgaagggaatttgagctgagtcttgaagggtttagtaaaagggtcactgtcaaggtgaagaaaagccagtattgagggtgctgtatttgggtgagccatgcagagttagaggtgggctgaggcagagtggcctccaggagaaggtgagaggcgtgcccaggtgccaggcttgatcggcaggctgtgctcaggcccatttttctgattcattttttcttttccgcccaccctactgctgctgctttgcaaacaacacataaatctccttaggttagctgggatcccctgaaggcagtgcccactgcggcatagagaatgaagcggtgggccttagagcatgggaatgcgttccccgggtggctgcaggtcacggctctgcagcatagttcagagctggtgtgcgctgggtggagtcttgtcctttcagtcgccgtcatcctttcttgcagaattaccccctctacattcgcagcacccctacggagaacgagctgaagttccactacatggtgcacacatctctggacgtggtggatgagaagatctccgcaatggggaaggccctggtcgaccagagggagctgtacctgggcctgctctaccccacggaggactacaaggtgtatctttcagggcagggtgtgtgtcagggaggacctacagttgcaagatgtactttaggatcagataacttgaaaccttttagaagaaaaagaggtgagagtttttagccagccagggaattagggtagcttgaggtgaatgaaggcctgtaactcttctctttcattggaagagcyatttgggaaaagcaaggctagaattccccgtagaatgttttggtttgcacgtgtccgttgtctggtttgcagaggaagtgggacacttctgctttgtacctgcaaggatttctttctgtgcttttcagggggagccaccacctttgagcaggggataatagtttcatttatttcattaggccttgcctcktatgtcactagacactcgtctagtcccttgggacaaatcacttgaggccatggaattcaaagaccttcccaaaagtcatmatgtagcctgtccatggtgacatttgctagtagccactattttacaaaataatgtggcctctagagaggggatccgccttgttcacgaagcctctggttttgcagttaactttccgggccaggcattgattcatgaagagggtgaggtgttccagacagacagactcggagtctaggtggttcggctcctggagtgtgaactgggtaaggcttggctgcctgctcttcgcttctcctgcaaacaccagaygtcgccctagcaaagtatttaggcttgtacccagcacggccactgcaggaccagcccagcatrggcatttcctgtgattcaaggttgccacrtttctccaaagtgagggcccacagagggccctccacyggcartccctgtgttacgagtgccttccctaaccagctgtgcagatacggctacgtcaccaaytccaaggtgaagtttgtcatggtggtagattcctccaacacagcccttcgagacaacgaaattcgcagcgtaagtcagggagttagagggccacgcccgagtgggtgttttgtttttcctttttgactttgttttgaaatgctgagaaactaaaaatctggcagtggctgtgtgtatgtggcaaggtcatggtttgctgggtctttttcagatgttccggaagctacacaactcctacacagacgtgatgtgcaaccccttctacaacccgggggaccgcatccagtccaggtgggccctactttctgtgtcttgccaccttctttctgtaggacatgccttgccattttggttgccaaaatgcaaccatttggaaaataagggaggaaagatctttttaagctatgagcaccatccccctagggcagaggttttaaagccacaaagccccgtttctccacaccaactcttacacagatctccagcgcataaagtggatagagtgtgtgtggtgtggggagtagagcttgcccatttggcttcccaggtgtgcccagtgggtacctggggcacctgcaggactcagggccaagcacatgggcagtggctttcagggatcacacgtccttttgtagctacctgatcttttatgttgaatttggaacagtcaggaacctggtttgcaggtgtcttccgaatagtccacaaagtaaacagatttaacttttgaacatcatgagggaaatgtggggtccatgcccacattccagacttgctttcagtgagtccccagttccaagacataattccctgtggttggcagggaagaggacgctgcagtgatycaaggcaggcccctccctccaccaggacactgtcttggggccatcctggtcccagatgggagcaggcaggcgaatgtccacagtcttgcctcctgggctgcacagggccatccttgccacaccaccgctctgcctgcccatgctgctccctcctccaccccttcctggggccttgggaggctgcacagggaacttggaggcagcagatgggttctcagtgcccggtggggtgggactcctgtcctggcctctcagcrgagttcacatttctggaccctggagaaggycccgagcatcctgtggatggagccatgctgcccggcccgtctctgagcagaggggtggagggcctggctctcctctgagtgggtctgtttctcttagcagggcctttgataacatggtgacgtcgatgatgatacaggtgtgctgagtgagctgtgctgccagccatcgcaraggagcccgcgcacgaytgtggtggggccgtcggtctgttctggttgcctcttcctgaatgggacgccyggggctttcagggcaggcagctgtgcatgttctctcaactaaaggtcttgtgagaggagatttggctttttccttccgtgtcagccaaggatttaattaagaagaattcaactaaggacttttctggggtgtgggcagaggtttgggatcagatggcgcaggtagcctgtcctcagttgtcccaaaggggcagaggcaggggtgcctggagccaagagttcctgagcctgcaggacctgtgaccatgtgggtcacccactggctgaacaggtgggctggtctggagggggtggcctcctgagcccagaaccagcctaggatctaggggcacaaggggagccggcgtggcttcccacaggggagggccctcctctttctggacttggcctccattctttgcatctggctcaatgtctggattccgcccggccttaaaaggagcccttgtgaaacctgggaagcctcgtggccccgcggcgttggctcagctgcagccctggtcctaaaccttggagcgcagacttgaggcaccccctcctgcctgttggtgctgagggggttgggtgctgtgtcacttgatgacgtggctgactaccacccagggcagcggccgagcccatagtggcgtcagtgccgccggcgtccttggggtccagcggtcaaggctcagcccgctgaggggacccccccggagttggttccagcactggtccaggactggagagtttctcaaggaccttgaggaccccagaagcccttgcagcaggaaaggctgtaagggggggtcagcctagggcaggacctagggaggggaactttcttgatacrtatttgccttttcatcccatctagcaagcacagtgttaattttagaaattatagaagaaaaaatcagcaaggagtgtgggaaaactgcatgccccaggcctcccccgccccagggtgaattggaagycctggaatgggccgaggcacaccaggcagctgatctgggtgcatgtgggccacagaccactctcacaaggttaaatctttaacaagagcctcatgtttgttaggagaaggtgggaccccagcccaagcacttccccattgcagcctggcatgaaatctttgccttttagtggggatcactcctgcccgagtcctggctgtggtggggactctgcaagttgctaacccagcgtccattctctttcctccgtactaacagaaccccggtgcctctgcccagttccaatagcgggcagacgagagccatgtcctgggctcccttgcagcccggggtgtgcagctgtggcgtggaggtgggtggtgctgggagagacttgcagggaagctcctgtgaaggggactcagctgccacatgcaggacccttcccctttgccttcttcctgcctggaacatggatgtgatggctggtgctgggacagctgtcctgagagcgtgaggaaagggtcacaccctaaggacagtggagcagaacacaggaaggaccctgggcctttgctgacgcagaacgcgggaaggaccctgggcctttgctgacataccagccccagactacttaaattcagctttttttttaatgtgagaaaataaatgcacccctctctggtttaagccactgatttttgggttttctgttaggtgcagccagacccacctgtaagtactttttacatgagggcgttttcacaagccttgttaggcagcatccccattttaagcccaaggaaacagtgcctgatgaggcgctgttagtcgtggaatgctggagtcaggtgtgtgcacataagcagccttgggcttctgcggccgtgcatgcagccagggagcccgactggctgtgctttcagaggggacagtcgtcaaagtgcccaggacagagacctccacttctgcttcctgagcttctgacaagggccagcgtcccgggtgtctgtgtcacttggtgggggacatgtggcagggttacgaggtgtgggggcaccttgacaggcagttgcagcccaccaggctggcagtggcattgacaccgcctcagcctgtgcacgctgcccgcttgctgtcagtcgcgaggggtctggagccctgtcctcatcccacagccacggctcgccagccgccttctgtgtcccgtcccacggggagacgcggagggaaccgcgcgccccgtcccacggggagacgcggagggaaccgcgtgtcccgtcccagggagagatgcaaagggaactgtgtccatggggggaatgcacaggagtgctgctgccatttgcttttaaaaagagcccaagtttaataatttatgcttcaccattaagacacacgtttctatttttcttaaaatgacttagttgaagagctgagcatgccaaccccaagctggcctggcactgcctgggactctgctcctcccctccctcaacacccagagccccgcagatccccgtggggcccatgccaggctcaccaccgggccgtggctgtgactcgtggctgtggccttgggtctggaccaccatacaaggccctactgggccatccccccgccaagagggggccagtggctgctctggacacccctctcctctggcctcgcccccgcgccactccctgccccagccccaggatggagcacaagtggtttactcctgatccaggccccagcccctctctcaaaatcgggtcttccctttaatacggtgaaaaccatggtgagaattttccacgggccctgcacggagagagaacacacactgagtggccttccagaggagaaggggtggtggcccagggccccgggggacaacaggataaggatgcagggaggtcacctggctgctcaggcaatgccccaggggcctttctggtgactcccagctgctctcttgggagggtcccacgaaaaggaaaggcagtgccaggagagccccttggggcagctgtagcccaccctggggcctttgtgggaacaagaaggggtcacctctcccagcagagaggctacaaaaagcgccccccccaccagctgatgcagcagccacagccctcacccaggccccgccaggtacattcctgcagccccatgaggaacgagctcagggaccccctcctgcccctgatgccctccaccatggccctcgcccccaggctgcccccacaggcacccactcaccggttctgcccttgtggtctgagccggggcctgccctggaggccgctgtgggggaagggtgcccccctggagcctgggtgtcctcgaaggcccccgcggtctgtggagctgatcccagggaagttggttcttttcggcagcacctggagcaaaggcctgttttgagtcctcctcaaggagcagccgagacccagctcacagcccccgcagcccccaccaccccggagcatggggtcctgcccggctcaggataccattcgggcctacagggttccctgcctttgcctaccatagctgtcatatgacaccccgtcacggccagcacccctgcagaggggggggtcacggccagcacccctgcagaggggggggtcacggccagcacccctgcagagggggctcccgcccgagaggggacacttccccaccatgccactggcagaccaaacccagcttcaggtccgagggtcccgccacatcctgtccaggcccagccaagcaccgtgcctgagacacgctgtgcagagaggagccagctggggctgctgtgtgtcccagggccagtgggccagcccctctgcgctcatgttcctggacctggggagcaccggcgcaccttgatgacccggccccggaagaggctctggtccagctccacggcggcctgcacggagcccttggtggcaaactctatgtaggcataactgaggggaggggcagggaggggaggggtgaggctgggccctgtccgcatggccagtgcccccaccaggccccacactgaccccttggggtgtccagagaacttgtcacacaggatcgtgactcggtggacctccccacagcggctgaagtgggcctccagctcctcggcggagcccccgtagtccacctgcacccaggcccagaccagcatgtgagggagacgcctggccctgactcggggccttcttgttagaggtgaggaaagaaaccccaaggctgggccccgtggcggggatggccccaggcctccaccccacacccccgctggggttggagggaagagaggaaaggatatctcgtatggagcgcttccttctggagagctggagccttttaaaaagcttctcaaaagtggagatttcatgtgcaaccccgaattccagctcatgttgaaaaactggaatatgtgcccaggccagtgtttcctcaaggtgacggggctgcccccagggtcagacccccttcccagcaaggctgcctggcccatggccgggcgccagaccctctggtagagatggggccccattcgctgcctgccccttcaccccgcccaccactcacgttgcccacgtagacggatctgtggtcagcctccaccttctcctcgggggtcccagagagggggcagcctgcggagaacacagctcaggcccgcaggcccttggttccttcctcactcctctcacggggaaggtcgcccaggcttataggggaggtgacaccttggagcctgccaggcccaaccttaatggaaactgtgggacccttgctcagtggggggcggcctgtgcccttggttcctacccacggtctcagggctcagcagctgcccggccgcggtgccctcctcttcctcggcctgttgctgcactcctggaggccgtggcgtcccctcggcctgctccatggcacacaccttcatcttgatggcctccagctcctgccgacacacggccctgagccgggcaggcagcctgcaggctctgctcaaggaaggtgggtgtgtggcctgccagctccagcagagggtcacagccccaaggggcagcccttctctggacagggacactccttcctggggcagctggctggggatgaactcgcccctgcagagaagcccccgaaaccgcacctcaagggcccttccccaggcgagagaggccaccttgaccctgcagtctgtgtggctgggggcggggggtctccttgccaccttcgtccaggcaggtgggcaatggccctctcccctcctaagtcagctgcagccatccgtcacccagaccccgtgtctccaccagcccctgtgccccaggtcccctgagatccccagggcctccacacagctgttacctggtcaggcaatgggcactcagccaggttctcttgctccagcagagacagcagaaagcctgcatccccatcctggtcttcctctgcatcctcttcctcctctttctcctccttcccttccccaccctctggccccagaatctccttggtctcgttccaggccccccagccctgggcctcagggtctgaggagaccgtctggagccaggcctgagtcgggggtgggaagagagagcggctcgggaagggccacatggtagaggggcaggaggaaggtgggccaggcgaggcctcccctccactcccctcgcgtccgcacctgcccaggctctcctggagttttaagccctcccctgaggccagctgctcccactagagcatttgcaaaggctgagtggggctgagcttccagccttggctcccggccccgccccttccctgtcactcggacaggtacctccaggacactctccctggaggaaggagaggctgagttgagtgggggtcaccggtctcttctgcttccgcctggccacgctgtggctcactggagccttggtctgtgacagggttcacacctcagcagcatccacacggcacgaacgccacactgcatgaacactcgatctaagtgggaacacgggagtggtttcttctagtaccagggaccaagcaggctggagaggtggcttccgaccaggagaggcagggcctgagcagagaccgagagcaggtgcatgggatgagagggccgaggcaggttggggcggggtcctgggcccagaggaggggcagcaacagctgtctctgcatcctgacccccatggagtccccagggacccttgcctccctaacccttattctgggccttttttttttttttcttttttttttaggcaggagtcttgctttgttgccaagtctggagtgcggtggcgcgatctcggctcacggcaacctttgcctcccaggttcgggtgattctcctgcctcagcctcctgagtagctgggattacaggcacctgccaccatgcccagctaattttttttgtctttttagtagagacagggtttcaccatgttgcccaggctggtctcgaactcctgacctcaggtgatccgcccgactcggcctcccgaagtgctgggattacaggcgtgagcaccgcacctggtctgggtcatcttttaggtgggagccacttccatgaggccagaattattctgctgtggggcgggggctccgtggggagtgacggcgtgagttattgtggggcggggtctccgtggggagtgacggcgtgagttactgtggcggaattcagtgggcatccggtggtgtctgcacctggcttcacccatgcagggttgcagcaggaggtgacccgtgtccgcccttgcgcctccctctgcacctgccaccgcggctgctggagtctgctctggccttcatctccagtgctgccgtctcccacccactctgtgaaggactcggggccagggggtcatgcatggctcttacccctgccattggtggtgggagacggggccccctgcacagctcctacccccaggccgaggccatcctctctgtgactgcaccccggtgtttagccagtggggctgggattcctgggaatttgggactgggggaggagagagagacagggcgtggcctaggctggagctgcactgctgcaccatgcaccacccacgcagggcggcccttcctccatcttgggctgggggctcggggagcaggtggacatggaggctgccacagcctgggaacccaggctcctgcacccagtctgttctcacctctgtaaaagccagaaggtgtctgagatgggtctcaatcaatcagtttagaggtgtatcttgccaaggttaagggtgcacccaggaaaaagaaacacgaagccacaggcaacatctgtgctctgctttttccaaagagggtttggaggccgggcatggtggctcacgcctataatcccagcagtctgggaggccgaggtgagcggatcacttaaggtcaggagttcaaaaccagcctggccaacatggtgaaaccctgtctctactaaaaatacaaaaacaattagccaggcatggtggcgggcgcctgtaatcccagatacttgggaggctgaggcaggagaatcacttgaacccgggaggcagaggttgcagtgagccgagatcgcgccactgcactccggcctgggcgacggagtgagactgtctcaaaaaacaaaaacaaaaaaacccaaagagggtttggagacttttatacttaaagggaaagagcgggcaggaggggaacacaggaaggaaagaaaagggagggcggataaaaggcaagtggtagcgttcctttgaatctctgattggcagtcaccaaatgcacattttgaaatgtggaaggtgggggtagagaagagaattacgtagccccacgctcagcgactctgcgtttccacagaagataaaactgccacagggaataggaagctggcaggttcgcattcgcctccggtgagcggagggtaacgttagctctgtcctttgtcccatacctgggaagataagctgctagatcacactatctgggtgggatccagcag

SEQ ID NO: 96874 - DNA, 113143 bp, Homo sapiens
  misc_feature (1)...(113143): n = A,T,C or G
gacccaggtgaaaaagaggcagccccaggaattgaactggctgtgcccaacatgctggctccagcagatggtctgacagccgggtgcctgtagatgccagctcagatggggtccccagaatgaagcttcacagaaaaacaaataaagcagccaccggaggaaaatgctgcaaaccagagagcaaggaccacatggaagatgcagaggaagggctaacatccgccgctttccacagaaaccagcagaatgttctagaaaatgacctgtcattctcactgagatgccagaaaaagatggaccttttatgagagcagagcatcatgtcattaggagaaaacaagctgctgagaataaagacacaaaaatgagatgatggacgaggtgaggagggcgaaataatacaccaaaggactgaagagcagaatcgacagaaacacagattgtgacgtgggtgccacctggagaaacaccccaagaatgcctggggaaagagtcatgccaaaattaatttcagaagcatagggaaggctcaaactcacgagactccagcattgcatacaaagaacacagtaattgaaataaacgtaataatccaagatatcgctgaagaaagcgttcctaaagtaaaatataaaccaaaatcaatgagaagagcccacacttggataagctgccagagactctgccagcatccagcctctcccccagggttgcctgaaaataccctgggagaccacaggtcacatgggcagcccgtgaccctctcaggagaccgcaggtcagatgggcagcccgtgacccgctcaggaggccgcaggtcaggtgggcagcccgtgacccactcacaggcttctccagagaacccatcccccaaaatgacaaaattccatcacccaagaatgaccacacctggacaagatcagaacacaaagacgctcaggtatgtgtgaataataataataataataataaagctcatccaccatctcaaaaatagtctgcaaaatggtcaggtgcggtggctcacacctgtaatcccaacactttgggaggctgaggcaggtggatcgcttgagtccaggagtttgagaccggcctgggcaacatggtgaaactccatctctacaaaaataaacgttagccagacatggtggcacatgcccgtagtcccagctacttgggaggctgaggcaggaggatggtttgagcccaggaagcagaggttgcactgagtcaagattgcaccattgcactctagcctgaccaagatcttgtcaaaaaaaaaaaagtctgcaaaaagttctccagtacaccaaaatatggatcaaaattaagaatctgaagccagcggcagtgcctcacttctgtagtcccagcagcttgggaggctgaggctgaaggatccctggactacaggaggtcaagactgcggtgaccggtgatggggccactgcactccagcctgggcaacacagtgagaccgtctcaaaataaataaataaataaataaataaataaatatttaaataaatataaaatatttttaaaaatatataaatatatatatatatgaatttcggatggaaacttcaagcgcacttgagctggttacggcggaaaatgagcccaggtggggctgccccagggccaacctgcgacaggaagctgaccagctccccaggtgcacggaaccaaagtactttgtccggtagcacttactataccaacaggaacctcacccaatccactgtggaagttctgcattcagggaagagaacagctcccgatagtttgatgctgttctggaaagcaagtgcgcatgactgtacgtaataaaacagcatgatcattccatacccaacggccgctcacctgagcagaagacgccggcgtcctccttgtgcctccagtcgtgccgcccccagcccgccgacgggcactgccacagcgcagactcgtggccctggcagcccagctcgtccagccagatgcgccctgccccggctccgaagtgtgcggcccccagggcgctcagggcgcggccacagcccagctgcctgcagaccacgtgcgcgtcccgcaggtcccaggcatcgtcacacacggtgccccacgcgcccccgtgcagcgccccggccccgcggccagccgcaccctgaggctccctgtggagagacagagtcagggcgcccgggatcccgtggcgacgggccatgggggacgcggttccgacctcaccggagcacaccacgccggcgtcccgcgaggtccccgcgggctcctgcagggtcgcggacacgttgcactgagtcaggcgggtttcggtgcccagacagcgcacgcggctcagcgccacctggacggatccgcggctgggggcaggtgcgtcataggcttgctgggcccctctgcacccgagttgccggcacaccacgcccgcgccgcgcaggtcccaggcatcgtccaggacgcggccccacacgccatccagggagacctccacgcggccgtcacagcggctctgtccttccctcagtcgcagggcgtgggccagacctggggatggggacgcacaggggcccaagatgtcagcgggagggacccaggaccaccccccagcagggcccgtacctctccgccccctctgtccttccttgcactcctctgtccatgcctctcactcaccctcctggtccaccgtcctggctgcacccacctgagcagaccgcggaggctgtgtttcccggggcacaggccggggcccccagggtgcttactgggcaattccacaagtaggactctgtcccctcacagtgaaaggcatcaggccagatggcagcgtccccgtccccaaaatggcctcctccaggtgcggccaccgcgttgccacagttgagctggtggcagaggacggtggcatctgctatgtcccagtgggtggcacagaggggtgcccaggacccctgcacctggaactccacgcggccctcacagctgctgctgccgttgaccatcctgaactctgggggagaggaggagtcagcctggcttgcagacggccgacccagaacatggctgtctgtggtcatttccttccttcacacccagtgggatgggcacagagcccagccttggtctcaccagctcccccaccctcctctgcatcagcatccagctcacacagctctccagaagaatttgatcttagctgcagccttggggtacatcactctacacccagtctcttccctgcgcttctttcaaccaacagaagcaaacatcaaaagcacccacacctactggccagaggcacctttagggcacgaagggatttgacagagaacaaggcagggctgagccttcagagcccacacacaggacttcacctgagcacctgagccccgcgtcgtgaccatgcccacactggctcccacgcccccgtgggcagtggaacagcagcgactcgttgcccgcacagcggaaggcctccgtccacaccggccccgagccccggccgaagcgggcgccctcgggcgtggacacgaccgccccacactgcagctcccggcacaccacgtgggccgtggccaggtccagggccgcatcacagacggtgccccaggtcacctccaggcgcccggcgcaggggtgctcgccgcccaccagtcgggcctcggtgtgtcctgggggcagacgtcctctcaggcaggagacaggtgttctcaggtcaacagcctggccctgagcctcagactgcagaaggcttcagccaggagccatcacctgcatctaggcagagggtctaccaagcacaggcaggaacttgcagccacaggcccttccacccggcacccagagcagagcagacgtccttggccgcatcaccaaggtcagggtcagggtcacctgctgcaggtgctcacgtatttcacagcctctgcctgtccggggccatgacagcaacaccctctgcaatcccagaggcgaggtcagggcaccccttggtccactgagcaccaccctctctggggtaccgcagcaggcagactatccacctcatttcagctgctcctcatatgcacaacaaggccaggagctgtgaggccagtgcagctcacacacagttgaggcagggctgggaagaagtgactacccaaccccgatccatgttagacatgcagagatcacagctgaggcagctcagacttgcagcggcagccaggacccctagatggcctgcgggttctgagccaggacacctctgtggggccaccagaaactcagctccactctgctgagaaccagcgtgagagctgaggccctttcccacctctgcgcccaatgtctcatgcaggacaggggggcccatccgtgggaacgcccaccccccttctccctgccctccccaggtccgggcccagcatcatcccaagggtcactgggaacatcaggtggcagcctcacctgagcagaccacctctgcgtccagccgcaggtcgcagccgctgcggaagttgttgtccagtctgcagctgcggatggtgggctcggtacccctgcaggccaggtacttcctgacgacgcccacgtcccggcggggggcctggagcacagggccgcaccccagctcccggcagaacaccatggcctcctccacatgcaggacacagaggcggtccaccccattcacgtttctgatctcggggagtcccgcgcagggactgcggcccttcaccagccggagctcccggaaagtgccgtctgtggagcacaggccggtcctccttaaggtatggacccagctggccgcatggtcactcggcagctcctttttcagggaggacagtgatgggctgagccagggccagcttcaggggcaggtgaccgggcagtcacacagggccctgggctcagagagacccctgtgcccagcttcatgctctgctgctggtctcctgaaacaagggtccccgcaggatccgttcacactgggccccaaaatggtaggaggtcctggccaggtggttcagcctcagaggcaggacgctatgagggggtcctcacagccacataaaatgtgagggacagctgaggaccctcgagccagacctcaaagggaaagcgtgtacctgtctgtcatttgtctaagaaaccatcatcagctacctgtgtgggcctcaggcgtccacagaccccgcccccgctcggctgctgcctcccccacgcctgggccgcactctgcttccttcctccaatctctgactctccctggcgttggtttttccacagctgaatcttacagtcaggatggccccggtgcccagagaggagcccctcccagagagagctccagacccacagcctccccgcccgtctccgagacccgccatcctcccagtcctcctctgcgtcctcccagtcctcctcctcgtcctcccactcctcctcctcctcagccccgtccccttcactcctccctacttactggagcacagcgcgaccaccacccatgcgtgggggcacgggctctggcaccatgagccaaggctgcactcccagagggaggactcgttgccccggcaggacacgttgtgaagccagggctgggccatctctccaggcagcgggacatacttgggggcgcccacggcagggccgcagcccagctgcctgcacacgacagaggcctctgccagcgtccactcctggttgcacacgtatccccatgccccgtggtgtcggaccaacaccactccgtcgcacgtgctgtgtctgtacgccagcctcagagcacctggtccacctacagacagacaggtccagttagaggggccagaaccaaccagaggcgcaggaggagatggcagccgcggcagcagggaacggcctgtgaggcctcagcagcgagtcgggctcctctcaccccaccaagcagtcccagagaggtgatgggcgcggctcacagagaaaccctcaccccatgtgtctccccgggggctactcccctccctggccctctggagccccaacatcctggaggaccccatcccccaggcaaggaagtcccctgtcctcctgggtctgcagctgggtgggtcctcccacccactctctgcctcccaagcatcattcccctacttccactggaggccctgtggtctccagcccaccactgtcacacctgccccacccacrtgactgtccacaccccttggagtgccccgctcacccttcggtcctgtcctctgcaaccctgagtatccaggaaaaccacccctgcctgccctcccactatgccaaacccagccccactaccccacccataccggcttccaggcaggatctcaccctccggtctctgagcatctcagctactccagcaccttctctcccacccgccacggaggcacccctaaccaccctctccaggcctctgcaaccccacatcaacacagccaccccgaggaaaatgaagcaaccagtaggaggaagtccatgtgggtggtgctgtgtggtcccagagcagcctccagggcccctggaggactctccacacccagaaaagagcctccccgatggcagtcaggagcagaggggggaccctgcctggtccaagatgaagacctttccctcccacctcctggggagccttgaatctcctctctctcagtcttcatccatccctccacaccccccagcctcctcatcaccctccccacctggttcttctcaggacatggatgcgtgctggtgtctgcaattttttcttttttagacaaaagtctcgctctgtcactcaggctggagtgcaatggcacgatctcagctcactgcaatgtccacctccagggttgaactgattctcgtgcctcagcctcccatgtagcgggaattataggcgcccacyaccacgactggctaatttttgtatttttagtagagatggggtttcaccatgttggccaggctgatctcgaactcatgacctcaggtaaactkccygcctcagcctcccaaagtgctgggattacagccataagccaccacgcccgctatgaatagcttttcattttatattttctaaagctatttcttgttgtaatasagaattccggcccttgtgcatgcgatcgttgacacaaaagcaaatcccttcaaccccaggcttccatccatctgtggccacattgctgcctttccttcaaatcctaacctcctctgcactttctgcagctgcccacagacttccaccccaccgctggggatgtggctccgtccagcaccaggtcaccgccctgctgggcacctggaccagccttgacagtgaagtgttcctcagcctcaagggcaccctcccctgcctcccgcccagccccacactcacatcatggctccatgcccacgtacgcaggtccccggggctccctctcacctccagcctctcctgctgttccttctagctagacccccctctctacacctccctgcccctgacccagcagcccttccacatggcttcacaccccagtgtctccacctgggtgcagcatctccatgggaccccatgctcaacctcactgccagatgcagccaaccctcccacctccttcccaggacctcagccctgctccagggcacgtggatggagcagcccccgcaggacccctcaggactctgttgatcagggtcattgggaccagacactgggccgtgtccctcattttgtccagggcctgacccagccctgaaccctgggttccaagcagtggggctagggtctgggggccctgaggtcacagggatccrgccatgtggagtcacctccctcctgccccagcatgtcccacccactctgggctgagtgagacccaggcagacggcaggtcactgcagggaccctcatgccccggggcctgggcatcaacagagctgatgcctccagaaagttccatggatgaaggaagcagaaacttaccaatggggactgcccagagattcagaagaaggggcccgagtcccagggtccagagagctgccctcatggtcccacagccctctgggcttcagcaagctctcgctgcttagctggggcaatggcrgaggtcacagcccagagtcacatatacagaagtgggagctgccaaggacctccagggtccaatggggacagccacagcctttccagagcgaatcagcagctctgcctctcagccgtgagcagagcagccaatgccttgctggcctgagcatcaccagacatggggagggtgcaggctgtgggtttcctcccacactgatcaagctgctgatgggactagacccaaccatcaggcagagatggtccaacctgcccacagcacagcatcagtgaagccctgcgtctctgccctccacccgggcccgtcggcttcagccatgccaccaccacagaaggcagtggccccagacagccaaggaggcgtcctctgtgccagcagatggcactagcagagttaggggtaggggtaggattagggtttgagtgggagtcycagcagcaccagaagaatgacacggaagagctttgcaagaactctgagaactgaactgtcgttggaatgaaaacccttgagagaagatacagttaagaatcactcatcatatgaagacccagggacacgaccatttcagtaagagayaaccaactaagggcggcaccaggaagagtcaggtgtcagaattatctgacaaggattttaaaacaggcatcataaaaatgtttccacaacaaattgcaaatgctcttgaaataagtggaaaaattgaaatctcagcaaagaaatagaagttataaaaatggaacaggctaggcgcagtggctcacgcctgtaatcctagcactttgggaggctgaggtgggcagatacctgaggtcaggagttcgagaccaccctggccaacatggtgaaaccctgtctctactaaaaatacaaaaattagccgggcagggtgacatgcacctgtagtcccagctactcgggaggctgaggcatgagaatggcgtgagcccaagaggcggaggttgcagtgagctgagattgcaccactgcactccagcctgggtgacagagcaagactttgtcttaaaaacaaaatgaaacagtggtaaggatgtrgagaaatgggacctctcagattttgctggtagattcaaaaatggtgcaactgctttgagaaagtttggcagtttgtcaaaatgttaaacagagatactcctggaagataccacttgagcccagaaggggcaactccactcttgggtacatatctaagaggaatgtaaacttatgtccacacaaaaatctctacatgaatgtccatgcagcattattcataataaagatgaaaacagctcacgtgtgcatccactgataaatggagaaacaaaatgcggtatgtccacattatggaatgtcactcagccatagaaagggaacaaggcacccacacaggctggatgtgcgtcaaccttgaaaacatgctcagtgagagaagccagatgtaaaagaccacatactgggtacgattccattcatatgagatttccagaataggcaaatcaatagacaaggaaattagattcatggtttccaggggctagagaaggaggaaagagaaaatgactgaaaatagtatagtgtttttcttttttatttttatttatttatgtatttatatattcatttatttattgggagacagagtctcactttctcatccaggctggagtgcagtggcatgatcatagctcactgcagcctcaacttcctggcctcaagtgatcttcctaccttarcctcctgagtaactgggactataggtgcatgccaccatgtctggctaattttttaaatttttttgtagagatggaaagccttgccatgtacccaggctggtctcaaackcctggcctcatcggaccctcccaccttggcctcccaaagtgctgagattacaggtgtgagccaccacagccagctacaggatttctttttcaggtgatgaaaatgttctgaaattagtggtgctggttgcataatcctgaatatactaaaatcctctgcaccacacactttaaaagagtgcatttatgatacatgaacctcaattaaattgtttttaaaataaatgattacagaactgaaaatataataactgaaatgttaaaaactcaatgaacggactagtagaatggaaatgacagaggaaccagtgaacctgatgatacttcaatagaatttacacagtgcaaacaacagagagaaaatagaaaaatttatagagcctcggggatctgtgggacaataataacaagacttaatctttgtatctgggaaattcaggaaagataagagagcgtatggggctgaaaatgtatttaaagtaacaactactaaatattctccaaatatggtgaaaggcacaaaactacagattcaagaagctgagaaatccaaaataagatgaattcaaagacattcacaccaagacacatcataattaaacgtttggaaaccaaaggaaaaaaaaatcctaaaaacagccagacaaaaaggattgcactgactataaaaaatggtaaaatgtgaattacagctaatttctcgtctgaaatggaagcaagcaggaagtgccttatttttaattgacatgtaagaattgtacatatttatgggatacagagtgatactttgatacatgtgtgcaatgcataatgatcgaatcagggtaactaccaaacccatcaaacatttatcatttatctgttgggaacattcaaaaccctctcttctagctatttgaaaatacacaacaagttattttgaattatagtcaccctacagagctacagaacactggaacttattcctctgtaactttgtatttattaaacaacctctccctatctgcttctcccctaacccttaccagtctctagtaactctaattctactctactaatatgaggtcaatttcttagtcccgacatgtgagtgacaactagcagtattgcagtattgatatttttgtacctgatttattgcacttaatagaatgtcctacatgcacacactgccacaaatggcaagattttttttttttttttgagatggagtttcactcgtgttgcccaggctggagtgcaatggtgcagtctcggctcactgcaacttccgcctcccaggttcaagcgattcttctgcctcagcctcccaagtagctgagattacaggcacatggcaccacgaccagctaatttttgtatttttagtagagacagggtttcgccatgttggccaggctggtcttgaaatcctgacctcaggtgatccacctgccttggcctcccaaagtgctgagattacaggtttctttaatctacttattttttttcttgagacacccccagggtctcattctgtggcccaggttggagtgcagtggcatgatcttggctcactgcaacctctgcctcctggactcaagtaatccccctacctcagcctcccttgtagctrggaccacaggtgcatgccaccacacccagataatttgtttttttktttttttttttttgtagagatggggtttcaccatgttgcccaggctggtctcaaactccaggactcaagcaatccaccagtcttggcctcccaaagtgctgggattacaggtgttagtcaccatgcccagcctatttcactcttttttatggcttaatagtattccattgtgtatatatattacatttcctttatatagttatctattcatgaacacttaggttgattccatgtcttgtctattgtgaatagtgctgcagtgaacataggggtgcagatatctcttcaattcactgatttcccttcctttggataaatacccagtagtgggattgctggatcatatggtcgttctatgtttattttttttttgaggaaaccccatactgttttccataatggctgtactaatttacattcccaccaacagtgtgtaagttttaccatttctctgcattctcaccagcatttgttactgtttgtcttttagataaaagcccttcaaacttgggtgagatgatatcttattgtggtttcaatatgcatttctctggyaattactgatgttgagcttttttccatatattttggttctttatatgttttctattgataaatgcctattcagaaactttcacccatttttttatcgacttaatttttttttttttttttttttttgctattcaattgtttgaattccttatatattctgattattcactcctggtcagatggataatttgtgaatattttctcccattctgttggttgttaccttgtcatttgtttcctgtgctgtgcagagcaattttagattgatatatgcccatttgtccatttttgctttcattaccagtgcttctgaagttttgttcataaaatctttgcccaaaccaatgtcctgactcatttcccctatattttcttctggtagtattatagtttggatcttacatttaagtctttaatccattttgagttgatttttatatggtgaaagatagaggcctagttttattttctgcatatgaatatccagttttcccagcaccatttattgaagagggtgtactttccccaagtgtgttcttggcacttttgtcaaaagtcagttagggctaatgtggatttgtttatgggttctgcattttgttcaactgccctgtgtgtctgttttcataccagtaccatgctgttttggttactatagctttgtagtatgttttgaacccaggtagtgtgattcctccaactttgctctttttggtcaggattgctttagctattcagagtctttgtggtttcataggaattttaggaatcttttttctatttcagtgaagaatgtaatttatattttgataggaattgcattgaatctacagattgtgtggataatatggttatttggacaatattaattcttccaattcatgaacataggatgtcttttctttcttttgtgtcatgttcaatttcttacatcagtgttttgtagttttcattgtagagatcctttacctccttggttaaatttattcctgggggtggaggtttgtagctattgtgaatgggaatgctttcttaatttcttttttaggtagtttgttattgttgcatagaaatgctatggatttgtgtttgttgattttgtattctgcaactttactgaatatatttatcagtactaaaagttttgggtggagtcttaaggtttttctatatataaaattatgtcatctggaaacagggacaactcgacttcctcatttccaatttggatggcttttatttcttttgtctaactgttctggctagaaccttcagtactatgttgaataagagtgttaaaagtagacatccttgtcttgttccagttcttaaagaaaaagctttctacttttcccccaatcagtatgattttggctgtgggtttgtcatatatggccttttttttgtattgaggtacattccttatatacctaatttgttaagaatttttatcatgaagggatgttgatttgattaaatgctttttctgcatctcctaagatgatcatatggtttttgtccattctgctgttgtgatgtaccacatttattgattttcatgtattgaaccatccttgcattcctgaaataaatcccacttgatcatggtgtataatctttttgatatgctgttggatttggtttgttagtattttgttgagaatttttacatctattttcaccagggatattggcctatagttttctcttttagttgtgtccttgtctggttttggtgtcagggtaattctggcctcatagaatgagtttggacaaattccactcccacaccccccgccttcaagtttctggaatagtttgagaagagttagtattttttctttttaaagattggtagaattcagctgtgaagccatgcagtcctggtcttttctttgttgggggactttttattactcattcaatctcgttactcattaatggtccgttcatgttttgtatttcttcttggttcagtcttggtaagttatatgtgtccaggagtttgtatagtttccaaagttattcttggtattaatttctagtttcactgtggtctgagaagatacttgatatgatttttattttgttgtcattttgtatatccttttttcctttcttcctctcttagtgtctatctttgcagtttggtggtttttgtaatgataagattttatttctttctcgttctcatctgatttcctagtgatttttattcttttgtaagtttttatcatggtggttaacatcctatcacttctagatgtaggactcccttaagcatttcttgtagggctgatctagtgatgattaattccctcaatgtttgcctgtcttgaatccagacacaggacccacagaatcagcaatgcgtgcaaagcacatcactgacgccaaagctggttttctccaggcctgcaaagttgcatttaggaaaaaagctaacactagaaaatcaatcactgtaatttgccacactgaaaggctaagggagaacaatcatattgtcattttcaaagatgtaaaatttttaatatagaattcagtatccatttctgataataaagtgtttgcaaactagaactagaagggaacttccttaatctgaaaacaagaacatacaaacgcagctcacagaagcgtccccgttcctgctctcaccacctgcagcccactttgccctggcggccaaacccagtgcagaaagataaaaaagaaaaggcacgatgcttggagaatgacagtcaagaccagcgtgactcacagacacgctgctgggaatgccgagacccacaggaaccacggatcagttagcgacatgggaacgtttagtgagtttactgaacatagacaaaagtcacttgtttttctacatataagcaatgaacagaaaatgactttttaaaaatacctaccacttacaaaggcaacaaaaataccaactttctaggaattaatctggtgaaagacgtggaagacgttaatgcagaaagttgagaggcgttgaaggaagatctgagtaaatgcggaaacgcaccacgtttctgggttggaagctttcctgttgcaaagatgtgaaatttcccccaaagtaaactctaggagggagacgggacttgagaactgacttaagattcacatggaaatccagcccacagcggagggcggagaaggctgtggggtttcacaaccaggcggccgcgggttctccctgggcggtgctgaggagtgggggcgtccgggggccgtgttgggagtgggttcctccctgccagcccggcgtggggggaggggaccctcgtggatgggaccccaaacgcgcacacacacagccaggaggctgcccggggcccccgggcccaggacgtatggctgcgggcgctgtgcggggcggggtccccggggcgggtcgctgaggggtggcggccccggtcttgggctctcagtgaggcggacccggggccgtgggagagaccgtgagaaacgggcaggacctggagtctgcacctgcccgaggcggggggcgcggtggggcgtggggctgggtgggcggcgccgccacggtgcgcgccgggtccaggaagagcctcccgcgcgtgcagaggcctcagcccggggactccaggtgggggctctgcctgtgggtgggtggtcgcgcccggaagctgccccgggagagggggctccgccagggcagggctggcccggacggggcagggcagagccgcgagtccgcggtgctcgtgccctcgggggtcctggccgccccggcaaagcctcctggtgggcaccgcagggcggagctgggctgcggccaccgacgcaggcccagaaaagctcccgggctgccccaggcacaaaactggargagatgagaatggcgccttcgccgacggacacccagcctctgctctccccccacccacagccccggcctttggagccccggggtcggtcccgacgcaccccaatgcccacctccagcccaggcccctgctccacacgcctgtgtccatgcctttgcccagccgctcctccatctctgcacttgcaccccaaaaccttacttccgacttcccccagcccccaaaaccacgctgacctcacagcyttcggcttatctctgttctacacccacatccaatccatcagcgaatccatcgggctgcaccccggcagggtctgcccgatttcagctacsagggccgcccccaactgggccctgccccgcccatgctccaccagcgtccagaggtcgagggggctccttgaaagcaaagtcacatcagtcccctctctgctcgccaccccgcagccactcagtcggtgacagccgaggacacaccacaggcctgtgtgccgacacccaccgctgagctcagccctccctgcccactgctcgtcccccaccacgcagggcccaggcccaccttcacctgcgcagccgctgtccccttccctggcactctcttccctgacacctccagggtggaccctggccttgggtgttctgtccaagcagtggccctgatcccactcctttgtgtgcctgcctctccatgccacgctccacccccgcgtgctgcagagttacccaccattagctgttgtctgtctccctccaacacctgatcccccaggcaaaaattcatgcgtccactgctgggtcggaagccagtgctgaggcccagtaaggaccctcagacatggctgaatgtgaataaatgtgacatttatgaatgtggttttgggacgtgggaacacagagccatacacctgcccccggcagccttggaggtctgtaccccgtgtggaccaggacaccaggccaggctggatggactgatcagctgtctctgggaccagtgaagtcccttctccaagcacacacagaaggcaggggccaaagaccccttggtgggtcctgagcaccttctcctgacctcccactgccctctgccaccttgagctgtccagcctggaccacccctctgtggagcatcagccaggctcagccaaccaggtggggagcagtcagaggaccttggtgtccagggagagggctctgccccagggccgtggtcctcacgggtctaggtgaggagggcagagggttcaggtgcctttgcccctttcacagcccatgaaaaggtttcctcaatcaaccctgtgaccctcacagtggcctggccagagatcaggaggtaggggacaatgagtcaaactccagtctcagacccractgctctgagcaggcaggcggagcccacctgtgggagaccctgggggaccggcaccctctgctctgggatgtaggggctggggggcatacagggatccccaggggggctcatctttgcagccaggcttctctggttttgcctcttccaagccctgatcttgttggcctgagtggtcacaggagcccctgcttcgtccaagagcaaactccaaactccccacctcagcacctcacaggtgaggagatgggccgccaggtcagagcagagtgtgtggggcagggctgggactcagacccagatccaccacctagaaaccacgtcatcctctgcacaggtgacatgctgggactcaaatccagatccaccacctagaaaccacgtcatcctctgcacaggtgacatgctgggactcagacccagatccaccacctaaaaaccacgtcatcctctgcacaggtgacatgctgggactcagacccagacccaccacctagaaaccacgtcatcctctgcacaggtgacatgctgggactcagacccagacccaccacctagaaaccatgtcatcctctgcacaggtgacatgctgggactcaaaccgagatccaccacctaaaaaccacgtcatcttctgcacaggtgacacgtgagtgcttgtgttcatgagtgtgcctgggtgcacctgtgtatatctgtgcacccacctgtgtatgtgcctgtgtatgcctgtgtctcggtgcacctgtgtatatctgtgcacccacctgtgtatgcacctgtgtatacctgtgtctcggtgcacctgtgtatatctgtgcacccacctgtgtatgcacctgtgtatacctgtgtgtctcgatgcacctgtgtatatctgtgcacccacctgtgtatgtgcctttgtgtacctgtgtctcagtgcacctgtgtatatctgtgcacccacctgtgtatgcacctgtgtatacctgtgtctcggtgcacctgtgtatatctgtgcacccacctgtgtatgtgcctgtgcatgcctgtgtgtgcctgtgtgcacctgtgyctgtgctcacctgcatgtgcacctgggcatatctgagtgtctgtgcagctgcatgtgtacctctgtgtgtctgtgtatacctgtggatacctgtgtgcacctgtggatacctgtgtgtgcctgtgtgctgccgtgtgtctgcatgcgcacctatgtgtgcttgtgtgtccctgtctgaatgagcacctatgtgtgtctgggagtgcctgtgtgagcacctgtgtgtaamtgtgtatgccacggcacatctgcacatgcctgtgcctataactacattgggcagcgagctgtctggggtgtgctggtcaacaagcttccctgaagcaggyggccatgtggagggacagcatgtctgtggtttcacatttgtccccgtcatggccttgtctgtccacttgtttctgtgggaagcaccgggccccagaggccggggtgagtggtgcctgcctgtctcctgggcaggggcagcaygtctgcatggatgactgtgtgccgggtctggatctgctgtgtgcgtgtttttgtctgtctgctgggagcctgctgtctgcgtgggggcctgtgctggcggcacatgtgtctgggtgtggatgggtgtagttctgatgcaggtacctgggtgccctgtgagtgaagccaagtgtgggrtcggggcatgtgattctgcacttacggtaggtgtgggggagcacatgggctgtgtgagagcatctctgtagggcctgcatgccaggctgtccgtgggcacctctgtgtaaagggcgtgaagctctcctgctccatacttggcagcagctggggtcccccacaccccacagccccacggcagcagagcacagggtgctccacatacctatgtgacaaggactcgaggactccgctgcagatcctgcctcaaattctatcagataaggcaacgctggctgcatcttccagagagggaacctgggaccggaagaggcagaggggcacctcaagccccacagctgctgagtggcagctctgagaggaagtcagtggtcatgagtcacaggagccatgggcagtgaggggcccagctcaccggggagatggcagcatcagagacgggggatgtgcaaaggtgagggcttcggccacactgggtctgacttcactaagatctggcccgaaacctcctggtgcacagcttcacgccacccccgacggacgcccaaagccccagagcgagctcatccatgggggaccagcacagcggccggcaccgcagagactcctgacccctcccaatccacaggtccgaggtcacaaaccaagggtgggtccgggatttgacttccagcccctgtcccagagcccacactctgaggagctctgctgcccccatagtcttttcagaacaaaactgcacatttctgctggcctcacataggcactgagccggctggggagggaaaggcacagagggtctgggcagcccaggcacagaggcaggggaggcggtggaygagcagtgcaggctgagggtgggggctgccctcccaagtccatcctgcagggttcttggtccagggacgtccttggggagtggcagggtgggcagagcagccgcccctcatagcatctactagctggccagcctccaaggcccccatggcccagggctggagggaccccccaacayaccgcctgccacgccccaagctcagctctgcggtggttcgttgtcagccgtccccggcccaaatgcgttcacaaaattacccagcttgtttaccaaactggctgagcttcaccttgaggttaagtggaggatgcatggagggctcacctgaggcacttagggtgcagataagcaggaaaagcccaaccacagtgcacacgagtagatttactttaaaacagggcgaggaggaggagaaataggaaaataggacaaaggactcaggtggccaagaatgttaccaaacaaaaaccaagctgctgggtcacccactgcccaccatgacccagtctccatggacggctggcccccggctctgttgggaaccagtgggtaagggcggctggaacctgagctcacagccccgtcggaccctgacccagaccccgacagacgctgacccagacaccgatggaccccgaccyagaccccgacagacgctgacccagacaccgatggaccccgacccagaccccgacagacgctgacccagacaccgatggaccccgacccagaccccgacagacgctgacccagacaccgatggaccccgacccagaccccgacagacgctgacccagacaccgatggaccccgacccagacctccatggacgctgacccagacaccgatggaccccgaccyagaccccaatggaccccaacctagacmccgatggacccmgacctagaccccaatggaccccaacctagaccctgatgtaccctgacctggaccctgatggacgctgacccagacactgatggaccccaacccagacctcaatggacgctgacccagaccacaacagacactgacccaggcactcatggaccctgtcccaggcactggggttccccacagggattcacacccrgtgccccatccttaggtccctccctgcatccctccctaaccttcccccagaccataacayaaggagaccctggagaggctgagccactcttccaggcaaatatccttcaatcccactgcagggcgggcatctgcagaaggccaggttcggagaccggacgaggctgcccatgctgaatacagcccagcakgcagggccgacgggggctacagccttggcctcccggaggaatctgtccyctgctcctcctaagaggctgtgaggagagggagggcagtagaccaggtgcaggagcctccggttccccttcgaacgcagtggctccaggctggcggagctgtgtggctccatgtgtcttctatggtgaccttcaggtgtcatggggacccacagctgggagctgctgacacagcctgcgtgtaggtcagaatcacatgtatctgcaacaactgtttcagtaatgactgtcagtcctgctggcaaggttgtaaaaatctgggatgttcaccctgtgcagtggacacttgcgagtcctgagcttcactctcgggaccaaagtagaaacacacagaggctgaggcatgaggcctctttccacactcaggtattggcccggccatgtggcgtgggcctcgtgctgaccgaaagcctgcaggccgtggggcccctgcatgcagagctcataggcacagacacacagtcacaaggacagatgccagggccgtccaagcccagggtgacccggctgccccggggtggtgcatggcctgggggtctctctgggatgcctttgtctgcagtggagacagggcaggaacagagggaggaaacagccaggtgctctgaaagcaacatgccggtggggctgaaggtagggattttcagaaggtggcaaagccagccctgaccccagtagaactctgaagacagtgagccagggaaagccaggggggccagacttggacacacccagacctcctctgtgagccagggaaaggcagggggcccggacttggacacacccagacctctgagagcagagggacagacatcagggaattgcccgaaggcccccgtactaaacagagagaccccagccccaccagatccctagacggtagatggcagccactgacacctccaggcaggaccccggaagatgttcctctcaggaatctgcgtgatgctggcaggcgagrcagggcctccgccagccagatgactctgccacggcctggtcagcattttggatctctccagtgtgggctgacagccaacagtcaccagacatcagacgagagcccctaacaggggagatagacagaggctgagagaatgagaagaggctggaagacacggagacagagggcggtgaaatccgtgaatatcctcacggacatcagaacatgcagtttgcacccttgaaacaatagaacactacragaaaagaaaggaaagacagagtcagagaaagaaagacagataacccacaaattggaaataggatgccagaaataaactcaagaaggactggaagaaatcactcagaaagttaaaccaaaatgtgatatggaaaatggagattaagtatgttttacaattagcccagtagatccaatatctaagcaggagagagttccacatgtccagagaaaacaacttactaattcagagcctccctttcctggaggacaacaggatgcgtctgatcttcttaaaagcagccgggggtagatgtgagtgaggagctgctgggctgggggcaggagccaatgggcaccagggaggcaagcccagcactcgggccccatgccagttcctccaagtcctcccaacacagtggccctggaaacccacatctatgcccccgaggaatgaggataaacccgacaagccccagcccctgggtccaggacaaccctgaagcttcagttggaacatcaagtgtagactgaattgagtcacgtggttctagacaactaccgccaccatgtgtccagaaaaagtaaaaacaagcaaaaatactcaaggttgcatcaaagcaagctctcatcagtccctcaagtaagtctctaagcacagtgctcagcacacagcggaagataaccaggcctagagacggtgggaagagcaggcatcagacaccaacagacagactcgaaactgctgcacttacaagatccaaggaggcagaacaagcaacaagtcagaagggtatggaaggcaggaacggcaccgccaccttggcctaactgatgtttacagaacactccatccaaaaacagcagggtacgcattcttttcaagtgcacatgcaacatttaccccgacagacccatattctaggccgagaaatgtgtctcaaacttaaaagaattgaaagtaatacacagtaatttgcagggaccagtcctacagggtctgtgggtttttctcctcatgtgcagagacgagagatcttagagataaagacacaagacaaagagatagacgaaaaaatagctgggcccggggaaccactaccaccaagacatggagaccggtagtggccccgaatgcctggctgtgctgttatttattggatacaagacaaaggggcagggtaaggagtgtgagtcacctccaatgattgataaggtcacatgagtcacatgtccactggacaggtggcygaggcggagagagagagagggcagcttatgccattctttcttctatgcatttcaaagacttttagtattttcactaattctgctactgctatctagaaggcagagccaggtgtacagggtggaacatgaaagcagaccaggagcgtgaccgctgaagcacagcatcacagggagacggtcaggcctccggatggctgcaggtgggtttgactgatgtcaggccctccacaagaggtggtggagtagagtcttctccaactcctctgtggaaaaggagactccctttcccggtctgctaagtaacgggtgccttccctaggcactgacgctaccactagaccaaggtcagccaagtaacagtygtcttcccagacgctggtgttactgctagaccaaggagccctctagtggccctgtccgggcgtgacagaggctcacactcttgtcttctggtcgcttctcaccgtgtcccctcagctcctwtctctgtatggcctggtttttcctaggttataatagtagagcgaggattattataatattggaataaagagtaattgctacaaactaatgattaataatattcatatatcatcatatctataatctayttctagtataactattcttattctatatattttcttcattacactggaatagctcgtgcccttagtctcttgcctcagcacctggatggcttctcgcccacagtaattaaaaagagaaatcaacagaagaaaatgatttatrggaaatattttgatatttsggaaaaatacagttctaaataacccatcgtcaaagaagaaatcaaaacagaagttagtaaatgttttgaaatgaaaataaacacaacatatcaaaaaattactggattttactaatgcagtacttagaggaaaatgtatagcaccaaacacctataagaaaagaaaggtcttaaatcagttacctcagtttccaccctaagaaactagaaatgtaataacaaattaagcagaaagtgatcaaaataaataataaagatcagagcagaaatcaataaaatagaaaacaaaaatggcaatagagaaaatcaacaaaaccaaaagctagttctttgaaaatatcaatgaaattggggccaggtgtggtggctcacacctgtaatcccagcacattgggaggccaaggtgggcagatcacctaagattaggagttcgagaccagcctggccaacacggtgaaaccctgtgtctactaaaattacaaaaatgagctgggtgtggtggcaggcacctgtaatcccagctacttgggaggctgagccaggagaattgcttgaacccgggaggttagctgtcactgagccgagattgcaccactgcactccagcctggaatacagggcaagactccatcacaaaacaacaacaacaacaacaacaaaccatctgattagaaattgcagaagcaaagataaattcaaggcacagcagcagaaactaccaaaaaatgaaaaagagagaagagaataatgttttaagtgaaacagagtatcagtgacaactgttggatgactccaagcagattaatatacatgtaactgaatcaacaaagaagaagagagagcaaagatatttgaaaaactaatggccaaaatttttctaactttgaaggaaactacaaactcctaagtccaagttgctcattgaatctcaagataagaaacataaagaaaactacacggaggcacatcataattaaattgctcagtaccagtgatcaagggaaaatcttaaaagcagccattgtctcaagagaagtaatgcaagcaagagaacagtggaaccaaaagttttaaagactgtaagraaaaaaaactgtcaatctagaattctgtacacaggaaaaatatctttttttttttttttttttttttgagatggagactcgccctgtcaccaacgctggagtgcagtggcgagatctcggctcactgcaacctctgcttcccgggttcaagatattctcctgcctcagcctcccgagtagctgggattacaggcgcacaccaccatgcctggctaattttttgtatttttagtagagacggggtttccccatgttggccaggctggtctagaattcctgacctcagatgatccacccacgtcatcctcccaaagtgctgggattactggcatgagctaccacaccaggccaaaaatatctttcaaaaacaaaagttaaatgaagaattgttcatacatacaaaagatgaaggaatatatcatgagcagaccamaagatgaaggaatatatcatgagcattacaaaaaatatttagagaaaccctccaggtaaaaggcaaatgatgccaagtggaaataaggatctataaaaagaaataaagagcacaatgaatgccaataggaataaatgcacatcacttttccttattatttaaaagataagtatctgtataaacaaaaataataacaatttatcgtggaatttataacacatgaacataaaatgcatgaccacagtagcacaaaggccagtaggagagaaacggaagtacactattgtacagcttgtaaaatatacgtgaagaaataacatatcacttraaggtagaggatgacaagttaaaggaatacactaaccctaaaacaaccactaaagtaacaaaagaaggagttacaggtcatagtcagcaaaggagataaaatgtaatcagaaaaagggaagtaaaagatgacaacgggaacaaaaatcagacaggataaatagtaaacaaatagtaatgtggtagataataagtgtaatcatattagtaatcacattaaatgtaaatggttaaataccacaaataaaagacagagattatcagactgaataaaaatgcaagacccaactataggctgcctacaagaagcacaatttaaaaagaaagacagaagtaggtttaaagtaaaataatggtaaaaggtatatcatgcactatttaaagaaagctgcagttaatatcagacaaagtagattttaaaacaacaaatattaccaggcataaagcaaatcattgcataactattaaggggttaattctttagagggacaaaatcatcctaagtaggtatgcacctaataaccacctaaaaatacatgaagcaaaaacaatataacatcaaggagaannnnnnnnnnnnnnnnnnnngagttacaggtccatagtcagcaaaggagataaaatgtaatcagaaaaagggaagaaaaagatgacaacgggaacaaaaatcagacaggataaaaagtaaacaaatagtaatgtggtagagatttactacattacaaatatttatgacagtacaaatagtaatgtggtagataataagtgtaatcatattagtaatcacattaaatgtaaatggttaaataccacaaataaaagacagagattatcagactgaataaaaatgcaagacccaactataggctgcctacaagaagcacaatttaaaaagaaagacagaagtaggtttaaagtaaaataatggtaaaaggtatatcatgcactatttaaagaaagctgcagttaatatcagacaaagtagattttaaaacaacaaatattaccaggcataaagcaaatcattgcataactattaaggggttaattctttagagggacaaaatcatcctaagtaggtatgcacctaataaccacctaaaaatacatgaagcaaaaacaatataacatcaaggagaaagagacaaatccacaattagaaccacagatttcaataaagattgaacatcactattaaccagcttacctgattgacatctacaagatgtgccacccaataacacaaaatgcacattcttttgggagaacacagatcaattaccaagatagacccatattctaggccataaaataaatctcaaatttaaaacaaagtatgttctctaatctcaagggaattaaaatagaagtgaacaacagtgaaatgtctccaggaaatctctgaacatttggaaactaaataacacatttccagatcatctggaaactatctaataatggaacaaacaaaccctggatatgcctcaaaaacactgtgctgagcagaaactggagacgaaagagaggacgttgtgtgttccacttatattacattctagaatgaacaaaacctatgaaggaaagaatctcagcagtggttgcctcaaggttgagagtcagggataaastgggaaagggtatgcaggatgtctgtggggtgacggaagttggcatcctgatgcgtctgggttccaggcacacacacacatttatcaaaacccatcacctcaacactaagcgcattactgtgtaaactgtgcctccacagagaaatttagaaagggctaaagaattcctacaaatcaataactaaaagatgaccccgttgggagaaatgtacaaaagacacacagaagcagaaacacacattgataccaaatctgtgggacaagcaggaaaatacgagtcaccaacacaatgagacgctgcttctcacccattaaagtggccaagactgagaattccacgagaccacctgctggagagggtgggagagccatagtagctgtggagcagtacwgccacaytgggaaaagaatctggtattttcttaggaggttttgagtaaagtttgacctcagcattcccattcttacgggtggattacaagagaaatattcacacatgacaaccaggaaccaggcacaggaatgtcatccagtgccattcgcaagaacagaggactggggatcgttccaagtgtccgtgaacaaagaatgtgttatgacttgcggtgtagtcacaccatggaatattacacaggtgtccgactgagtggagtgcagctgctgagaagagggagagtcttgacatgaaagagcaagacctagaggacagcgcacagcccggggctctgggttatgaagcttgaatccaacaaagccccacctgtgtttcgggtcatcaacgtgctttcaagaaagcagccagagaatcccaacgaatggtctctgagggtgggagaggggaggagatacgctcaggggttagtaattgtctatgtcctgtgctgaggggaggttcatgtgctctttgtattattttataaatagatgaataaatgccatgcatcgaaaaataaatgaaatgggtgttccaaaggcagcctactgggtagcattcagcagcccccaccctcaagggaagggcctcgagtctgcgacctgtcccaggttggtgtccccggggtgagggcaccgggagggaagtttgcatggaaagctctatttgcggctgagcagagcgtggggaggcctcccagctcagcgggtccctccatgggcctgcagagcactttacaaatcgctctggcagtcccatcggagtgaaaatttgcaatgagagacttccaggatggggagcagatagggggtggggagggcaaggtcacaaaggaaccgaataagaaacaccagcggaggcaggtagaggcggggccgggggagacgcacctgcgagggaggcggggcccgccgtgaccttggtctccacgcgaagacctgggggaggctgcgcggatgcacccagggccccagccctgagccccaaggtgcctcgctggctggtccacgtcgcccggggtgctgtgggactggggcggggtggacgggggcgctgcagagggtcctcagcgctgagccttcgtcggcccagcccctccccgcagccgcccacgctgcacccagggcggggcccatgcatctcctgaggctggccagtggcgccccccagcactccgtcctcgcccccgccatgggtaggggtctctgaagtcgcctcaccaggtgggcctggagcagccgccagctcagacccccgagcgccggtgaggaaggggtggtagaaggctgggtcaagggtcacccaggaattccacttgtccacggggacccggccgctgcccaggcgcagacagacccagaggcagagtgcgaggtaggggtctggggcttacatcccccgagaggggcggggacctcccagaggagctgctgcacaggcctgcggagctccttctcccaccactgtcccagctcaccctccaacccccatcctgccctcagacacccaactgcaggcaagtccaggaaccagaaccccacgccacacagacccattggaggctctgagtggacagctcccgcccttccctcgtccgcccctttgctggctcagaaagtacaagataaagatgtcaggacctaaaaggtggggaggagcctccctcccctctgcaaaacccctggaagctttgttcacccgtacagggtgcccctggcccctgggggccagcagggttgaggtccaggaagggccccaaggcacacagccccgagaaggcacgccaggcagaatgggtcttcccttgcgctgtgtgtacatctgggggtgtgcacttgggtgcatgtgtgtgcaccagggtgtgtgtgcagctggggagggacgtgcactgagtgtatatgtgtgcacctggccacgtacctgtgtgttggggcagggaagattatgcacctcagggcgtataagtgtaagagggggtatacctgatcatatgagtgtgtacaggtcccaaggccccttggccaggcgttagctctgggtaagtgggcatgttgggctgagaggtggggatgacagataagtattgcagcaggtcccaaaggtgcatggtgggacagtctgtgagcctgagcccctgccctaagatcccaggagggcttacagtgctcttacctagctctcaccagtggagcagggctgtgaccccatcacacaccacagcctagtctccccactgttctggagtgctgagaagtgacttgcctgaccaggagggccacgtacaattccagcaatactgtggtgacagagtttgtctttctgagcttcccagagctgcctgaccaggagggccacgtacaattccagcaatactgtggtgacagagtttgtctttctgagcttcccagagctgcctgaccaggagggccacgtacaattccagcaatactgtggtgacagagtttgtctttctgagcttcccagagctgcctgaccaggagggccacgtacaattccagcaatactgtggtgacagagtttgtctttctgagcttcccagagctgcctgaccaggagggccacgtacaattccagcaatactgtggtgacagagtttgtctttctgggcttcccagagctgcctgaccaggagggccacgtacaattccagcaatactgtggtgacagagtttgtctttctgagcttcccagagctgcctgaccaggagggccacgtacaattccagcaatactgtggtgacagagtttgtctttctgggcttcccagagctgcctgaccaggagggccacgtacaattccagcaatactgtggtgacagagtttgtctttctgggcttcccagagctgcctgaccaggagggccacgtacaattccagcaatactgtggtgacagagtttgtctttctgggcttcccagagctgcctgaccaggagggccacatacaattccagcaatactgtggtgacagagtttgtctttctgagcttcccagagctgcgccatcttcaagggctgctatttggtcactcctcatcatctatgtggtgaccatcctagaggacctggctgtcgtggggaccatcagagccagccaccacctgcacatatccacacacctcttcctggccaaactctcggtgctggagaccctgtacacctcggtcaccgtcccaaagctgttggccggactcccagcacgagcgacgaccatctatctccttctcggggcacctcacctggctgctcctcttcctctcactcagctcctctgagtgcgtcctcccggccaacatggactgtgactggcacccagtcatctgccacctgctgcactacccagcccatcatggactccatgcagctggctctgcctgcacctggccatcagcgcccagctcagcagcttcccagcctcctttgtgtccacggctctcaactccagcctgaggctccgcagccccgatgtcctcaaccacttctgtgatatcccacccccgctagggctctcttgctccagcaccactaccatagaaatgcggactcaggcagcccaggtgatccttgcggcttccctgcaggcaaccacggtctcctacacccacatcctggccagatcgctgaggattccagaaaggcccagcagctaaaggccttccccacctatgcctcccacctggggtggcggctcctctaacctcatcaagctggtgtcaggggtctacttggttgggatccctctgctcaaacccatcatctactgcctgggaactgcaacatcagggaggccctggccaaactcctccaggcccttcccctttagagctgcaggagggagagctgcccaatccctcttcctccttccctgtgctcacagacactggtgaccacccaaggcagccacagccctctcccaccagggcagtcagcaagtcctgccctcgcccatatcacccagagttgccaagagcacagagtggccacaggcaagcatctccttgagcagtggaggggcagagatgccagacctgggcctcagcactgccaggacagctccttgccacagcagctaggagcctccagcccaggagaagctgggcctggagctcacaagaagccccctctcacggcctctcccctgaccctctcggatgaacagctgctatggaggccagccactctgcccagtcctgcaggcccagagggatggtctccttgccatgaggtcccagctcctcagagcagagcctgaggccaggtgagcaaagggctctggcacatccaggcagcaccaccaaacacacaggtgtcccctttcctcagaaacaggaatgtcattttgtgtccttttattgaaaactccatgggtctaatgaatagacaacatgcccttacctgttttctctgccttttctctctggtgcttgagggcagaaactaagttgaccgagcacgtctcttcctattgggctgcggcacctggttgtggggaggtatctctcacttgatttcacggtttttccatgcccyaatcccacctccctcatcacagccacccagtgtgatgcattcagcatgtgtccttggagagagaggtactcaacagatgcgtggtatttgtgttttaaatttatgtcaatgagttttcactctaaatctcctttcttactatttttgttttgtatattgtgaggttatgtcatgaagtgcatacagatttagaaatgttttatcatcttggtaaatttaacctttcatcactaagaggcattactctttgtccctagtagtgcttttacctcaacctttaagtataaagtctactttgtctggcattaatacagctayactggcttccttttagttagtatttgcatggtatctattttttatccatgccaattattaatctgctgcctcttagcttctaaccacccttcacagtcagctctgtgacgctgggacagggacttgacaaactgcatttctgctttgtcacccactgcctctttctgttgagaagtcagctgccagtcttacttttactcttttgcaggtaatttgagttttccctgcttctggaagttgtttggtttacagctgtcttacctagrtatgccttttttttttttttttttttttttttttttttgatttattgcacttggagtttgtaatgcctctagaattcatgatttaatttctttcatcagtttttggaacttattggtgattatttccttaaatattacatctacctcattctcttcttccattggttctaatattacatggcatgtcaggcctttctatagtgtaccctctgcctcctaacatcctattctgcatgcttttttttttctggatattttctgatctttcaggttactaattctctctctagccatgtctaatcttctgtgttttaaaatgtattttttgattctagactttcctttttgtccttttagtttcccattctctactaaaattctcaatcttgttttattcctgtagacgtggacaggctcctacatgagtttcttaatggtatccttgttctcttgtgttggtctctgtctaatccttgccaagactgggttgttttattactatggctttttatgtcttaatatgacatggtgagttactcttctttgatcttctttttcaaaattattttattaatagttattttaggcctttatttttccatatagactttagaaacttttgggctctgtgctattttgttactaccataacaaagtgccacagacagggtggcttaaacaacagaaatttgttttctcacagtttggcagggttggtttcttctgcagcctctcttcttggcttgtagacaccatcttctccctatgtcttcacagagccatcccacagtgggtgtctgggtcctgagttcctcttgttaacgacatcaagctcacctcacctcatttaaccttagtcacctctttaaggtcctatttccaaatgcacccacccccacagtattaggggttgggacttcaatgcatgaatttgagggagacacggttcagctcataacagtcttttaaaaattatgtaaagatttttattgtaatttcattaaatttatggatcaatttgtggtgaactgtcaccttcacaatatcctgtgcatcctccatttatgcagattttcttttatattctttaataactttaggatgttcttcayagaggtcttttacattgcggactgtggtgaatggctttttttttttttttttttttggaggaggagtcttgctctgtcacccaggctggagtgcagtggcgcaatctcagctcactgcaacctccacctcctgggttcaagtgattctcgtgcctcagcctcccgtgtagctaggattacaggcatgtaccaccatgactagctaatttttgtaattttagtagagacggggtttcaccattttgaccagtctggtctcgaactcctggcctcaggtgatctgcccgactcggcctcccaaagtgctaggattacaggcatgagccatcgtgccagactatgaatggctttttatcttatattttttaaagctattttttgttctggtagagaaattctaccatcttttaaatctaaggtatacatctggctgcaagtctagggagtacctgcttaatacagggatgagatgtgagacacccagcagtgcagagtggcagagcagcaccgctgtgtgccggggacaaccccaccctccacccgcctagccgctgacccagcatcctggggtcttccgatggcaggagccacccttggcaccaagtcccactcccagcaggaaaaagggggaaaggacaatagcacacaggttctacgcagcccctctccttagcggggacggaggctctcccaggagcccccgacaccctcagttgcaggtttcaccagctatgcctatgtcctgtggcctctgccagctgcagcacttgtggtggaatcaggtctcagggctacagctgcaggagccaccccaccttccatggtacaatcaggtctcagggctgcagcttcaggagccaccgtgccttcaacgtgctgtgttcttcttggtggcagctctgccaatgctgtgttaaacagaagcggtgaaagtaggcaatcttctcattggttcgtatttttaaaaatacatttaaaagctctccactacgtatgtcttctgagattagcctttatcaaagaaaacatttcacttctatgatgagttttctcaacatgtttcaccacaaacgaatgttgattgaaatcaaatgctttgtctttctctgtagaaaaccgtattttttgcctttggtccactaataggtaaagcacactgacatatgttatgacataaaaccaccctgaacctgacctgatcatggtgatttgctttctgatgtgccgctggactcattgtgctgctgctttatttaaaactttcatgtctctactcaaacataaaacagcctaaatgtttctcttgcgcttctcttatacaccctaagatacatcctatacatcttaagatagaaggcttctggaatcataaaatcagctggagcaccgcctcccccttccttttcccattctgtgttctcggccttggaacaactgttagatgttagagcccaaaatggatcccctgggtctatccccttttctttcatatttgctgcctttttgccagaaacatttccttaaatatacaattccatccttctgttggttttttttttttgcagtaattttttaatctcaaaagtgtcttttttgtcttatttcatcttcacagtttcctgttcttattatataaatatatctccctaatctgagtctatggattggagttytatccaatccattcattccaatgattggaatgattggagtcattcacatttctcaatccatttattttccgtttctttgcctggtctttcttttatgtgatgcagctctccttgaatgtctgatacattttcatcctttaaaatgaagccgatgggtgacaggaagacgtgcttccatgaaaggcagtgtttcactccggaacctcagctcccgcacgctggatccagatccacagcatccccaggacctcttctcccctctgggtcctgcccccatctcactggctcccatctcagattccctgtgaggctccacgcttggcttcacaygcaragtctaggggtgaggggcccctcccagcctctcagctggcagtcctgggcctgtgctgggaaacatgccctccccgcccgcagccggaggagccgcatggctgtcttgagtggaggtcacacatcccctcccagggccaggggagggaacggtcacagatgttcctcatgagccaaaaataagcaaggtctggctgcggtgctgtccactgccggctccagcaccaggggttgcccaagaacccccttgactccttggggtaagcagctcactgctggctgtcctgtgtgtgatggggaagggggactcaacccgagtgtgcagacctatgatgaccctcgcttccacctccacgtcccatggccacggcccctcccttccaagctccttctgcctgaygggcagcaccccctcccgtctggagtctgccggggcccttcctgctctccttcttaatttattttctgtcttggagggaagctgggtgcacctgctcaggtggccccctagggccagaagacctgtcagtcactttcaaatacatgttctttccagctcttccttgccaaaggttctaaaaacactgttgtccgtctcacccaaaaagctaagcttctgtccaatccttaacggtagctataaatgagaagcataagcttggtttccttctaacatccggcaagttagaagatagaacgtatttcttcacttattcatcacatatttgcagggcacccctacrcgggacagcagaggtcccaggccggtgctgcacccggagccaggctcggagctggccgcgcgccctcagctgaaactcaccggaggcgcggccgccctgggctgagaagacgccgtcggcccaggtggcatcagaacccacaggaggaagacagccagcccaggaggagccatggggggcctctggggatcgcaagggtcgaccccatcctccctgaaacaaggccggaggttgaggaggtctccgcccggccccgcagctgacaaccggtggagaaaccgcacctgccacgggaggggccgcggggtgggctcgagccaccatggggctggtacaagcaccctctccgctcaggacctcggccctcatcccagggcaccagggctcacagggggatgggcccgggtggggacgagggtgtggaggggcaggaagcacggcgggtggagcggggccgggtgcgggggtcgcgggggaccgcggggacggggccttgtgatgcaggagacggagggggctggtgacggaggacgggaggccgcaaggatgggggacgcgacatccttttcccctcccaccggctcaccagggatgcgcctccgcgactgcccgccccaatcccagggcggaggcctcgcgcaaaacccaggcgccgcggctccgcgctccggctgagggtccgcgccgccgcccgcccgctccttcccgctcggccgcggcctcagggacggatactccagcgcgcggttccaaccgaggcccgtggcgggtaaggccgggaggctggggcgggtacggggccgggagcgaggggcggcgcggggaggggatgcagctgtcgcccgcacagccgtgtctggacgcggccccgcaactcgaccccgtcccgcccccagccagctgctgaactaggcggccggggacggcattgagcgccgggcgcgcgcgggagggactgtccctggggcacgggtctgctggggcggagtccgcacggtgtcagcagccgcttgtcctccgcagcatccgcaaggcccgcacccaggctttggccccaaaggtggggaccaggcccaggcacggcccgtccccgttccagaccctgatctgagccagctcttggtcccggctaccgcgtcctccaaacacaacgcccctccccccatgccgcctccccccgccccccacatcccagcaacgcgtgcagagctccctcccccaggcttgctcccccgcccgggcctggacgcccccagaggcctgaacgctcctgccccgcttctacacccccaatccaggtgcacaaccttcaggtgcagaaccctcctgccccacctgccacttcccagcgcctcccccaggcctaagtccctgatgctagargttaaaccgcgcccccccaggcctcagtgggcctccaagatgctgggggcaccctgatcccacaaaagatgggggtccctctgctctccagccttgagccctccgccyctgggcacccgatctccatggaaactaagggccctttccctctcttcccgcaggtttagccccacgaagatgaactgggcacccgcaaygtgctgggctctgctacwggcggccgccttcctctgcgacagcggcgcagccaagggcggccgcggaggtgcgcggggcagtgcccggggaggggtccgcgggggygcgcgcggggcctcgagggtgcgcgtgaggccggcgcagcgctacggtgccccgggctcctccctgcgcgtggctgccgccggggcggcagccggggcggcggcgggagcggccgcgggcctggcggcgggctcgggctggagaagggccgcgggacccggggaacgcggcctggaggacgaggaggacggggtgcccggaggcaacgggacaggccccggcatctacagctaccgggcgtggacttcgggcgctggacccacgcgcggcccgcgtctctgtctcgtgctgggcggcgccctcggagccctggggctgctgcggccctaggcctggctgggctcggggaccacatctggcccccggcccgcgccatcccccaggatcctccggcctgggctcccccttcctcccttgcccacggtcttggagccccactgggtgcaggagctgctggctgtccctgtggacccgccatccaccgtcctgcccacgccgcctcagcctgccacctcccacctagaggagaccatgggccctgccccacccactccaggatgttagggtcccctcagccaaaaaggcagctgcctgtggctcctgtaccaaccgcccagccacgctccatcgccgcccaaagggaggtgccaaggccaggaacccaagccaccccggctcccctcgcctgcccaggggccgtggtgactcacgggcagggaggcgacatcaggctggttctgccactgagcccctgaggaatctgaccctccccaaaagaagcagtgaaatggaccaaaggacttaagaatttggggggaagtgagggaaaaacgttaggtgctaaccacctgcccagaagagtggatctcacagcccaggaacattcccaagcaggaaaaccgtccgtccgaggaacgtccatcctggctctctgcggctggtgggaaaacacaccctgccctgaggggctgtccaggccttctcccccacaccctcaggccgagatccgtgagagacccactttgctccaacaacttgaaacaagtcactttaccctccttaggacccattttgggggggaaaaaccaacacattccagagctttccaagtcctttgracttcaggttcacattcagggatcacacagttctgcctgttctcagggcacrgcaactgccaatcccgctgaagaggcctccctgggcacagcacaggctgcacggtgcacgcatttccctgaaggcagccccttcttcggaagcagctgttccaggcctcggaacagggcctgggtatccgcgtggtgggctggcagctgacggcctgctcagtggagccaggagctaactcagaccccaaagcaagcagggggccagtggcggggcccagcgcccagcaggacacccatgcaagaggctgagccccccaacatccaaggacaggagagacatggagtggcgctggacagtcacgacaaggacttgcctccagcactggacacacctgtgttaagaccagccctctgcttcccagtcccgccagcctggggcatcctccatgggctcagcactgagaggtcttgggtctgccacgttctctagctctccagtcacccactcatccagggtaggaggggttctccctgccccccgccgtggccttgggatctcaccctctccatgtcctggggacagcctcgccctcagccggactgcatccctcctgggcctgagcctcgggactcagtggacaccaaagtcaagaccagcacccaccacgggccctgccagcctctgccttccccagctggcctgggttctggcctgggtgaggatctggaagctgttggcaggactcaaccaagcactgctctctagctccagggcactaagccacaggaggcagcgccctgcagcctcccgtccacactgccagcaatgcccctggcccagtgagcccagacgctcctccaccccttccagaccaagctcaacgcctccaagaccagcaggccaaggccaagccctgccccagatcctcataggcagagaagcccttctgacatttcccccaggaggcagggggtggtctgagtctcctcacagcagagagacccaccggagccccctcaactttgcagatgcccacctggaaaatgggctgagctgcaccagaccctcacacaccacagcactgcaagctgatggaatrttccagttatgatggacacttcgtgatctgcaatgactgttgattcagcacattagcatctgacacagccaacctgaatacttcctgccccaggcggtcagggttatggcacgatgcaggtggcactcaggggctaacttcaggctgatgagtgtgtggggtatggggcagcagaggcagccagccagcaaagaggggccactgagcaccagggccctggtggaggctgctgtgggacggtcaggccaccaccgcaaagaggcagccrgagcttctgcacaggatgtccctggccccaggtcctgcagcaccttagtccatactaccagccccacccaccttccttcctcttccctcttctaggacacaggctgtggaccccttcaggtgcactataatggggctggaggggcccccacatctctcagccccactaatgcagaatcccactaccmgtgagctagaaggtgctcagaggccaggggtctctactgcccatgccgggcggccttccagtcattgcacagcaaagccatgtgcagggcgtccccctcaaccctgccctgaacatgccccagggcactgaggggcgaagccagtgcttgggctctgctgctgggagtctctggtctgtgtctgtgtgtgcctgtaagtgtgaaataaacctctctgatggcagcaagcctctcacttgttgtaggactgcaagacactggaccgaaagcctccaacacaaaccctagctgccaacctgctcatttcttaggttycactggtgagagcagctttaacacacaggcccaaggcactacggtgcacctcacaggccagtaagaaacaggccctttaactggagattttaaaggttacaggttatagctttaactccttctgagacagcatccatttctcaagaggcctgagcaggaagctccgggagaaccaagcatgcggagctgctcagggacgtccactgggaagcctggtgtccactcccacctgcttggsccctgcaactggggtccctggagctggccaggctgtggggcgccagagagcacagcaccctagtgaccagcatggagcttctggaccgggtgagctgtcttgagcctcaaccacccaggtcaggaggtctgggaggccacatgcctccggccctccctacccggacaagttcagggcaaagtctcagccggggggtggccccgcaggacgtcgaggtccagcatcacggaacccagcagcccacggcggaaagtctgcaggaagtcacgggctgccgcaggatagttaggctgaataaygttcacgttacctgggggacgggagggttcagtgaggaaggagccttcacagcaggacaggcccagcccttacccacctgagggaccagccctaagaggctccatgatggcatcagggaagcccagggaacgggatcacactcagaaagaaaacagcttgagctacgctgcccggagcctccaaggccaggcatgtgaggcctgcaggtgtccacctagcactgcccaatacgcggcagggctggtctcaccctcggaagcctggactacaagcccttcctctccagaactttctgtagctcccctgccctgaaacccattcccagaagacccggcgcatgctccttgacacgttcctctcctccctgcctcctccagggatggccggggtcccccagggtgatggggtgaggctccggtgcccgcatcagcgacctcactcacccgtgcccgtgagcaccttcaccttctgcgtcttccccagcttcacagccacactcttcagcacgcgctctacgttgtcacaggcactgcccaggccgtagtgctgcacgtacctgcacataggctgcaggtcagcaccagggggcccagcactgacaccgcrcggccagccaggccgggcccttcctcctgaatgccacaaaggccacggccaggcacctcctgtgggtgacagtgactgcggcgctgtggatgaccaagatgagactgcaggtgaccggtgctgggccccgggggagagccactatctaagaatcatccctgagcttcgtcctgtgtggccacggccagcagcatggggggcggctcccaccaccggagcccttgccgcagcgggaggagtaacagctgttcacacacacaggcttcatccactctatccrgggtaggacaggcaggcctctgtgcaggcccaggtcctggaaactaaaagaggagcacagcagaccatctgcaaacatactctgtttgctgctaaggatggcactcggtaacttccaggcagccagtacacctgcatcctctccacccggctgggtgtttgagcggtgttttcctagcacagggaccagcatgggctgactaggcacccaccgctgctaagcgtcacccagtgattgtaacgggcactctgactcctcacagtgcaggctctgggcagagaggcctggagggaaaggccagcacagagcagccactcacagggacaaacaccaccctaagccttgggagcccgactaacccagacccaacactctcccaaccttcctgacagccaggggtgaggggaacctgtctcgtggctcccacgagggcaggctcaaccttgaggaggctggtgccctcggacctggtcacagcatgagccggtaacagaggactcaccccaaggcccagcaaagcaagacatgagctcagagcccataggagcatcagaacsctgagtaacacaggttctaaatctaacttctcggaggcaccaagcatgagctctgaatcagcagcctcaagggtgccctggtgctccaaaaaagctgtcccaggagagaggagcaagcctggaggaggcgccccggaccacccccgagacctgccaatgggaagaactcctgaaaggaccggactgtttccaataatctaactgtcccacaacaaagctcaagaatttttacaggaatgtagatatccatcacctaacaaggtgaaactcaaaatacatggcatccagccaggcatggtggctcacgcctgtaatcccagaactttgggaggccaaggtggacggatcacttgaggtcaggagttcgacaccagcctgttcaccaatatggtgaaaccctgtctctactaaaaatacaaaaattagccaggtgtggtggcacatgcttgtaatcccagctacttgggaggctaaggcgggagaatcgcttgaacccrggaggtggaggctgcagtgggctgagattgtgccactgcactgtagcctggctgggcgacagagtgagatgccatctcaaaaaaaagaaaaaaagaaagtcattggtagcttgatggggatggcattgaatctataaattaccttgggcagtatggccattttcacaatattgattcttcctaccaatgagcatggaatgttcttccatttgtttgtattctcttttatttcattgagcagtggtttgtagttctccttgaagaggtccttcacgtcccttgtaagttggattcctaggtattttattctctttgaagcaattgtgaatgggagttcactcatgatttggctgtttgtctgttattggtgtataagaatgctggtgatttttgtacattgattttgtatcctgagactttgctgaagttgcttatcagcttaaggagattttgggctgagacgatggggttttctagatatacaatcatgtcatctgcaaacagggacaatttgatttcctcttttcctaattgaataccctttatttccttctcctgcctaactgccctggccagaacttccaacactatgttgaataggagtggtgagagagggcatccctgtcttgtgccagttttcaaagggaatgcttccagtttttgcccattcagtatgatattggctgtgggtttgtcatagatagctcttattattttgagatacgtcccatcaatacctaatttattgagagtttttagcatgaaggttgttgaattttgtcaaaggccttttctgcatctattgagataatcatgtggtttttgtctttggttctgtttatatgctggattacatttattgatttgcgtatattgaaccagccttgcatcccagggatgaagcccacttgatcatggtggataagctttttgatgtgctgctggccatcagagaaatgcaaatcaaaaccacaatgagataccatctcacaccagttagaatggcaatcattaaaaagtcaggaaacaacaggtgctggagaggatgtggagaaataggaacacttttacactgttggtgggactgtaaactagttcaaccattgtggaagtcagtgtggcgattcctcagggatctagaactggaaataccatttgacccagctatcccattactgggtatatacccaaaggactataaatcatgctgctataaagacacatgcacacatgtgtttattgcggcattattcacaatagcaaagacttggaaccaacccaaatgtccaacaataatagactggattaagaaaatgtggcacatatacaccatggaatactatgcagccataaaaaatgatgagttcatgtcctttgtagggacatggatgaaattggaaatcatcattctcagtaaactatcgcaagaacaaaaaaccaaacaccgcatattctcactcataggtgggaattgaacaatgagaacacatggacacaggaaggggaacatcacacacctgggactgttgtggggtggggggaggggggagggatagcattaggagatatacctaatgctaaatgacgagtnnnnnnnnnnnnnnnnnnnnnnnnnnnnnnnnnnnnnnnnnnnnnnnnnnnnnnnnnnnnnnnnnnnnnnnnnnnnnnnnnnnnnnnnnnnnnnnnnnnnnnnnnnnnnnnnnnnnnnnnnnnnnnnnnnnnnnnnnnnnnnnnnnnnnnnnnnnnnnnnnnnnnacagcaacagaaaccacaaaacaggcacaaagtctttactgagctgcggtggggcaaagccaagcagcctgacgcccgcctgcccgacgcccgcctgcccgacacccacgtgcccgacacccgcctgcccgacacccgcgtgccgacacccgcgtgccgacacccgcctgcccgacacccgcctgcccgacacccgcctgcccgacacccgcctgcccgacacccgcctgcccgacacccgcctgcccgacacccgcgtgcctgataactgcgtgcctgatacccacgtgatacctgtgtgcctgaggcccacgtgcctgataccggcatgcctgataactgcatgcctgatacccacctgcctgatacccgcgtgcctgatacctgcatgcctgaggtcctgaggagtagagggacagaaaaaacacctgcagatatgaagtttcaaaatgatgcaaatttcatgaaaactacaaagaccgagatccaaaaatctcaatgaactacaagcacaaggaacacatagaaaaccataccaaggtccatcgtaatcaagttgctcaaaagcactgagagagaaaatcctggaagcagcagaggaacaaacacacacgaccacagacggctcatcagacaccacgcaggtgaaaaagggagaccaacccctctcaagcactaaaacaaacaaacatgaccgcagacggctcatcagacaccacgcaagtgagaaagggagaccaacccctctcaagcactaaaaaaccccgtcaatctggaattctacacgtagagaaaatatctttcaaaacaaaggtgaaataaagacatcttcagacaaccaaaagctgaaagaattcatcactagcaaacctgccttacaatacatgttaaaggaaatccttcagacagaagtaaaatcacaccagaaggaaacctggacctacacaaagaaatgagtgcaggacccgtctatgaaaaaacaggggcgcccgctcccgctccctctcccgctcccgctccgctccctctccctctccacggtctccctctccctctctttccacggtctccctctgatgccgagccgaagctggactgtactgccgccatctctgctcactgcaacctccctgcctgattctcctgcctcagcctgccgagtgcctccaattgcaggcgcgcgccaccacgcctgactggttttcgtatttttttggtggagayggggtttcgctgtgttggccgggctggtctccagctcctaaccrcaagtgatccgccagcctcggcctcccgaggtgcagggattgcagacggagtctcgttcactcagtgctcaatggtgcccaggctggagtgcagtggtgtgatctcggctcgctacaacctccacctcccagccgcctgccttggcctcccaaagtgccgagattgcagcctctgcccggccgccaccccatctgggaagcgaggagcgtctctgcctggccgcccattgtctgggatgtgaggagcccctctgcctggccgcccatcgtctgggatgtgaggagcccctctgcctggctgcccagtctgggaagtgatgagcgcctcttcccggccgccatcccatctaggaagtgaggagtgtctctgcccsgccgcccatcgtctgagatgtggggagcgcctctgcccggccgcgaccccgtctgggatgtgaggagcccctccgcccagcagccaccccgtctgggaagtgaggagcccctctgcccggccaccaccccgtctgggagttgtacccaacagctcattgagaacaggccatgatgacaatggcggttttgtggaatagagaagggggaaaggtggggaaaagattgagaaatcggatggttgcygtgtctgtgtagaaagaagtagacatgggagacttttyattttgttctgtacyaagaaaaattcttctgccttgggatcctgttgatctgtgaccttacccccaaccctgtgctctctgaaacatgtgctgtgtccactcagggttaaatggattaagggcagtgcaagatgtgctttsttaaacagatgcttgaaggcagcatgctcgttaagagtcatcaccactccctaatctcaagtacccagggacacaaacactgcggaaggycgcagggtcctctgcctaggaaaaccagagaccttcgttcacttgtttatctgctgaccttccctccactattgtcctrtgaccctgccaaatccccctctgcgagaaacacccaagaatgatcaataaaaaaaaaaaaaaaagaaaagaaaacacaaagaaatgagaaggtgtggatggtaaactgatgggaaaatatatacaactttttttctggtattttatatttctttaaaagataactgtatgaaggaaagaaagtatatctggaggttataaaatatgtaaaggtaaaatatatcatgatgatgatggcacaagratcaggataagaaaaacagaaatgcattattgtaaggtcatcacttaaagacatactatacaccctaaagcaacctctcccaaaagttgtagacaataagctaacaaagaagatacagtagaatcgtttaaaaatattcaatcctaaagaggcaagagagaggaaaaaagaaaacaaaaattgagacaaatgggccgggcacggtggctcacatctgaaatcccagcactttgggaggcacgtggatcacttgaggtcaggagttcaagaccagcctggccaacatggcgaaactcccatctctactaaaaacacacaaaaaaattagccaggcgcagtggctcacacctgtaatcccagcactttgggaggccgacatgggtggatcacctgagattaggagttcaagaccagcctggccaacatggtgaaaccccatctctactaaaaatacaaaaacaattagctgggcatggtggcaggcgcctgtaatcccagctactcaggagactgaggcatgaaaatcatttgaacccaggaggcggaggttgcagtgagacaacattgtacctctgcactccagcctgagaaacagagtgagactctgtctcaaaaaaacaaaagtggtggctatattaatatcagacaagaaagatttcagagcagagaatattctgaaggataaaaaaagatcatttcctaatgataaaggcatcaaatcatcaagaggacataacaatctcctgagcgtttctgtacctaacagcagagcttcgaaatacacgaagccaaaactgactgaacagcaagaagaaacagaaattcagttacagtgggaaatttcagtgcccctctcacaataattggtagtacaaatagaaaattaccaaagtagaaataaaaaaataaacatcgaatggaaatcaatgacataaaaaacaaagacaacagaaagtcaatgaaaccagaagctgattctttgggaaaaatcaataaaattaataagcytctagccagactgttctcttcaacctgataaagggcatctaagaaacacccatacctaatactgcactcaatggtaagagactaaaagcttcctaccttagatcaggaacaaaaaaagatgtctgttctcaccacatctcaaatactaaaaaaacctgtcaattgtattgaagactgtagccagtgcaataaagsaagaaaacaaaatatggcatctggactggaaaagaaaaagtaagatgatctttatttgcaaatgacataattgtctaggtaaaaaatctaactggaatctacaaagagctaatagaatgaataaatgagtttagcagggttacaagatacaagatcaatatacaaaaatcaattctacttctgtatactagcaatgaaaaatcaaaagtgaacataaaaacaataccatttacaatagtatcaaaaatagcgaagagttaatagagggaatgacatcaccaaatagagaagtagaagcaatctggcttccctcaccctctcaaagaaaaccaaaaccaaacatccagtgccaagaatatcaccagcaatattccrgaactcaaatctgaggatgagaccagagaagtgaaaaaaactccaggcagaaagtaagctgcaaaaaacctctaagcaaacatccaagaaaaaaaaagccagacaggaaagcctggataacaaatccttcaatgcaaaaccacagacatatgtgcacaagaaacaacagctaacggaaaaccgcgaccttctcaaacagacaaagmaaagagccagtggccaaccctaatgagatggcaacgtgtaagcgctcaaatcaagaattcaaggtaacagttaaaaaaaaactcagcaaactccaataaaacacagaaaaacaactcacaaatttgtcagacaaatttaacagagattgaaattaaaaaaaaaaaatcaaacagaaatcctggaagtaaaaaatacatttgctgaaaaatatattagaggctctcaacagcagaatggaccaagcagaggaaaaaatcagtgagcctgaagactggctatttgaaaacatatagaagaggaaagagaaaaaagaagaatgaaaaggaatgaagaacacatgcaagatacagaaaactgcctcagaggagcaaacctaggaattactggggttcaagaaggaaccgagcaagaggaaggcacagaaagtttattcaaagaaataattacagaaaaattttcaaaccctcagaaagacataaatgtccaggtacagggaggtcagagatcaccaaacagatttaacccaaataaaactaccctacagaatataataatcaaactctcaaaagtcaaggacaaagaaagaatcctacaagcagtaagtagtacaagtagtaagagaaaagcagcaaatatatttataaaagagctccaatgtaactggcaacagacttctccaggaaatccatataggccaggaggcaatgggatgatatattcaaagtgctgaaggaaaaaaaaatgcaactgtcaactgaggacacaccttcaaacatgaaagagtaaagctgagggaattcatcagacccaactttcaagaaatgctaaaaaaaagttcttcaatctgaaagaaaaagacactaatgtacaaaaagaaaacatgtgaagtataaaacccactggcaaaagtaaacacacagactcagaataatactgtgaatgtggtgtgcattcattcacatctctagtgtgaagactaaaagaaaaatgtatcaaaaataataactacagcaacctggaaagagagagccaatataaaaaaaaataaattgaaataagaaaacgtgaaaatttgggggaaagatgcagttaaagtacagaattcttcagtttctcctttgtttctattctttcctctgtgatcacagataaggtgtcatgtgtttaaaatgattgttttttaagagaggggtctcactctgtcacccaggctgaagtgcgatggcacgatcatagctcactgcagcctcaaactcctgggctccagcaatcctcctatctcagcctcctgagtacctagggtacagtcacagagcaccacgcccagctaaaataactaaataacttgttataaatataaaatgctttttgtaagcctgatggtacactacatataatacatagactaaaaatacaaagcaacaaattaaaacataccaacagagaaaatctcttaaccacatgcgaaggaagacagtaaaaaaggaagagaggagttacaatcagaaaacaagcaacaaaatggcaatattaagtctttatccataataatattgaaagcaaatgtactatattctccaactaaaagacatagagtaggccaggcacagtggctcacatttgtaatcccagcgctttgggaggccaatgtggaaagatcatctgaggccaagagttcaagaccagcctcagcaacatagcaagacctcgcctctacaaaaaataaataaataaataaataaaacagccaggtgtggtggcacacgcctgtagtcctaactatcaggaggctgcggtgggaagactgcttgagcccaggagttcaaggctacagtgagctatgatcacaccactgcacaccagcctgggcaacagagtgagaccctgtctcaaaaacaagcaaaaaacacagagtggctaaatggataaaaaacaagatcaaactatatgctacctataagaaaccgactttacctataaagacatacgcagactgaaagtcaaagggtggaaaaacatattccatgtaaacagaaaccaaaaaaaaaaaaaaagagcaggaatagctatacttacagatgacagaacagactaaaagtcaaagactgtataaagagcaggagcagcaatacttacacaaaatagactacaggtcagactgtaaaaagacacagagaaagtcactatacgattgataaaggggtcaattcagcaagcagatataacaattataaatatctatgcacccaacaccagagcacccagatatataaagcaaacattgatagattgaaagtgagaggcagagtgcaatacagtaatagtagggggcttcaacaccccctctccgtagggtgtttccagccagaaatcaacagaaacactggagtgaaactacatgctagatcaaacaggtctaactgacatttacagaacatttcacccaactgctgcaaaacacacattcttctcatcggcacatggaacattctacagaatataccatatgttaggccacagaacaagtttcaacaaatcaaaatcttattgagtatcttttctgactcgatgaaataaaacaagaaagcagtaacaagaggaacctcaaaaactacacaaacacatggaaattaaacaacacgctcctgaatgatcaatgggttaataaagaaattaataagaaaaattttaaatttcttcaaacaaacggaaatggaaacaccatatatcaaagtctatgggattcagcaaaagtgttgctaagacggaagtttatagcaacaaacacctacgctaaaaaaagcagaagactccaaataacctaaccatgaacctcaaggcaccagaaaagtgagagcaaaccaaatccaaaattagtagaagaagagaaataacagagatcaggagaccagagcagaaataaatgaaattgagttgaaaaaaaaaataccaaagatcaatgaaacaaaaaattatttcaaaaacataaacaaaatccacaaacatttagctagaattttaaaaagatcaaaataaataaaatcagtaaacaaaaaaggagacattacaaccaataccacagaaatacaagggatcattagggactactacgaacaactacacagcaacgaactggaaaacccagacgaaagggatgaattcctggatacaaacaccctgcaagactgagccatgaagaaatggaaaaacttgaacagatcgataataagtaacaagatcaaagcagtaataaaacgtctttcatcaaagaaaatcccaggtcctgatggcttcactgctgaactatcaacagttaaggaagaactagtatcaactgtactcaaactattcaaaaaaactgaaggggggaacacttccaaagtcactgtatatggcattatcctcctacaaaaaccagacaaggatacggcagaaaaagaaaacgacaggccaatatccctgatgaacacagatgcagaaatcctcaacaaatgaccagcaacccaaattcaacaacatgttacaaagatcattcaccacgatcaagtgggatgtgtctcaaggttgcaaggatggtttaacatatgcayatcaataaacatataacattaaacagaaccaaggaaaaaaaacaatcatttcaacaaatgctgaaaaagcattcaataaaattcagcatcgcttcaygataaaagctctcagcaaactgagtatagaaggaacacacctcaaaacaataaaggccacgcatgacaagcccacagccaacagtatattgaacaaggaaaaacagcttttctccaagatctggaacaacacacagatgcccatttctaccacttttattcaacagaatactggaagtcctacccagaacaattasgcaagagaaagaaataacagtcacccaaattggagaggaagaagtcaaaattatccttattcacagatgacaatcttatattgggaaaaactgaaagactccaccaaaaaactattagaactgataaaaaggtttcagtaaagttgcagaattcaaaaccaacataaaaaaatcagcagcaggtaatcggaaaaagaaatcaggccaggcacggtggctcacgcctgtaatcccagcactttgggaggtcaaggcaggcggattacctgaggtcaagagttcgagaccagcctgaccaacgtggagaaaccccatctctactaaaattataaaaaatgagccaggcgtggtggcacacgcctgtaatcccagctacttgggaggctgaggcaggagaatcgcttgaacccaggaagcggaggttgcggtgagccaagatcaygccattgcactccagactgggcaacaagaccgaaactccatctcaaaaaaaaaaaaaagaaatcaagaaaatcccatttataatagttacaaaaatataaaatacctaggaatacatctgaccaaagaagtggaagatctctacaaggaaaactataaaacactgataaaagaaattgaagaggacacataaaaaatggaaagatattccatgcttatcagtcagaagaatactgttaaaatgtcaccacccaaagcaatttacagatttaatgcaatcgttatcaaaatagcaatgacactctgcaaagaaatagaaaaacaatcctaaaatttgtatggcaccactaaaggccccaaacagccaaagcaaacctgaagcaaaaagaacaaagctrgaggcatcacactacctgacttcaaaatattcgtagtaaccaaaaacagcacgctactggcataaaacacatacacagaacagtggaacagaccagagaacccagaaatacatccacacatttacagccaactcattttcgacaaaagtgccaagaacatacactggggaaaggacagtctctcccataaagggtgctggttaaactggataaccacaggcagaatgaaactagaccccatctctcacaatatacaaaaccaaatcaaaagggattaaagacttaaatctggccgggtgcggtggctattacaggccaaggcaggtggatcacgaggtcaggagttcaagaccagcctggccaagatggtgaaaccccatctctactaaaaatacaaaacttagccaggtatggtggcgggcacctgtagtcccagctacttgggaggctgaggcagagaactgcttgaacccaggaagcaggggttgcagcgagccgagatcgtgccactgcactccagcctgggtgacasagtgagactccttctcaaaaaaaaaaaaaaaaaagacttaaatctaagacctgaaacttcaaaactgctagaagaaaacgtaagggaaacgcttctggaaattggtctgggccagattttttttgtataagacctcaaaagcacaggcaacaaaagcaaaaataataataataataataggcaaatgtaaaaaaatttacatcaagctgaaaagcttctgcacagcaaaggaaacaatcagcaagccaggcatggtggtacgtgcctataatcccagctacttgggaggctgaggcaggaggatctcttgagcccaagagttcgaggctgcagtgagctgtgatcgcaccactgcactcagcctggacggcacggcaagacccgaagcaagaaacgaaactatcaaagcactgacaagataatctacagaataggagaaaatatctgcaaactactcaacaaggaattaataaccagattatataagcaattcaactcaacagcaaaaaaaaccacataactatttaaaaatggacagaagatctgaataattatttctcaaaagaagacatacaaatggccaacaagtgtatgaaaaaatgctcaacatgactaatcaccagagaaatgcaaatcaaaaccacaatgagatttcatctcaccctagttaaaatggcttttattaaaaaacacagagaatagcagatgctgttgaggatgtagagaaaggggagctgtcgtacactgttggtgggaatgtaagttagtacagctactatggaaaacagtatggaggttcttcaaaacactacaaatagaactgccataggatccagcaatcccactactgggtatagacccaaaagaatggaaatcaatatactgaagaaatactgcactcccatgctcacggcagcactactcacaatagccaagatatgcaatctacctaagtgtccatcaaaggatgatggatacagaaaatgtggtacataaaacacaatgaaatattagccataacaaaggacgaaatcttgtcatttgcagtaatacaaacagaactggagatcattctgttaagtgaaataaacaggcacagaaagacaaataatgcatgttctaactcaaatgtgggagctaaaaacgtggacttcattaagacagagagcagactggtgattaccagaggtgaggggaagaggggatggacagaggttgattaatgaatagttcggtagagtgacttcagttaacaggaatctacaggatatttcaaataccagaagagagcaattcaaatgtttccagcatgaagataaatgtttgggatgatggatatcccaattaccctgatctgatmattacacattgtatgaatgcatcaaaatatcataggtaccctgaaaacatctactttgtatcaaaagataaatcttagcattaaaagtttaaaaaagagttcaatataaatcttacaaaacactgtaaactacaaaacactgcaaagaaaaactaaagacctaaataaatgaagagatacactatattcacgggtcagagactcagtgttacaatattgtcaattcttccccagactgacctataaattcaggggaatctgccacccggcctcaagaaacatagggatttttgtagaaactgacaaagtgactgaaaaatgcatgagaatacaaagaaccaggaaaagacaaagcaattttgacaaagaagagtgggggctaccagcactgcctgatttcaaatctcatattaaattagaagcagttaccaagacggtcggtcacacagaaaagtgacacagttagagtccacaaacagacccacgtatatggacaaccgatttgcgacaaagatgcaaagacaattcagtggagaaaagacagtctttgcaacaaatgtttccggaacaactggttctccatgtgcaaaaaaaaaagaacttcaatctgcagcttgtaccatataccaaaaaatcagaaaggatcatagccctaaatgtaaaacctaaaaccatctatcttcaatgaggaaacccttgtgaccctggtttaagcaaagatttcttagatatgacaacaagagtactctggaaaagatctagctgataaactggactgcatgaaaattaacaattctactcctcggaaaacactgttaagagggctgaaaagacaaggcacagacttaaagaaagtatttacaaaccgtatctctgattaaggacttgtatycagaatatattagaaaaaggttacaggctgggcatggtgcctcatgcctataatcctaatgctttgggaggctgaggcgggcagatcccttgagcccaggagttcaagaccagcctgggcaacatggggaaaccctgtctctacaaaaaatacaaaaatcagctatgtgtggtggcacacgcctgtagtctcagctacttgggaggctgaagtgggaggatcgcttgagcccaggaggtcaggctgcagtgagctgagactgtaccactgcacttcagcctgggtaactgagaccctgtctcaaaaaaaaaaaaaaaaaaaagattaaaacttagcaataaggaaagaaacaactcagttaaaaaaaaaaaagggaaaaggatttgaacagacatttccccagagagggatgacaaataagcacatgaagatgctcaacgtccctgtcatcagggaaatgcaaattgaaatgctatgcgacacccctacacgcccgcccatcagacaggccaaagttaaagactgatcttagagaaactgaaggactcattccctgcttgccagcatataaaacagtgtaactaccttggaaaacaatgtggcggtttcttaaaaactcaaacatatgcctcccctatgatccagccactctactcctaggtattaacccaagggaaacgaaagcccggatctacacaaagacctgtcggtacatgaatgttcacagcagctttatctgcaatagccaaaacctgcaaacaacccacatatccatcaacrggtgaagggacagactgcagcgcacctggacactgaaaccgcctggcaacaaaaaggatgaatgacggacaacacacgacgacacacggggatcacacaacaatcgtgcygagtgacagatcaacaagaatgcacatcctgtgtgattccatctacgtggaattctagaaaacccaaagcaacctacagggacagtagacggctgcctgggctcagggaggggcaggaaggtgtgatcacgaaggagcacagggactgggggtgacgggaacgctcatttccttgatttcacgaaggaggagcagggactgggggtgacgggaacgctcrtttccttgatttcacgaaggaggagcagggactgggggtgacgggaacgctcgtttccttgatttcacgaaggaggagcagggactgggggtgacgggaacgctcgtttccttgatttcacgaaggaggagcagggactgggggtgacgggaacgctcgtttccttgatttcacgaaggaggagcagggactgggggtgacgggaacgctcgtttccttgatttcacgaaggaggagcagggactgggggtgacgggaacgctcgtttccttgatttcacgaaggaggagcagggaykgggggtgacgggaacgctcgtttccttgatttcacgaaagaggagcagggactgggggtgacgggaacgctcgttttcttgattgtgtgttgctttcacagacgtatagccatactcccgaacttgtccaactggacgctttaaacgatgtgcaggttaccgtgtttataatacctttataatgctgggggtttttttgtttgtttttttttttttaaatgaggtgactaggaggaggggccccagctgccctgcattcactgcactcacccaaagcgctggtgtttgttgagggtgtacagcaggtagtcagccatggtctcctccccgaccaggtggtccagcaccgttcctgtggaagcagcagccgaggtgagcactggaaacagccacatctatgttcctgccaagttcaaacacatcccttccagtcctagcccaaagacaccgtgccgtgaggaagaggccagccactgacaaagacactaaccaagaggacggcactcggctgtggtcccggcccccactcctgcctggcacctgcgaccaacctctctgccctggtccgtcaaatggggaaagggaaggccactcatggggcagggtggaatggtgaccagtgcctgtcagctgtgcactattacagctctcacactaagcttcgaggaaggtctggcagcaaccaggtcaaaggcagtaacaactcccgtctaggggccctgtgccaaagccagccctaaaggtggggtggcaggggccccggtcccagccccagccccagccccagccccggctcaccacacagggccagcttcaggcctgtctccacactttcaatccgaggagccagcacgccaggagtgtccaacaggaacatcaggggccgctcagagacctgtgtgggcacagagggcatgatcaggccgcggtggcagcctcccacccaggtgggccactcaggaagcctgggcagcccctggcacccaatgctccgaggaaggcctcagggacccaaccccatggcagcgtcactctcaccaagctccagggttccccagaggatctaattcccacttaatttggagaataaataaaagcgtcaggtcccaacagcttgtcttctgctcccaaggagaacacaaggaagggagtggagggtggggcggggggcgccacactcaggtctgtcctgaccactgcatggccctggacagtggcctcctcatctggaaatggggaaaacagcgtgccttccccaaaggtttggcgcaaagactatgacgactgtggaataagggcaggggcagtgcctgccccgggggtgctcagcggggacactgagtggaggggagggaagcgtggtcagcagccggaagccacacagaggtcggcaggtgccagacgcctgcagagctcttgacagagtgctgggcctggcccctgaggactccacctgaattttggacatcacagctctggtgatcccaggctcgccacccaccctggtggctttccctgtaggaaaaggagaaaaggaggctcaaatgtatactaaacacagaagctgcagaacaagtagggagacgtatgtaacaaacacatctgaccagccaagcagggagactatgtaacaaacacaacttaccagccaagcagggagactatgtaacaaacatatctggccaaaatggaaactaaaagccagatgagcttcccaaggctataatttgtttcactttcagtcacaaaccagctcacagcaagggcactttccaagccacacagagactgagattcttcaacaaatgcaccagaacctaactccccaggactggaaaggcactgtcagactgcggaggtcagacctgagctgctccttccacgcagtcccccacctccctcctggacccacccctgcaccccaaggtcagcctgcctcccacagcactgtccacaggcgactggctgctctaggacccagctcagggtgtgtcccaaggaggccactccactgtggacaaacaacccaagaataaaaaacacaagtgtccatccagatgaatggacaagacaggatgtggtctgtacacacaacggggtgatcagccttaaaaaggaataaaattctgacactcaggacaacacagacgaaccttgaggacatcacgatcggtgacatcagccagtcacaaaaggccaagtactgtgagtccacttggaggaggcagttacagtcatcgaattcacagacagaaagtggaacgaggggtgtaggaggctgggggagtgactctttgtatttacagagtttcattttcaggtaaccaaaatatttgaaaatagtggtgctggctgcataaccctataaatgcacttaataccactgataaaaaataatacgcttaaaaataaacttaaaagaataaatgactgtaacaatgctccaattagcaccaaaaacaccctctctgtaaaataacagttcaccgtagtttaaagccttcagatttgcacatcatgaatgggtttgttaataaatgccttattaatatgaaaaatgaagccaacaaggacttgaattaaacttgaaaatacttaaggaaaagagcccacggggcagtgaagggtgctcggggctcctgctttgaatcagagtctgagaacaggcacagagggaggaraggagcgcctgcractccggagtccaggaaccctccagcaaaggcaaggcggacgccatggaggaatggccttgcagcctccctgcctgataatccagccccgtctacttcacacgctttgtattctctggatcaaagggattttttttcttttcttttctttttttttttgagacggagtctcgctctgtcgcccaggctggaacgcagtggcacaatctcaactcactgcaagctccgcctcccgggttcacgccattctcctgcctcagcctcctaagtggctgggactacaggtgcccgccaccacacccacctaatttttcgtatttttagtagagacggggtttcaccgtttcagcaagaatggtctcaatctcctgacctcatgatccgcccgyctcggcctctcaaagtgctgggattacaggcgtgagccatgcacccggccaaagggatttaaataaatgaacaaatatcaaagtttagaaaagccatcttcatgttaaagattttaaaagagagaaaaattaagtgtgaaattcacagaacgacctggtcccactgttcagccctcctgtgaactggactgaacgagacaagrtgtgctctggggctgcggggtcagcagaagactggcagtgctcctcgggcacgtcccctccaagaaagatggtggcatcagcacatcagccacacgcgccagtacctttcctgaggtgatcagccgcacgcgccagtacctttcctgaggtgctgcctccggagggagttgatgagggaggacttgcccacgttggggaccccaatgaccatgatacagtactccaggttctgcgcaggcagagagaggggtcacagggcccaccgtggccgctagagcctgagactctgcaaccccacccaggcaaggggaccccaggccaggtcagctcagggaagaagggaggttaacgccgaggctctgcccacccagcggggacggcctcggccctttccactgaagagaatgagaggacaaaggaggggcctccctgcctggggcgctgcgccttctccttggagaggccaggcaggaggggctggcccatcccacgcccgcctcccactcccagctctgggccccaccaaccaacctcttttcggtggtagcggtggcttctcccaatcagttcagtgaccatcgggatgatctgcaacaaacacccactcatggagccaccccaggtcggacgtctgtgcactgacccgctccttctgccacctcagaacaggattagggattccagtgtctccactttcacatatccgttaggaaaacagaaacctcctatctggaattctacccaacatttcataggcaaactgggcgtcacccttcatctggaggtagcacaccaagtatccggtgttgggaaactggagttctgtccaggtcacagatgtcagactgagctctggggccggggaccacctatgcccgtcccctcccatcaaaaacaagcagggcagacccggggcttcagtgacagctgtaactaccttttaatgaagaaacacatcaagccagaaaattctaccacatacaactggaaacatgagctacctgagtctccaaaagactctgaccacctacaaccctggaatgcgtctacagcctgaccttgtgccctcagtacagggagacccacttgccccaggagatcgcatccgtgtgtggcagctggaaaccaacacctaggatcttttccaaagctctgcttcttactaaagcataaaacagtttataatgctcctcgaacctactgaagcagaagcgtcagagagagcacagacgaaaagcctacctgcttgacattttcatcctttacacagttggtaaaaatgacattttttaggccttctccttctaagtgttgcataattttctgaaagacacaaaacatttctatgttactttttttactggagtctyggctctgtcacccaggctggagtgcagtagcacaatctcggctccctgcaacctccgcctccctggttcaagcgattctcatgcctcagcctcccaagtagcagggattacaggcatgcgccaccacgcccagataatttttgaattcactggccttaacatgcagtgaaactagtgcaaagcagtatcatatttctaaacatcagtgctgttaatcatctgacctaaagtatgactgatgtttaaatcaacaagtccttcactgattcagctggttttatttagctgtccacgaagatgacacggatggagagatcaaacataagacacacacctgaagccacacactctgggtagtaaatgtacttgggtgtccctgctcagggaggcagaaggcagggccacccaggggcaagtctacctctctcccgattcttcagaagcactggcctttctctgaccaggtcagacactgctgtgccctatactagacggccacccaccagtctacaaaaagtcacattttcaaaggcaggagttgccactgatatgacgtaaaagtaccaactagtgaaaacacttgcgatgatttaaaaaaaaaaaaaaaacaggctggacgcagtgactcacgcctgtaataccagcactttgggaggccgaggcgggcggatcatgaggtcaggagattgagaccatcctggctaacacagtgaaaccccgtctctactaaagatacaaaaaattagccgggcatggtggcgggcgcctgtagtcccggctgctcaggaggctgaggcaggagaatggcgtgaacccgggaggcagagcttgcagtgagtcaagattgcgccactgcactccagcctgggcgacagagcaagactctgcctcaaaaaaaaaaaaagaaaataagacacaagacaaagagataaaagaaaagacagctgtgcctgggggaccactaccaccaagatgcagagaccggtagtggccccaaatgtctggctgcactaatatttattggatacaaagcaaaaggggcagggtaaggagtgtgagccatctccaatgacaggtaaggtcacgtgggtcatgtgtccrctggacaaggggcccttccctgcctggcagccaaggcagagagagagggagaaagagagacagcttacgccattatttctgcttatcagagactttcggtactttcactaattttgctactgctatctaaaagacagagccaggtgtacaagatggaacatcaaggcggactaggagcgtgaccactgaagcacagcatcacagggagacagttaagcctccggataactgcgggcaggcctgactgatgtcaggtcctccacaagaggtggaggagtagagtcttctctaaactcccctggggaaagggagactccctttcccggtctgctaagtagcgggtgcttttccttgacactgacgctaccgctagaccacagtcggcttggcaacgggcgtcttcccagacactggcgttaccgctagaccaaggagtcctctggtggccctgtctgggcataacagaaggctcacacacttgtcacgtctcactatgtcccctcagctcctatctctgtatggcctggttyttcctaggttatgattatagagcaagaattataataatattggaatgaagagtaattgctacaaactaatgattagtaatattcatatacaatcatatctatgacctatatctagtataactattcttatttcatatgttttattacactggaaaagctcgtgtcctcggtctcttgcctcggcacctgggtggcttkctgcccacaatgcgcactcactgaccactcgggctctggcagcacaacctggccacttcccacaggagacgtgcactccctgggtgtccaggtcacgaaccacacattagatgggggcacrccatatgagaaacgatgctggcacgcttctgcaaagcaaagggctgtttctaaagcagagcctgcctgggcaaactgacaagtgtgcgtccggcaactcttccgttagaacaagcgacctcgggaaaacacagccacactgctgaaggcgtctgagagaaaggcctttacctgctgctctgtaagatccgccaagtccatcttgttgaggaccagcaagtgaggcttaagcccaagggtttcctgaaacagagggttgcggcctgaaagtgggatgtggcaaaattaaggtaaaaattcctccaaagctttaccagccaaccaactttttttcttgccatcagtgaacgaatcatcacatcctgccaattcattcctcaagtacaggagaaaagccccagttggcaggaacatttaaacagtttcatagcccatctagaggattccactgctgcaccgtaccgtcaggcttgagtgacgcagatatatgtattaacaatgaagtttcaaagacacgcagtctggaccccacatcacagattctgattaactggtctagaaaggggcctcgcaattcatatttttaaaagcctccccaggtaattctaatgtgtaatatgacttcaggcagaggggcctcccctgctctgtgaaaggatatccgggcatcgtggacctcgatgatacagtccaccagcttcaggctgctctgcatcttcttcagccctggaaaacagaaggacgcctcagcgaaggggctcacaacctttctagagtgatcgattcaagctgaaccgtccagaatgacacgccaccataaataacctaaaaagactayatctgagggaagcgtactaagtaatggtaacagataacatccgctgagcgcctcctccaaggtccgcaccctcggagtgggagactgggaggcaccctgccacagggtgggccatgtgtcaaaagccagatgcggtcttcaccacctgactcatggctgactctgggtggaatatttaacgtgcatgggtcgcttttttgttttctgagacggagtcttgctctgtcacccaggctggagtgcagtggcacgatctcggctcactgcaacctccgcctgccaggttcaagcaattctcctgcctcagcctcccgagtagctgggactacagggacgcgccaccatgccgggctaattttttgtatttttagtagagacacggtttcaccatgctggccaggatagtctcgatgtcctgacctcgtgatctgcccacctcggcctcccaaagtactgggattacaagcgtgagccaccgggccgggcccttccacgggtcttaatctgggctataacacagagtaacactggctcattaggcccctgctacctcgcggggatgatgacgatagtcccctaaccaggaataccacacacaaccaagataacaaagcttccagctttcttcccctccagtgttaycygaagaccgaggacacagcctcagtcacccacacgggcccttcttccccctcggcccccagtacacgcggagccgacgcaggagtggccatcacaacacctagacgggctgggctggccccagaggtcttcttggggccgaattgtgacaaacagtaagaattaccaaagacgttaagcaggagaacgactcaagataccagttaaaactgaacaggtgccttcatacccactgtttcatttagtccccaaaagactcagaaaagtctatcttgtcaagaacatgtggaaacggaggcttcgggggattaaaagggcagaaggaacttgctgggaacagaggacaggggcggcgggccagaggtaggaggtcaagcaggccctgggtccgaggctgcgccgcgggggcactcgcgggaacgggcctctcccgcagctgcgcaggggaaggggtcccggcggctccgggagcgggtgagagcggggaaggaggggagacaagggaggaggggcggggccagcccaggacgaccgggagaagcaggcgacggccgaaaccggggtgggagggaagcagaggcgccgcggccgtaggcatgaccttgcccctccccgccgtgcctcacccttggccatgtggcccgggaaccagcgcgccacgtcgcgaccgcayagggggaagttctcccgccaggcggcctgggcggcgctgcacagcgcgcgcggggtcaatctcatggcggcaccgtccccggaaacgctcccgcagctgacctcctctgcgccgctgcgacccgcctctgaggttccggcgctgcgggcctccggcactgcgggcttccggcgctccaaggggccgcaccacggcctgcgcgtgcgcackacgttgcctccgcctccggcgaagcccggagtgggcggggcccgggcccagagggagggacgaatggtgggtcgagcgtcggggcgggactgcgaggagacccggggggacggggaggttcctgggttttgtgggtttaagtaattcgcagatttattaacattcattaaatattaaaaatcatcgttctcccttaagcatatcctgagtataagtgtaaaaatttagcaatctctttttacaatttggttaaaatctctcaaatactttaaatttaccttataaatgtaayctcttcattttctttttaagtacttcagggtttttgtttgttttgttttgtttgagacggagtctccgctctgttgcccaagagtgcagtggcacgatctcgctcattgcaacctccaactcctgagttcaagggattctcccacctcagcctccggagtagctgggattactggcgcctgccaccacgccggctgattttgtatttttagtagagatggagttccaccatgttggccaggctggtctccaactcctgacctcaagtgatctacctgtctcggcctcccaaaatgctgggattacaggcatgagccaccgcgcgcagcctcaagtacttcagggtttaatataacaaactgtttccaaatactgactgcagttctgctaaattaaaccgattaattaatgaggcygaaatattctccactgtccaagactagacataaatatagtcggatttcaactctaaatcagcagtcagcaactgctcaattgcacactgcgttacaagagtattactctaccggaatttttatttttgagacggagtctcgctctgtcgccaggctggagtgcagtggcgtgatcttggctcactgcaacctccgcctcccggggttcaagcagttctcctgccttagcctcctgagtagctgggactacaggtgcgcaccaccacgcccggctactttttttgtatttttagtagagatggggtttcaccatgttggccaggctagtctcgaactctgacctcaggtgatctgcccacctcagcctcccaaagtgctggaattacaggcatgagccatggcacccagcctctactggaattttttaaacaagctactgaaaataccaaacatgctcaaattctaagtacaaaaatattgccatggttctgatgttcttaaaccacctaataccctaatgcctagctgtaaatatttttgggcatgagagagtggcccctccgtggaagacagaagcctcccaggtggtttctgggctgagtggggcagtcagggcctcctgctaggtcaatgcccccaagccccctcctcaccaagccggtccctcacacccagagggggcagcctgggtcttgctgcctttctccctgggatacagaattgatgaaaccctaaatgtcaatgataaagatttttgtactttaaggaagctgcattccctcatggtcctaggagcacaaaaccacaataaaaccctgtggaatctgaatttctctcccaggcgtctgatgggcaggtgtccccagagagaacagtctggtgacacagcaaatgcaggtggggctgctggctacagagggaggctggggctcgggagggtggggtcagggaacatcctaggaggggcaatttgaacagagaccagagggtgagaagagaggagccctgcagatccaggctggggtggaggggccggagaggggcctggactcccagcacattcaccccaataccacgtggtaccccagcactgcccacaccccaacatcccccggcacccagcacactcaccccaacaccccccagcacccaacactacccacaccccaacaccccccagcaccccagcactgcccccaccccaacaccccccagcacccagcacactcaccccagcactgcccacgccccacacactccctggctcccatgggctgggcaccgtttctcttttcaggccttattatgtattcacttcctccagaaaacccccggcctcagggcagggcagggcacccctcatctccccagtgccctgcgaacctgtgaagtgggcgcctgatgcagcatcagttgatgagcaagaggagggttgtcagctatgctgtcatcccaggcagcagccacgagaatgcaggggcacgagaagcaactacaggacccagagttcagggaacccagagtgtggggccatgtgtggttgtggggattggagacacagggccctgtgcaacctgggcccggagcaagacaaagacaacagcagcagatgctggagccccaaggcaggaaggacaggacagcctcaaggcaggaaagatggctctgggagctgtggctgtaacttgctttatgtgtccagcatctccgtgagcatctggtgtctcagctcaagtcaaccctggccagactccaataacagacacaagaactgagaaggkggccctggttaccaaaaaccagaggaccctcattaacatccccaaatttcaagccagactgaaatctgtcagaagaaatgasggtcccagcctacccccgacacgggtggaacagagtaggctgggcccagctagagcctsggcctgggctgctgcacctgcggggcccacagactgaggaggcggtcrgcctccctccatcccgacagcagagccccgtgcgtcgtggagtaaaacgtgcgatgtgtggcttcccccgcaaacaggatctggagctgcaaagaagagccarggttagaatggggatgcaattcagacagcagggtctgggcaaggaaacacagaaaatggctcacaagcatccaccaagaagcaggaaaacagctcacacacctccaccaacggacgagaaaagggctcaygtgtacccaccaatagccaggaaaacagctcacacacatccaccaacgggcaggaaaacagctcacatgtatccatcaacagccaggaaaacggctcacacgcatccaccaacgggcgggaaaacggctcacacgcatccaccaacgggcgggaaaacggctcacacgcatccaccaacgggtgggaagacggctcacacgcatccaccaatgggtgggaaaggaagccactgcaccccgcagctcaggtgtgaacagcttttagagaaaacaaggggtgtaaacactgaatagtgatctggcctcaactcctggatcacatatggggagggtgggggagggatctgggagtcgggtgggcagaggaagaaagctacagccttatctgatgtaatgagaagtcaattagtaacacctgaaactgaaaactcaagaagcaacatttccaagcaggttcactgaagagagaccatgagctgattggaaaactgaacagtgactaaatattggatcatattgaggaatgattattaatttttaagtgggtaaatggtatcatagttatatggttttatttttatgttttctgagacagagtcttgctctgacacccaggctggagtccagtggtgcagtcatagcttactccagcctcaacttcctgggcccaagcctgagcagctgggactacaggtgcatgctaccatgcctggctacttgtgtgtgtgtgtgtgtgtgtgtgtgtgtgtggagaccgactctcactatgttgcccaggctggtctcgaactcttggcctcagcaaacctcctgcctaggcctcccaaagcactaggattacaggtgtgagccactgccctcagcatcatagttaagtattttacaaggatgtctttatcttttagaaacaggcaccaaaatatcctgaggtgagacaatgtcctgtgtgagtcatgcttaataaraaagggcgggggtgggcggggagaagcttggcttaggggaagcctggtgggcactgaaaggttctccctactttagtatgtttgacattttgcacaggaaatgtatctcaaaacgtggtagcagaaacatgtttttagagatgcagtaaacttagcgatgagaatcagctgggagcaccgtctgagaagggcaaaaggggctccacctgccattttggttttattttcttttgttagcactgcagaattctctgactttttaagctgtgtgtgtataattctcacaaaaacagtacatttaaaaattattcttagtttcaaaaagaaaatggcttccgagtctgggatcccagcccacccgccactggctggtgctcctgcagcgcccagactcggcgggggcctctgcagcgggacccacgccccccgactggggcacgccacatacctgggcgccggcgccgtctgcagggaggggctgagccagcaggtccaggtcgcccccagtactgcccacggccacgtagctgtaggaccccctagtgtacggggcgctgtgccagcgagaccgcaggacgctcttgggcgcggggagccgtgggtttcctgagccacagagacactgcatgttaaccgagaactctcacccacaggtctgcaactgtttttgtcatttttaaagattgagcagtttaacgtgaaagatgctatgcaggaagaaaagtgagcagcagagtgtgtcaggagaggctcttcctgccgcctctgacccgagagcagtgggctgggacccgggggsctctgacccgacagcagcgggccgggacccgggagctgtgacagcagcagctactgtttccgagccttgggttcctcctctgtaaaaatctgatcaaggacaacggcatttattttggtggcagaagtaggaagtgtttgcaaagtcatttcagttcctcggaggtaagaactgttactgaccccactaacatgaggaaggatggtccctggagatgtacagagtcagccaaatttagtttttctctgttctgcaaagtctagtttctgtttagagatcaaccagtaacgagcagaggcaggaaccrgcgtgtgtggtgagtacctacctgtcactytccggagcacttgggtgagacacagaagtayttcttcatccgacagagtctccatgaactcagactcaagtccggcaatgaacccacagagaacgtggacagacctgcatggagaaagagagccctgggatgaccagacctgcatggagaaagagagccctgggatgaccagacctgcatggagaaagagagvcctgggatgacagtgtcsagcccagvtctccgcccgcgtttctcagcaaggaaccactgatggagcaggggccccagaggcacaaagagccaccccacagagcgtccctcaggcagcagttcgcagagtgtgggcggcaaagtcctgggggtccgaaggccctgccagggaccctcaaggtcacagccatcttcagacgctaagacagcatttgctgtttccaccacgccgacatttgcacctgagcaagagccagggcaggtaaaccgtcccttagcagaatcaggcagcaacaggatccacatgcgcctacaggcgttcccaccactgcacatgagggttacaaaatgctgctttttgcagccgtcaaagaacgagatcatgtcctttgcagggacatggatggagctggaggccattatccttagcaaactaacacaggaacagaaaagcagacagcacatgttttccctttcaagtgggagctaaatgatgagaacacacactggggcctatgggagagtggaggatgggaggagggagaggagcaggaaaaataactaatgggtactaggtttaattcctgggtgatagaactaatctgtacaacaagcccccatgatacacggttagctatataacaaacctgcacgtatacccctgcctctgaatataaaaattaaaatatatatattaaaaaataaataaaaatgctgctttcacttgagaatgtccttgatcaaaggcagtaaaagttactaattttattaaatcttgatcctcgagttcatgtctttttaataatctgcgtggagggccaggcacagtggctcaggcctgtaatcccagcactttgggaggccaaggcgggcggatcacgaggtcaggagttcgagaccagcctggtcaatatggtaaagccctgtctaataaaaatacaaaaattagccaggcgtggtggcgggcacctgtagtcccagctactcggcaggttgaggcaggagaatggcrtgaacccgggaggtggaggttgcggtgagccaagatcgcgccactgctctccagcctgggcgacagagtaagactccatctcaaaaaataataataatctgcgtggagaagcgggatccgcatagaacactcctgctgcgcgtggtgcacggtggccgtggaggactcgcctagcacacgctattccaggcggggccggtgcgtctttcacagacaggctcagaactcaggagagcaccagtcagacaaatcatggtgtggtatttggtgacattttcttgaaaatgagcaaagtgtctctatcacaggaaaacaactaacaaatagtatttatagacaatgacaaagtttaagctctcaagcaaaaactgcaattttagaaaagcttgtttctgccaccaacagcataacagcttcccaatcctgaaagacttttctgagatcagtggtatgttaataaatttgattttttatattgtataatgaaatgtatcaacatttggaagactacatgaaccaatatatatatattttatttttttaagacatggcctccctctgttgcccaggctggagttcagtggcttgatcacagctcactgcaacctccgcctcctgggctcaagcaatcctcccacctcagcctcccagtagctgggaccacaggcacgcaccaccacatctggctagctttttgtatttttggtagagactgggtcttgctatgttgcccaggctggtctcgaactcctgagttcaagccatctgcacaccttggcctcccaaagtgctggaattaccggcatgagccaccaagcccagcctagtattttccaatgactaaagtcatggatagataaaagatccatttaaagtgcaagacagacaaatagatttcagtgtcacagaagacaaaaaattcactggtgtgctctccaatttcatatttggccaacctttaaggaattactactacatcttgacttttgaggtagtatcaaagaatacccacaatcatttcaaaagctatttaaatatcactcctttggccgggcgcagtagctcacgcctgtaatcccaatactttgggaggccaaggtgggcagatcacttgaggtcaggagttcgagaccagcctgaccaacatggagaaacctcatctctgctaaaaatactaaattagccgggtgtggtggtgggcacctgtaatcccagctactcrggaggctgaggcaggagaattgcttgaacccgggaggcggaggttgcagtgarccgagatcgagctattacactccagcctgggcgacaaaagcaaaactccatctcataaataaacaaatatcactccttcttccaaccacatatccatgtagatccacattttcttcctatgtttcaaccaaaataaaacatcaccacagaatgaatgcagaggaggcctgagaacccagatgtcttctattaagtgtaacactgaagagttttgcagaaaaggccgggtgtggtggctcacacctgtaatcccagcactttgggaggccaaggtgggcggatcacttgaggccaggagttcgagaccagcctggccaacatggcaaaaccctgtctctactaaaactacaaaaattagctgggcatggtggcacacacctataatcccagctactcgggaggctgaggcaggaaaatcgcttgaacccaagaggcagaggttgcagtgagctgagatcacgccactgcattccatgcattccagcctgggtgacagagagaccttgtctcaaaaaaaaaaaaaaaaaagttttgcagaaaagacaaaactgctgccacccttcattaaattttaagaaaatattcatttaaaaatgttatttatgctaacatagaataggtttgttactatcatctcaaataataatttaatttatcatgtggtgactgggtgcggtggctcatgcctgtaatcccagcactttgggaggccgaggcgggcggatcacgaggtcaggagatcgagaccatcctggctaacacggtgaaaccctgtctctactaaaaatacaaacaattagccgggcgtggtggtgggtgcctgtagttccagctactcaggaggctgaggcaggagaatggcgtgaacccaggaggtggggcttgcagtgagccaagattgcaccactgcactccagtctgggggacagagcgagactccatctcaaaaacaaaaaaatattttatttatcatggggtaaatttacagatgtgactcacataaacaaaagctctttgagatccccaaccctttgcaggtatataaaaggatgggacagctaccaccccgtgccacagacggtcccaccaaagcactcagggtcccactgatgtcctaagcaagagagcacaggaggtggggctgggcctggagcaggtggctctacacacagtcacccacccggctgcccaccagcaacccaggcctatctcaacacctggaatgccagttttctttctttttttttttagacagagttttgctcttgttgccaaggctggagtgcagtggcacaatctcagctcactgcaacctctgcctcccaggttcaagcgattgtcctgcctcagcctcctgagtagctgtgattacaggtgcgtgccaccacaccggctaattttttgtatttttagtagagacggggtttcatcatgttggccaggctggtctcgaactcctgacctcaggtgatccacccgcctcagcctcccaaagtgcagggattacagacatgagccaccgcgcctggccgaaatgccagttttctcttcagtgtgaaggagacacacaggcttcccccgtcacaggtgcagggctggtctgcagcctgcagcctcctgctcccagtggatggcaactatgaaccatctggcaggcatgccctacatcccaccccatcccgggtctttcagaacaagaacttggtgccccctcctgcggcatctctcagtggaaacgtggaattatttctgccatctgactatatcaggctgtctttgtgttttaatcttgctggaaaagtcagtccctccatccccacatcactcatgggattaactcctgaatcgccacgtggtctagatatgctgtttctaagagggccagcccatacaagggagcccttcctctgtgggtctcccattccattacttctcggaatgtttccttcaattatttcatcccatttaagtattgtctccccacgtatgggcagatggtgtttcaaagttcttctgtatctacaagccccagctccctgcaacattccagtaaacacgttcccactgactgaagactgagcctgcctgcaagtctacaaacacattctgggccctgagggaygctgacaacccgcatacagcagggcgccatctgtccccgcaggggtcaggcccaggtgcagccagcacctggtgggggggcgctcatgggaaccctacccattaaaccccctagaaataccctgcagtgaacagacacactgctgcgtcctccatcagatgaaggcctatgagccagccactcgcagaacttctcagggagcaaacgtacgcaaaggcaggcaggaccacaaagccaatgagcttcyggaaccaggcgtcctgtagctcaggggcagcatcctccaggggcgacgtgtcctcccacaccagctggatcagctggcagtctggctcccagaagggctcctcaaactccaggaagattttgttgttggtcccaaagcctatcttcctgattgcttctgccttctcagccggcaggggagggtcaaagaaggtgtccaaatgttccctaagaaaacctggaattcagaattggactcttcttacatcacataaagccctcyacggaagtcctgtctgtccagaccttggatccagcaatttcccctgctggtgtttatcctacagacacattcacacaagcagttttacttttttgtccttgtttttgagatagggtcttgctctgttgcccaggctagagtgcatgcagcaccatgatcagggctcactgcagccttgacctccctggctcagtcctcccactttggcctcccaaactgctkggattacaggcgtgagcctctgttccccacctttcacacaagtgttttttgtttttttgttttttgggttttctttttttttttttttgagatggattctcactctgtcgcccaagctggaatgcaacgatgccatcttggctcactgcaacctccacctcccaggttctagtgattctcctgcctcagcttcccaaatagctgggattacaggcacccacgaccaggcccagctaatttttctatttttagtagagatggggtcttgccatgttggttaggctggtcttgaactcgtgacctcaggtgatctacctgcctcagcctcccgaagtgctgggattacaggcgtgagccaccgtgcctggccaacacaagtgtttttaagtgcacatgtaaaactgcatgaaatagaaaaagtgaaggccacctaaatttccatctatgcttatgaaataatgacaagaaaacactgcgtggcaaattaacccgctcctttttttttgagacggagtttcgctctggtctcccaggctggagtgcaatggcacaatcttggctcactgcaacctctgcctcctgggttcaagcaattctccagcctcagcctcctgagtagctgggactacaggcacccgacggctaatttttgtgaactggctccttataaacaaaatgctcacagttgtagcaatgtatctactgacaatgtccccgtgatcagcacttagcagggcctgcaagcacttactccaaacgtgaatgaacaaagccactggagggaaacaaaaaagaccgctgtagatctatgtgtgctgatttggaaacactgacaagttctattaagaaaaaaacaaaaaacaaaaacaggcaaactgagcagcagatttttgktttttttttttttctgagacagagtctcactctgtcacccaggctggagtgcaatgacaccatctcggctcactgtgacctctgcctcccccgttcaagcgattctcctgcctcagcctcccaagtagctggaattacaggtgcctgccaccatgcccagctaatttttggatttttagtagagacagggtttcatcatgttgaccaggctggtctcgaactcctgacctcaggtgatccgcctgcctcagcttcccaaagggctgggattacaagcgtgagccaccgtgcccagccagcagcagatgttcatgtgtggacgatgactgcatctctgggaaacagcaatggggtctcagtgctcatccctgccccggggagggcaaagccaccccttggagacaggagttagggctgcggaggctcctgcttttcatcacacacctgtcaatcacacctagatttccaagtgagtgctggsmatcgctagctttgtgaacttgggcaattaagtgacttctctctacttgcctagatgttcaaatctgtcatatgtgggacaatgacagacacctcccaaggctgcctgagtcaatgagataactcaggcagagacccacggcagcgtgaaacccgtgggaagcaaatgtccagttgacagcaattatcctagtaactctgttttcaaccatctccaccttttataaaacagcttcaaaccacctctactcaaggacagatctaaagcaccagatctagaattaaacagaattatacacacggctccttcaacaggtcacccccaggcctgaccttcagaccaggcctttcatgccttttcctgtctgyagcaaagtgcggtgtggttaatctccaaggccgtcgcaaccctaaacggttacctccaagcgagcaggacgcatacttactcgcgttttttcttacggtgaaacccttaattccaaagcaygtaattgctacaaaacataacagaatcattccttccacctatctggaacttactagaacgaaaatgtgagcttcgtacacaagcaaacgccccagagccaactgaggcaggrtaagggcagaggcgggggcacttgggatgggggtttgggctgaaaacctgacctacctaagggcacggtgacgatgacatggtgcgccgggaaccggtctccatcctcacactctaccgacactggaaaggtctccccgggaaaggctgcctcctggaaggacccgttccagtggatggtcttcacaggcttctcaaaaactacagtgtcctccggcagggcggccatcatgcagtttgtgagtccttgatagcccctagaaagacggaagtgctggtttcgtagaggcccagtccctggaagggcaggactggtggaaatacgtgctccgagttcccacccgcatcaaaggtagctgcggggagctctccatcgctcagggccagcaaggaggtcagctccactctgtggttttccacctcaaggatgctcatacctgccctccaggctgtaagggagggttcagtgggcacagagctctcaaggcaatctgccggaaccagggcttcctccttaccaccacagagttcctgactcacaaatgcccattgcctggccaggagccttggggccaacaccaggggtgacgggacagcccgaggagggtctcacctgcacctggtacctggcagccaccctgccacagggagagggcctgtctggccccctctgcagttgaagcccctcataaatacaggagcaagagaagtctttactcttcttctttttttctcttttgagatggagtctcactctgtcgcccaggttggagtgcaatggcgcagtcttggctcactgcaacctccgcctcccaggttcaagcaattctcctgcctcagcctcccgagtagctgggattacaggcatgcaccatcacgcccggctaatttttgtatttttagtagagatgggatttcaccatgttggccaggctgttcttgaactcctgacctcatgatccacctgcctcagcctcccaaagtgctgggattacaggcgtgagccaccgcacccagccttacctttccttcttttaaacactctctctcagaaataacttttttggcttaaatgagcaaaactagggaaaggagcaaccagtctgtcggaatggggaggacaaatggtctcctgtccctcccatacccaagcaagagcggagctcagccagccccggtgccctggggagcctggtgggaggactggcggggcaggggctcaggcacgcacttagaaaaggtgcagtccagccccggcagcacggtatactccccaaagggtgccagggccaccaggtccatgctgtgggtgccgctcacacagcattccaggttgaagaaggagttcaggacggccagcttcagcttcctggtctcctcatcctctgtccagccggccacgtgctggccaatctccttcttgaggtactccccgacgctgggcaccggggtctctgcagcgtgcaggaactcccgggtctggtctatcaggccgtagaacagagtcgccatctccgccaccagctggaggctcacgctggccccggagctggcgtagctcacggagggcaggcccacgtgacccccggtctccaccagctggttctcctgggacagctccttctcccccagcagcccgtactcagcagccagctggaagacggggttaccccgggagggcccatggatccagtgcgcgcccacctccaccacgccacctgcgaggggacagcagatgccacctggaggtccctttcctagaagggtcaccccgagcccttctcctgggccacgcccacgctggccttcccaaggaggatgtaccacactgtccccaagggccctgtggtcccccagggcagggccctgtcagacccagtttaaggggagcacctgggcaggagggcacttgtcgggcggtgtggaccagagggaggggcgcagggtgggcgtaccccggggctgggggggcccccgtggggcagaatcagggcggccttgtggagccgtaggtcgccttccctggccggcgccctcctgactaactctgagccctgagtttcggggcggtgaactctggcggattaagcgagcggggattccctcggggagcccggtgaggcggccgggcaggtcggctgcgcgcagggcaggttggggccggcgagttcgggcgcagccggttgggttccgggaggggctccgggaggggcggttaccgaagcagcgctccgagcggatgcggcccccggcgcgggccgtggcctccaggacccgcaggtgcgggaaggcggagtggccgcagagcctctgcgccgcgcccagccccgcgatgccgccgcccaccaccagcacccggggtccgcccggggcctccccgacgctgccggtcgactccatcgcgcggtccgggcagtccgagggcttctgagtagccgggaggtctggagctctcggaggaggccggaggcggagcgagggggcggggaggcgctgggaggggcggggaggggcggggaggcgcggggaggcgcggggaggcgcggagaggggcggggaggcgcggggaggcgcggggaggcgcggggaggcgcggggaggggcggggaggggcggggaggcgcggggaaggggccgggccgagccccacagtgcgcctcggcctccgcgagcctccggactgggctcgggtctcagagggaagtgccccgcgtgggagggcccgcgaggacaggcgtcagggagcgtcccgcgctgccgggcggtgcgcgcgagcgtccccatggagggagaagccggccggccgggcgggccagtgtctcctgcaagggagacgagggcgcagcgagcgcttcccccagggacccgcgtcgagtgcgagggcgcagtgggtctgggggtgccacggtgtcaggggtgggacctgggagagcttaacgcgtccggaggggggctgtgaaagcctccagcatcgccagcgagccgtcagttcgcgtgtgcgcgcgcctgcgtgtgcgcgtgtagtcacagggctgcagggacacaggaccaaagtacaaagtacactcgcaaagtacaaagttcagaagccgagggcaagtgcagaaacgtccctcgcccgggaagttgagcgcacacccaggcacgcctgtgtttctggagaatccccggtgcaggcggccgagttttctgctgcatcgcagcccgcgggggttggaaaggctcccgccctgttttcaggcgcgtccccgcctcctgagccccggtcctctgcggaggggccgcgcgctccagtttgccagcgtgagcttcactcttcgctctcggcgtgggcctcctgagccgtgtcttactttcctttgattccctctcgtcccagctggagaaaaggctcccggaagggtgacctggtgtcgctggattccactccccatcactccctagccaaccccgcgagctgagctccaggcagggagaggggcgggtgcctgggagtcgggctgactccctgggcggtggcgggcaggggtcgagcgtcctctgtccgtcaggggcccgcagcaccaggaggcgacgctggatgcagtggccatctcctcctgcctccaggccatggggaacccagggcggatcccgggtcagcagggccagctgtccaccaagctgacccacccgacatgccaggactaaggaaagaagggctgccccacmcccttagtcggatggcaagtgtttggggtgcagcccccgccacgagtgtcacctgttctgcctgagcaggcttctctcttactccctgctcttgggcctgaagcagarccgctggctcagtggggcgctccattctgaggtccctggcrtgcaccacggaagcccagcgggaccacmcacccacctgccccagctccccagcggaggtcctgagatggcagattaaatactctggggttctgaattccacagatgaactgggtcccccacgggtatggccaagggaacggcccactccctagtggctccgtgtgaaatcgagctgctgctgctctcgccgcagggcccagctcactgcccagacataggagcacatcgccctgcgcacaggctgggtgggcacagctgtgagggaggccaccccatgcctcaggcctcctgcacaggcgtgggcctcgccactctgggtggacaggctactttggcccctcagcctctggggactgctgccctgttttcagcaccgtgtcaggcaccatctggtcagccagctcctccagccccgagactcccgtgtcctcattctcctgggccgttacggtcggccagtgcccagcctttgctggaaggctgtccaggctgggctctggtcaggcatcgatgtcccccaggcacctggcctcacctcgcgttgggacagcctctgcaagatggaacaggaagggtctggctttgcctctgtcaccttctcccggtccatcatgtcctcctggccagcccgttcctggttcctgcggggagcccagcccgaaggggaaccgaaagattctaacttaactctagttcagcctcccggatcctcctgtggagcggcaggatcccataaaagctacttggctcagcaacttgctggccaagcctccccacagcggtccacacaggccagaggtaaacatgcccatgccccacacctggaaggcctggtgcaaggaggggttgtagtgactgaaatgggaactctggctttatggcgcggagagagaagacatggacccaagagctgcagggtggggacaaccgacgcgctctttgtcccctggatgtggtgccacagcctgaatccaatagcacsggccrctgacgcgctgacctggggctgggttagtcgctcgtcccccttgctctgaaatggagagtgcacgtgaccacggccagtcctggacaatcctgccatgccagagccaccagctggaacacacggacacaacctcttttccatctgactggtacaaggtatgtgcttctcctagctccagagggccttgggtggtgccacctatggtgatcaaggtggcaactacccatgtggctttgactgaatcaggcttgttcattttttaaaatagctttattgatatagacatcatgctgtaagacttctcccgtttaaagtgttcaattcaatggtgttcagtttagttacagagttgtgccactgtcaccatcatccagtttagaacttttttgttttgttttgtttttttgagatggagtcttgctctgttgcccaggctggagtgcagtgacactaccttggctcactgcaacctctgccttccaagttcaagcaattctcctgcctcagcctcctgagtagctgggattataggcatgtgccactacgcccggctaatttttgtatttttagtagagacggagtttcaccatgttggaccaggctggtctcgaacacctgacctcaggtgatccacctgccttggcctcccaaagtgctgggattacaggcgtgcaccactgcgcctggccccaagtttaggacattttcatcaccctaaaaagcaaatggggatgcccctcagcagtcccccccattacccctccctccagcccctggtgaccgctaatctagtttctgtctctgtggatttgcctgttctgtacatttcatagaaatggaacctattcaatgcacggcctttgtgtctggctttttttactgagcataacatttccaaggcttgtccattttgtaatgtgtatcagcgcttctttcttttttactcctgaatagagtccattgtatagtctaatacattctaatgtatccattgtttggatatatgacattttgtttatccattcatgagttgatggacaattggctttttccctctttttggctattatgaataatgttgctatgaacgttcatgtctaagtttttgtggacatttgtcttcatttctctgaggtgtacacctaagagtggagttgctgtttgaccttttgaggaaacaacagactgttttccaaagtgactgcaccattttccattcccgctggcagtgtaccagcgttccccgctcacgtcccccacaacccgctgtgactgttgggctttttattgcagccagcacagtaggtgtgacgtcgtatcactgaggggtcagtttgcatttccctaatgattcgtgatgctgagcttatctgacactgattatcttcattggaggaatgtctgttcagtcctctcactatcttggtagtgtcctttcagacataaaagttttaaattttggtgaaatccaatttacatatgttctccctttgttgcttgtgcttttgtggctacattacttgatggaggacgggagctgcccggcctcctgggtcgttagaaaggaaacctcttggcggacacggtggtccactcctgtaattccagcactttgcgaggccgagaccggtggatcacttgaggtcaggagttcgagaacagcctggccaacatggcaaaactcccgactctactaaaaaactacaaatattagccgggcatggtggtaagcacccgtagttccagctactcaggaggctgaggcaggagaatcgcttgaacccgggaggcgcaagctacgatgagccgggatgacaccactgcactccagcctgggtgacagcgagacaagaaagaaaggaaagaagagaaggtgaaggagaaggaaggaaggaaataaacctcttttctgtctgagccatttcattttgggcctgtctgtcccagaggtttaactacactagtatagagcatcgtttagtaaaggtttgttgaggtttgttgttgatttgtttctacttacacgagatgtcttcatttttaccctcggtcttgaaataaaattttggtgcatgttcatttttggtttgaattgaattattttcttgaacatagtgaggcaggagaacagggtctggaggccaattcatgctgactccctagaactaaatcaaatggaaacacttccgctatgacaagaagtgtcctctccatttacacagggcgtacaccaagtaaccaatggaaacctctagagggtatttaacccccccaaaaaatctgtaacggggctcttgagccgctaggctcagccgctcccacagtgtggagttattttcgttgtcttttcttgtttcttttttgagacgaagtctggctctatcgcccaggctggagggcagtggtgcgatctcggctcactgcaacctccgcctcccggattcaagcaattctcctgcgtcagcctcccgagtagctaagaccacaggcgtgcaccaccacgcccggctaatttttgtgtttttagtagagaggggggtttcaccatgttgcccaggctggtctcaaactcctgacgtcaggtgatctgcccgccttggcctcccaaagtgctgggattacaggcctgagccaccgcgcccggccacacttttgttttccataaatctcgcttttgttgcttccttctttccgtgctttgtttgtgcgttttgtccagttctttgttcaagacgtcaagaacctggacaccctccaccggtcacaatagcagtttcgctttccattccattttatccagggtggttttatctccaccctggcgtttgcagaatccgggcaagtacacaaatggatgctccacaatacttgtctagatatttaaaaggtataaataaaataacttaaatgaatgaaatttttattatttaaatctgttgaagtcttgtgtgcatgaaaataaaactcctcctaatgtggcgttcagtgcccacgccgctgccaccgtgcctggccctgcgcctgggcgcgctgtgtccgctgctacagacgccggcgggcaggcgggcaggcgggcaggcgggcaggcgggcaggcgggcaggcgggcaggcgggcggggggaggcggcgcagagcccggcaggcgccgccgttgcctccgcctccgcgcggtctccccggggccagctgggaccccgagggctggggcgggggcgggggcgcgggcgactgcggcggggcctggagggcgctggtcccagcccagggcggggtcccggggacgcccctcggccttagatccgcgagcggcagctcgggcctgggggcggggcctggcggagagcgacccgctcactctgcccgggctgatctcgcgagggccgcctggtctcgcggcgctggcctgtgggcggagcgagccctgaaaggctataggcgagggggcggctccgcggggccgggcgaggagtccagagagccatggccgccctgcgtgtcctgctgtcctgcgyycgcggcccgctgaggcccccggttcgctgtcccgcctggcgtcccttcgcctcgggtgagtgcgcggtgagagctggcggcccgaatctcctcctgactccgacctgcacgcccagaccagatcccagaccgcacccccctcccacctgaccccgcatcccccacctgaccccaacccacacccctcttccgcctgaccccgcaccctcacctgacccctacccgcaccccactccgcctgaccccgcacccccccgcctgaccccgcacccccccacctgaccccgcaccctccggcctgacccctacccgcaccccactccgcctgaccccgcacccccccacctgaccccgcaccccccggcctgaccccgcacccctcttccgtccgatcccgcatccccagggcctgactccgcactctcctgcctgaccccgcacctaccacctgaccccgacccgcagcccctgcctggctcaggcctgcaacacccccctcgcctagtgctgcaccccccacctgacccgcacccacagcctgacccaggcttaacacccccccaccacccgccaccccgcaccgacaccacccacctgaccctggcccgcacccccaccccctgcctggctctgcaggaggccactctcaccaggccacgtcctgcgggaggcccggcggctggctggtactgccccagtgccaagacctctggccaactgggcgcagggtgggggttgtaaaaatccggggtgttccctcggctctaagagcaggcgtagctcctgtgcagccggccagcccgagaacaggagatgcaggtgcattttgtcctgggtgcctcctgaccagggccacccctcagagggtcctaagggaaaagctgacacctcctccccagccacagggggctgccctcttcctccctcgtggctcacccggggccccactcatgagcggccatcaccggctctagtatctgaggaatcttgggccatgccttgggctggggaagaactcttgcttcctcttcctccctcaccctgtgtagcagtggaccactgagttgtgttggtttcatctccatgctctccttggccttcggcttctccaccctgacagcagccctttcctggatcttgcatggcgggcactgctgccagacacttcacctgtgatcttccagttacccctagaaacccacaggatacggcggggcacagtggctaatgcctataatcccagcactttgggaggctgaggcaggtggatcacctgaggtcatcaagaccaccttggccaacatggtgaaaccccatgtctactaaaaatacaaaaattagccaggtgtggtggtgtgtgaccgtagtcccagctactcgggaggctgaggcaggagaatcacctgaaccctgtaggcagaggtcgcagtgagccaagattgcgccactgcactccagcctgggcaatagagtgagactcggtctccaaaaaaaagaaacccatagcacagggactatgatccctgctctgccactaacggaggcaagcatccaacacacaggctacctttgtcttttcaggttcaccttctcacccctggaacgccattgtcctttgtctccttcccaccttgctgtccacccagcaggcgcaggtcctgtgcagcaggccaaccgagaagcgcctgcgtctcccattttcgggctggcctgctgctccggacctgtgcctgatcttaatgctgcaggaacacccaggattttcacatcccccaccctgcgtccagttggccagaggtcttggcactggggcggtaccaagtgcaaggagctgccttacaccccctcacctgttggcatttgttgaaagaaggtgtttcctggtgccttgtctcagcagagtccagggctgtctccagagtggtgtcctgggaagagctgaccaaggcatattaggagaaggaaagcggctgtgggctgtgttctgtgctggggatttttctttttttcttttctttttttttgagacggagtctcactctgtcacccaggctggagtgcagtggcatgatctcagctcactgcaagctccacctcctgggttcatgccactctcctgcctcagcctccccagtagctgggactacaggcgcccgccacaacacccgactaattttttgtattttaggtagagacggcgtttcaccgtgttagccaggatggtctcgatctcctgaccttgtgattcgcccgcttcggcctcccaaattgctgggattacaggcgtgagccaccgcgcccggcccggggattttctttaggacatgttcaaacacatgtgaaagcagagagaatggtaccaaggctaccatctatccttgtgcctgagagctacacctggagccactgaggactcggcagggagccctcagagggcctcttggggtcacactgtatccaccratggggccacatcccttcccccactctccccagtttgatacctgtgtgaatagatacccctttttgccttcttgctccaggtgctaactttgagtacatcatcgcagaaaaaagagggaagaataacaccgtggggttgatccaactgaaccgccccaaggccctcaatgcactttgcgatggcctgattgacgagctcaaccaggccctgaagaycttygaggaggacccrgccgtgggggccattgtcctcaccggcggggataaggcctttgcaggtacgcgyggcagcagaggcctttgtgtctgggcagatgtgggaggcacgtatggccttgggagaagyctccagacagatttgygcctctgtgatggcagaggcatgcgactggggacttcctcaaatatcgagtgaagacggtcatgggaacggcttgcatgagcagctttgtgtatgccagagagctgcatgtgctccaccagcaaaacagcttcttcaaaggggtttaggtccttggcagtcaggctttgtgtgtgtcgagggcttatgccctgacaaatatgcctagcctctgtgggcgcctcccttgcacctgctgcctgcctcagggcccctctgcgtgacttctgttatagctggcattacagcgtccctacagctgtccacgtggcctggtgtcagccgtgcccagcaaccccactgcctgtgtctggtgtgctctgaagttccttgytggtctgagagatataggatgggtgggctctctgctctctggtaactggaacctcctttccactcctgctagctggagctgatatcaaggaaatgcagaacctgagtttccaggactgttactccagcaagttcttgaagcactgggaccacctcacccaggtcaagaagccagtcatcgctgctgtcaatggctatgccgtgagtgttgctgccaagagtctcctcctctcgtggttgaaggaaccgtgctgtgcatacacagcataacagatttttattttgaagaggcctttagttcccaggccagcagcctcctttcctgcctcatggtgctaaagagccaggaactgtgtggagaggacacctcctggcatctgcttttttcgtggctgttcacctgacagcttctccccagcaagcctctcttccagggtgggggaagagaggtgttggctttggctacatctataaactagcttcttttgctccccttgaaagctctgtgtcctggtactatttgaagtgctgagactgatcttggcctatagggaagcaatgtgatcatttcatgacgctccctgccgtgtaagccaggggtctgcggattgtgatcatttcatgacgctccctgccgtgtaagccaggggtctgcggatggagttttcccggcacagccacacccacctgtgcacctagtctctgtggctgcatttcggccacagcagcagagttgagtcgtggcagcagagcctgtaagaccctcatggtcctttacaggatgtttgccagcccctggtaaacagcatcaaccatctgtagttaacttatcataacaattatctagtttggtgccaccatgttagtctttgtcatacccccaacactgtttcttttaaatggaaaatttgaataagcaagcagagtgatttctgactgggttcccctggtaagactctcctgatgccgaatgttttacagtttggcgggggctgtgagcttgccatgatgtgtgatatcatctatgccggtgagaaggcccagtttgcacagccggagatcttaataggaaccatcccaggtaaagagtgacactgtctctggcatagatgccttaggtaattactcaaaatctgcctgtgtctcagggcccacagctcatrtctgaccagaggccctggatggacagccccatggctggtcagtggtccctctgtggacagccacrgaggctagagtggttgtgacagagcttggggggggccttagagtcccgggactgtgactgtgcccacatctgatggtgttgggagaggctggtcctgggtaacgctggcttctaaccatgacagttcttgcttgtgattcgtgtccatggcagagagggaacatggtgaccctgggtggcactgggagctctgcacactgccatctcactggccatggaggtcacatggcctgggttcagggtggggagtcagaccccccacccaggcccgtgagaagggcctgggctcttggcaaaaagcaacaccctctaaccccagggttctcctggtaggaagggtgggcccaggccgagcagccaggagggagctgagacctgaggggagcagctgcactcagggtgcccttcgctgccctctgagttggacgaggccgattctgaggcctggagctgtgagctcggtgcatttgtttcgggtctgatccctakaacagctgctactataagggaccagtgcctggggtcagggaggcctataagcttctaatatgttgaccacagaggctggggagggccctacagagtcatcaccttgatctaatgtcagggtgttgggggagtgtagtgtccagccctacggggcttagcaggtgttctccccatgtgcggagacgagagattgtaagaaataaagacacaagacaaagagataaagagaaaacagctgggcctgggggaccaataccatcaagaggcggagaccggtagtggccccgaatggctgggcgcactgatatttattgcatacaggacgagggggcagggtgaggacggtgaatcctctaagtgattgacaaggtgaagcaagtcacgtgatcatgggacagggggcccttccctcttaggtagccgaagcagagagggaaggcagcatatgtcagcattttcttctatgcacttacaagaaagatcaaagactttaagactttcactatttcttcttccactatctgctacgaacttcaaagaggaaccaggagtacgggaggagcatgaaagtggacaaggagtgtgatcgttgaagcaccacagggagggggttaggcctccggatgactgtgggcaggcctggagaatatccagcctctcacaagaagctggtggagcagtgttccctgactcctccaaggaaaggagactccctttcatggtctgctaagtaatggttgccttcccagacactggcgttactgcttgaccaaggagccctcaagcggcccttatgcaggtgtgacagaaggctcacctcttgccttctaggtctcttctcacaatgtgccttcagcacctgaccctatacccgccagttatttcttggttatattagtaatacaacaaagagtaatattaagagctaatgattaataatgtttatactaatgattgataatgtccatgatcatctctatatctaatttgtattataactattgttattctaactattttctttattataccgaaacagtttgtgccttcagtctcttgcctcggcacctaggtaatcctttgcccacaggggagcaccagatgtggggcctgagcttgaaaaggggctgctgcccctgatgttcccgggctcttgtgctgcctggcctctgacccctggacctagtctcagggcctatcttaagccccttggaatttgctggctgcrcagctgtgatgtcttcttgggttcactcatcacagtgccagccatgaccagcccctccctgcaggtgcgggcggcacccagagactcacccgtgctgttgggaagtcgctggcgatggagatggtcctcacyggtgaccggatctcagcccaggacgccaagcaagcaggtatgggttggggctgcccgcaagagccacctggaaacccggggygggagccccacagaaacccagggcggcatccaggtgtccccctcgggggagccccacagaaacccggggcagcatccaggtgtccccctcatgggtgccccacagaaaccctgagctgcatccagttgtctccctcgtgggagccccacagaaacccagagctgcatccaggtgtcccccatgggggagccccacagaaacccagggcrgcatccaggtgtccccctcgtgggagccccacagaaaccccgggcagcatccaagtgcccccacggtggttgcatgagcttttgggtcctgaggacctgggagaagactgactgccttttgtttctacattttgaagtactgtatgtacggaagtgaaccacacgtaagtatctggtacagaataacagcccagcaattgcgtccccaaaatgcagtgtaagcaatgggcatctccaggcctcagtggccggtcctcccactgccctgttggtgatcacagtccccgtgtctggccgcctctgccgtyggagctgtggccagcctggcccacatgtctgagagcacagtgaccgcagtgccaagatcactcagcactcaggaaggggcacgtgcggcacttcccgtgtggaagccgcccttgcttagcgtccagaggctggggtgctccagccacgctgctccccagcggccactcactcgagaagggatagacaagtgctgtttctgcacatcactcactgactttcttgtgtttcaggtcttgtcagcaagatttgtcctgttgagacactggtggaagaagccatccagtgtgcagaaaaaattgccagcaattctaaaattgtagtagcgatggccaaagaatcagtgaatgcaggtaggggatctgccaggaagasactggagaggtctccgtggctgtcaggagcattcctcagcagcaggctttctggctccaaatgaatatgccttaagccctcctgggcagaaatgsttctcagtgtctcagttctgctgtctgtagagtcgtggtttctggtcacgcactcaggaactccgctgagatgttcccagctcccctttgtaccagggcccaagaactgagccaggcctgggaggtgagggcagtacagagctggcagtggcagggaaaggctgagaagggagcagaggtcccaaatgtaaaatggtctctgccatggggaggctcggttcacctcccgagacctggggttggcggctgygtgtgcgcctggcaggtggctacgcaggcttgcagcccagcaccacgctgttcgttcttggcctggatcccttttagttctccctctgccagggaagtggatctgaacctccccctcctcagaaatgctcaagttttaatgtcacaatttattctcagcatgtggaatgagatggttattagctggttgagtccggacaggtgtgggtggccccaggcaggtcccctaacctctctgagtgcatttatctcgagggtgtggccgtcccccgggcttgccgttggcttgaggcaggatacagtgaggagagcattttgaaagaacggaggctgctgtcgcccgaggtgtttggcaaggtcgtgctcccctgggagaggatgctggcaccagccctggagccacagcgcctgcctccatctgcgcacctggatctgctctgcttggcctcgtgcaaagaacgggcctggaatgagcagagccaaaggcgttcttggtgccggccgcgcccagctctggctctcgtgctgtccttcctggttttcatccttggttatttttctctgtttgcagccccgttgccgcctcacagcctctcctcaagggcacagtttgccatctcacctttcatccagttcctctcccttcttggggccgtgggctaccggagtgtgacgtttgggggccatagcagagctgttggttctgccaggtctccgctggggcagtgcctttgagaagggcggcaccatggaagcctgtgcagggctgggccacgtcgaaagcacagttgtgcrtgggtcagtgaggagggcttcctgtcaccgtgcaggaaaagttctgcatgtaatatctccgttcataactctgggactttgtttttcagcttttgaaatgacattaacagaaggaagtaagttggagaagaaactcttttattcaacctttgccactgtgagtaaacagtgttcaacyggagaatcaagcaaattccagtcacacaagttgctgggaatttccttttaaatkttatcattaagtatcgtttctttctggtcagaactgccagcctcacctttaacgggatcagattggttccatcagtgggtcttgatgttaggaaaaaagtagagcatgtacaagttcaaaagtacagaaaccttacaggggcttttcttgtttttcctgttatgtgaggtctgtgaattgcaccctcaagcagctcctttattgaaaatgcagtttcagccgggtgggtgtcgagcatccgtagccccagcttcctgggaggctgaggcgggtcrttcgagtccaactgggcagcaaagcaagaccccgtctcaaaaaaaagacttttttaaaaaatgaggccgggcgcggtggctcaccctgtaatcccagcactttgggaggctgaggcgggtggattgcctgagctcaggagtttgaaaccagcctgggcaacatgacgaaacccgtctctactaaaaatccaaaaaattagccgggcgtggtggcaggtgcctgtaatcccagctactctggaagttgaggcaggagaatcgcttgaacccagaggcggagattacagtgagccgagatcacgccactgcactccagcctgggagacagagtgagactctgtctgaaaaaaaaaatgtaactcattttacccatgtttttttagatcattccaattatttggaataggctcaaatgtattctaataagataagctgaagctttagagcaatattttataagatttctgccagtaacttaaagtaattcctctaattaccatcataattttaattttcttccctttgaggcagagtcttgctcggtcgtccaggctggaatgcagtggtgagatctcagctcactgcaacctccacctcctgggttcaagtgattctcctgcttcagcctcccgagtagctgggattacaggtgcccaccaccacacctggctaatttttgtatttttagtagagacagagtttcaccatgttggccaggctggtcttgaactcctgacctcaagtgatctgcctgcctcggcctcccacagtgctgggattataggcgtgagccactgcacccggccagattaccattttaattcatgtctttcactgggagaaagtcatacttcggtgttttaattgttctataaaataaaaattaaaagtggtttgggcacctgaggaaggggtacagatgcgtgtacagatgcgtgtgtgtgtgtgtgtgtgtgtgtgcgcgtgcacacctggggacacacgtgcacacagtgtaagaaaagcagatgcagagttgagttctcacgtcctactccaacacagagtagcccctgatacaggccacccatcatccagttgatgacatggtgagtgaccaagatgggtgcatctgaggctctttagatgtgagcttgttggacatacacagtggctcctgaatgaccgtcacctagactggtagagagaggccgtgaaaatccccgcgcccaggcccagctctgattgggcaggtgttcctgccgctgagtcccctccccggccccctgggcccctgtgagcatgagtgaggcagagccagggagagacgggcggacattggcatcaggctctgtgaggatactgcgcgtccagctctgtttctrttccttttcctgccaggatgaccggaaagaagggatgaccgcgtttgtggaaaagagaaaggccaacttcaaagaccagtgagaaccagctgcccctgcttcacacctctgcttggagaggacaagtgcagcctgtcagttttagaagcaagtaaatcatcctcttttcaagagcagtgtccgtggtgtgyagytyctctccaattgctgcrtggtcgtggcccgacctctcacggcatgacagccttcgtcacccagcctgtgagggtcctgactggagcaccttctaaatctaagattctkctgaggagcccccgctggtccctctgggcatgctgtgctcggacggaaagcggggcctgygggtccttgtgtccctgccgctgaagaatggggctgctytgagggaaacgctgtctgctgccttcatacagatgctgattaaagtgatagcgattcagattacaccacgccttgtagtcatgtctgcaatgagcattctgtcatgttagttgtttttttaaacttttttgttttttcactgtaaggaacaacattcaaacaaaacaagtttgtatagtcagttgcctcacatcatacttccagggtggccactgtgaacagctgggcttgtgacttcstagagttctgtgcacgcacccacacacccctgcacacgggcacaggcatggtctatggttttcttccacgcccactcacgtcgagccctttcctcacgagagcccaccctattttcttcctacttctgtcataaggagctctctgttcagtttactgcattcttctctactgtgggaacacacgacgtcaacttgatcatcttaaccactgtgttttagagacgggctggagtgcgtggctcagtcacagctcactgcagcttgaatctcctgggctcaagtgatcctccccccctcccaagtagctgggaccacaggggcgcactcccacacccagctgactgtttaaatttaccttttgtagagacggggtttccccgtgttgcccaggctggtctgaaccatttcaaatgcacatttcagcggcattaagtacgttctcgttgtgcagccatgactatccaagaaagctttcattttcccaaacrgaaactgtccccgttaaacaacaaccccttttctgcttccctccagctcctggcacccacgcttctacttcctgtctctatggagggacctccatttatccctttgggtcaggctcatttcactcagccccaccccaaatccctgggttgaaatcctaacccctaccgtgactgcattaggaggggggactttgggcaatgactagtcacaagggcagagctcttcgagtgggtttagtgtcctaggagagagagggtggagctcctccagtgggattagtgccctatgagggggcggagctcctccagtgggattagtgccctatgagggcagagctcttcaagtgggattagtgccctatgagggggcagagctctttgggattagtgccctgtgagagggcggagctctttgagtgggattagtgccctatgagagggcggagctccttcagtgggattaatgccctaagagaaggcagagctcttccagtgggattagtgccctatgagaggatggagctcttccagtgagattagtgccctatgagagggcggagctcctccagtgggattactgccctatgagaagatggagctctttgagtgggattagtgccctatgagagggcggagctcctccagtgggattagtgccctatgagggggcggagctcctccagtgggattactgcccttaggagagccctgagggcactctttcacccctcccacaatgtgagtgctctgtgggaaggtgctgtctgtaaaccagggtgggcctcatcacacaccgaacctgcctggagccttggcctccagaactgtggaaagtcagtgtttatcagccacccagaccatgccactgcatcacagcagcccaagctaaggcacatactgtccagaaggtttgtgcctgttgtggcatgtttcaccatttgattttctcactaaatgacagtcctataacattctttttagtggccctgacgtttcatactatggacatgtcatcatgcccttggttctaggtatttcccccagggaagcccamctgcccccagctcagtgcagacgccagagagcgtttgcyggtgtctcctccacttggccccgcagctcagtgtgcgtaggtggtctagattgtggtcatggccttgggttgggtgggcagagtgtgtgagcccccaccgctgaggacttgggctgaataccaaggacaggttcacctgcatcaagaaagaagaacagtgatctttgccgagctctggttccctgaacgctgcaggtgccacgcccgcgtgtccggttacatgtacacgcaaagggggcacacgcatgctctgcgaccgcttgcctcggaggcattggctctgcactcccacccaccccgtctgtcctcctgtgtgctgtgattggagtccactagttcagagccggcttcagggtggagcaggtttatctcgcttctgccagggcaggtgggagttctcatgcagttggccttaaaacaggcgggagatgttcttttcagataagcctcagataagccttgggatctgggactgtttgacaaatactgaaacaggtacaaagggagtttgattcaggtccaacagggcataacaggctcttcccttggggtagggaatctggaacctgctcacttactggagtggagcacgtggagtctgcgtgggtcatgaaccactggccctggagcctggagtaaatatgcagagatagataggcaccaaatgttcaagtatgcaagggaggaagcctgaacattgagaaaatccactccgtttaatttttcatgtgcactggggtcagcctccataatctgatttcaagcaatggaacctcagagatccgtagggctggctgcagcctcacgttcatacctgtgtcagccacacttggctggaagccaagaaagggcccagcatggaagccgcatctcagagggctgcgtctagttatctggttccagagcttggcagggacagacacccaacccttaggctggggaatggactttgtcttcatgctggccccagggagcctggagggaggggtgccactgtccggggcaggggaaccccagactcagagtgaggcttccactcactcctgagctagttgacctctggccccattattgtttggggtttgattaggtgttttttctttgttggttttgtttttttttttgagacggagtcactttctgtcacccaggctggagagcagtggagtgatctcggctcactgcaccctccgcttcccgggttcaagcaattctcgtgcctcagcctcccaagtagctgggattacaggcaccagtcaccatgcctggctaatttttgtatattttgaagagacggggtttcaccatgttggccaggctggtctccaacccctgacctcaagtgatccgcccgcctcggcctcccaaagtgctgggattacaggtgtgagccaccgcgcccggcctgatttggttttgaagctgaaaactttcttgcccatctctataaaatcctcttgcccttgtatatttgggtaaacggtgactctccacttacaagttggagtagaaactgcccaggtacagctctgaaacccggtggcctcggtgcaaagccacccctcattggcaggccctgggcagccccggtcttctctctgcccgagtggccggcccagggccagctgttcaggtgctgctgggtgccagcctgggtggccccaccaggcttttccgacgcagcccaggccacttcccatggggacaggctcctagggccaagcagttcaacatggagacgtctgtttcctcctggttttctgacgcggctttgtcatttttcacatacagattgattttcagaactttttaggagccgccaggcctcagagcatttgtgtcacctcagggctgagggccagggccgcagtgctagccccacagctggtgtccagctgggaatcatgtggaagaaggtggttccgcggagggagggcctggccagcctgagctcagccaaaggtcaggatgccgccatcctgggcagggggttgcaggccgctgacaccgggggatgatggaggacccttaggtgtcctggcacttcgcagctgagcctggaagctgggcctggctgccctcctggactccccccaagggggtccgaagtcctggctcccgtgtcccttgctcccggtccctcaggagcgtgggctgaaggcctgggtccagctacccaccatggtgaccccagggacccggtgcgctccgggcattctgccaggcctaagggcagcacgaagtggtcagagggcagagaccctcatgaggggaggccgcggcggttgaaccccttcggcctgagggagctcggggtgggaggctcgggtagggacactggggagcccccggccacagcgcaagggcacccgagtctcggacctggcgaggagcccgtgggctggctgggtgttgcccccacgccacgactcagcccgcacgtccccagttcctggggctccccgcccttccttgagccgcaagcggaccccagcccgccgaaccctaggcccggcccgtccccaagccccaagcccgggaccctaaagccccgccctccaataaagccccgccctccccgtaaagccccgcctctgcccctaagccccgccctccccgtaaggcccccgcctctgcccccaagccccgccctccccgtaaggccccgccccggcccccaagccccgcccctaggccccgcccgccccgtctgccgggccatggtggcgctgaagggtgtccccgcactgctgtcccccgagctgctctacgcgctggcgcggatggggcacggggacgagatcggtgagcgcagcgggccggggcctcggggagcaccccgggacaggcaggagggcgaggcttgcrcggggacccccgggccgggaagggccgcgtcctggggtgtgggcgttgctcgggcctccctggcttccgggcaggaagccccctcccccgcattctttagggaactgagacctcgtggggctctgggcggagccggcccgagcttctcccggagtccctccccagacggcccgagagccctcgcgtctgggctgcccccgagggttcggcgctttttcttctcctggggcctggggtcccggggcaggggttgggtggccgggggcctggtccgggcatcgcgggcagccgcgcgtcctctggcccctggggaggcggccgggtccgggtcggccccctggcctggtcagcacccgacagcctcgcgggcagctgttgacgcctctctgcctcccaggcagggaccttgccctccccacctccccgcgtggcttccagccctgcggatctgactgcggccggtcggcggtgggggcgyccaactggctgacctgagacctcttgtgacccacgatctgccgccatgactgggtgggaggacgggcggcgccgaccccgagggcagggataggtgcygacacgggctgtcctcccggctgtttagttcttgcggacttgaacttcccggcctcctccatctgccagtgtgggcccatggagatccgtgcagacggtgagcgagccccaggtcccccagggcagggcgggcgggtgagcggtgctcctggctctgaggctcctctgtggcctgccgtggccccaagtccatgcttgcagtgtgaagggtgcagacaggcaggcgggcgggcgggctggagactgagtgctgcctcctctgccctccaggcctgggcatcccgcagctcctggaggccgtgctgaagctgctgcccctggacacctatgtggagagtccggtgagggctgagtcgcccctgcaccctgctgctccgtgcctcagtttccccttttgcgggcttcatagggcccacctgccttggagtggggggaagccatgtgtccccaaaggggccctgaccctcaccaggggagtcccgaatggtcacctgaccaggaaggctggcagtgcccagggccccagagctgacccctccctctaggctgcagtcatggagctggtgcccagcgacaaggagaggggcctgcagaccccagtgtggacggagtacgagtccatcctacgcagggccggctgtgtggtaagcctgcagccccagttgtggggaaaaggccagggaccctctgtctcctggaggctcaggaggagccaaagacagagggtcccaagctctgtcctcaagtggtctcccacccatcaccctgagaaccccggaccactggcactccttcaccagccaggtggaagaggtgcacctgggcagtgtggcccctcttcctctgcccccgagctttccacctgccctgccccgcccaggatcctgacctgccaggtgggttgtcacccaccacagcctgtgagtggagcctgggggactcaggatgcctggcctccacctcctcaatctcccctggaggggtgccccctggtcccaggtctctcgccccatcctggctatggttggtcagaggcttagctgggtgctgtgtctcactcagccctctccacaccttgccctgcaaggggacaggcccattttcctgggcaacccactggcaggtcttgagcagggcctccataaggggggccaggggctcttgtcctgggcaggggactccccccaggacagctggcaggggctcgacagtctactgagctgtctgggtggccccaggtcaggcagagacccaagcatggcaggttcctcgtccaccatgtcctgggaccccctgtcctaggccttgggagccagaggctgagtgaccgtggggcccttgccgggggagagcccaagaaatggaaccccacttcctggtgccctccctgctttgggccctggggagtccagggctggcccatgagggtttcttggcagggttccctccaaccctgccattttgtcttccagagagccctggcaaagatagagaggtttgagttttatgaacgggctaagaaggcttttgctgttgtggcaacggggtgagttccagctggctcagacctgccccatccccactggggcctcaggagctgcccccatccccaccggggggcctcaggagctgcccctaccctcttctcagcttctgcctggctgaggctagacgtcccacagagtggagagaccagggaggaatttcgggggggcagggcccccatttgcctgagcatcaagtgggtgaaggtggacagggtctgctctgtcccccagatgctgaagcagggtctcggcacyctggccctgcagcccagctcagtgctgggcttggctcctctgcagggagacggccctctacggaaacctcatcctcaggaagggggtgcttgccctcaaccccctgctgtaggcctggtgaagaccacctgggccggaagaggaactgggggcaccctgagctccagtaccaccactcacaacaggcctcccagtggcagctcccagacctgggccctggccagggctytaggggccggcagtcttggggtgggccctgccaattgggacgagtatccctgatttgtgaaaatgatggaaaaacgttcagtctcaagagtccaattccagctctgttctcacgcaggcttgtttggtgctgagctcaagggaggctgctggctccagagtggcccccacgtacccttgacgaaccttgagtgggaaatcaggcctggggccctggggactgggcggggtgcctggtgccctggggacaccaagggctggagtgggggcagtggctgccctggaggccttgagaggggtggggacttctgccatagcccctgggctgtggacaccaagggggttcttcaccggggtccattccttccacccgcaggagggcaggtggcaggggctggcctggacgcttcgggaggaactgtcggctggagaggcctcggtgtgggccatgccctatgcctgtggcataggtggcctcccgctgaaagcctcacttgccctggcaggcaggggaggtaaaggacacgaggtcatttggagtccagtgccaggcagaggtgggatgcagggggttcctgaaagggggtgcctgggaggcttgcccatgggatgcttggactggtccccaaggatggggaagaataaccaccagccactgtccggaccctcgtcttgctccccagaacttgctgcagtgacaggtacaggaagaagatggggcagggctggagtttgagggaccaagggcaggagtggggatgacaggggcttcccccagggcctggggctggtgtccccggggctccagggggcaagtcccagggttccagacccccactccagaccgcaggagaaccttgggggtgcaggcaagcccaccccggctgagatgtggctccaaatctggggaagggaccctgtctgggcttggctgcagactttggggtcctgtccgcctgctgctcccagatggtagccaaggctttctctgtgctcactagtggtcagccttggccccaggggcctcgcacttgcctggccaatcactgctcatctctagacccgatggccgcgtcgtggcctaacatcagcggtgtacgagctggttgcacacaccctcgcccatccccaggctcagccccacagatgagcctctggggttagtgtgccctctctagcatgttatataaatgaagccatatatgagcaaactaagtaaaatcacgagaaaaaacaaagtaatgggcaaaacaaaataaaatcaagatagctttaaaaaaaaaaaaaaagccacaaacaccagcttgggctgcctagggcaagaccctcctgcaactcagagatccagggtcttctacctgcctggggctcagggagtggggaaggagttgcccaaatctcagccctgagcgtgttgatccctcaatgccctcctaccccatgttcttatcaggatgacaggggaggctgccaagggagaagctggcagcccatctctggcccttttaggacagaacctcaaaggtcactggcctctccagctcatccataagccagggtaacagctcttacattgtgggacaccgtggggcacccttgggcagttactctcagccgttggtgtcctgggagagcgaggatttgctggcggtgcaaggagctcttccacacctgggcaaaccctcagccccctgagtggccacacgagggctgaacacggcaggatgagggacgggtggcctctctcccttgctccgttctgtcttagctgctggagctggcaaatgtgtgtggctcagccccgggcttggcaccaggtgcttctctctcaccatagggatgagactgccacgcaggaaccccgcccacatttgcatgtgcccaggacacatgcggtgtgtgagtgactccagcagcctggacctgcgctgcagcattgggcctgctgggccaggaggacaggatgggcacccagagtgggagctgcacagaacgtcaggagggcagaaaggccatgtcctgggcctgggtctacccgccctcacctgagacctgtgcactttccacctgagcacatgcacgtccgttcagctgggccctgagccccaggcactcggccaccctcctccccgaccctgtctcaggctcctgctgtagggagcccagggtgggttctgtttctcagctgagactggtcccagggtgccctctggtcccatcccctaactgctgccacacccctcaccatcccggtatacaaggaggagggcctgggggtagtgcaaccttctgggagccaagggtcacctgggccttgtgcagcccttgattctcctaggcagggcaggctgggccccggtcatcggtcttctggggcatgtggcctcccacctgtttgcaggggttgattgattgattgattgatcgattgagatggagtcttgctctgttgcccagcctggagtgcaatggcacgatctcagctcaatgcaacctccgcctcccagattcaagcgattctcctgcctcagcctctcaagtagctgggattacaggcacccggcaccatacccggctaatttttgtatttttagtagagacggggtttcaccatgttgcccaggctggtctggaactcctgatttcaggtgatccgcctgcctcggcctctaaaagtgctgggattacagaggtgagccaccgcgcccggcctgctggggtttatttgtctagctggggcagggtagggagggtcccagtcccaacagcctgggccttgggacagggcgggggcagtgatggcccctggagccctactgggggtggtagatgtggtcttggtcttcctccggtcccaggagcacctggtgatttggcatcacccacaaccggggcctctcctcgccctggtcctcctcaggcggagggtggtacaggctgtcatggtcgggctcgggactcaggacacggcccagggtgtcctcggtctccatccaggccttggtgcctagggacaagcacatgaaggtatagtctcagtttctttcccgagacccttggtctgtccaagtcaaccccacgagcggactctgctgctgtgaccttgtgcccacctggaaggatggggcccctgccctgacctcgtggcttctcctcggtggtcaagagtttcggcttctggacagggaacagcaccaccagctggtcgtccttctccggaggctccaccacacgggcgccccaggccctgctggcacagtttggtcaggtccacatgcaggtgggggaggtggacagaaccccccgcaggagggtgcccaccatcccagggcagccactccagccccaccaccagcagccccaggacaagcctctctctcaagagccagtgatgagtggcccccagtgctcccggccaggcttccacaccatgtccctgggtggctgcgtggggagcagtggtcagagccttggttgagcagtgtcccaagggcaaggatgtagggaacctcaggatccaagactgagccgccccagctacagccaccagccgtggagcacaagctgccctggacgctgtggggaagctgagtagggagacaccgtggagccccaagccctccggctgtgctctcttctccctgcatggggcgctgttgacagatgcccatgaggctggagtgccccctccttccaaaagctgctggacagggctcctctctgcatctgccccgtgctctccaggttcaggaagggcccagcagaacgggctgtagcttcagggaatgggtggtggggaggtggggttggggggacttacttctctgggtcctgctctgagggccagtgtttgacttgcatcttgatagggacctgggggagagtcacaggtgtgggctgggccacagtccacgcgggtggaggacacctggggagaggttgctccgaggcccacctggggctgcatggggtggaggtggctgcagggggtgggggcagggccagctcagcacagctcgagcgtctctagtgggcaagccactctcgggtgttgggattgcaagccgggattgaggttgccggcctgtgcccagatgaccagctggcctggaattctggccgggtctggggcagcacaggactgggatgtaacctggcaccgtatccctgacctagcactcccaaccccggccgtcaatgcactggctgttttctgcagtgactggttgggtctgtgtctgcaccaccccttcctggctggtgccgagagaaccggtcagccgctctgagcccagctaaccttagttgtcagctgctctgagcccagctaaccttagttgtcagctgctctgagcccagccatcctcagtggggcaaaggacagacaggagagcaaagcaggtgaccccaggggaggaccagtggctccaggggaggaccagcaccgtgggggggctgtgcccatgctcctgcgtctccagtcaaggaaggcgtgggcctccttcctcccgatccatcccaggtgtgcaagactgtgtggccttgacatgggccagggaacagggcccgtccccaggcatagtcccggctgaggacaccactgtcagcacagacagtgcagctgagccactagcacatggagtcacctctggccttcaaggcccaggtgagtatcaaggggtgtcatccgggccctcctccacctgggtcacatgggttcatctgggatcacctgttccacttgggaccacgtgggtgtcatccgggcccacctcctccacctggggtcacgggggctcatctggacccacctcgtccacctggggtcatgtgggctcatctggacccacatcatccacctaggaccacctgggtgtcttgaggcctgtccatctgaccccagggaagggaagcctgccccctcctcatgcctgcacaggcatcaagagtcatgagcgtacccatgcctctctcccctaagccagcttggggtttgaagccagaagaggggccctttgtccacatcccctgctgtaggggcagaaggtgacaactggagttgctgcccagatgggaggggctcacacctaccttgggtgctgggactgcacctgcctcccacagcagcacaaccaccaggctggtgaccaggaggagcctgagggggggccagagagggaagtgtgaggtaggggaaggggacgccctgaactccaggcagcaccctgatgggcagctgggaggcctgggctgggttcctccttgggagcgcaggtagttttactggactgtgctcacatgggccaagacacgcaggcacagaacagggagaagccccaggcccacctgcctccagcccccctcaggccagagcccacagccccagccccagactctgctcctcacagtctgggcagaccccactgtggcaggcactggtggttggcttggaaactccagaggttctgccatgcctctgtgccgccctccacgtggggacacacatgaacacacttgcacatgggtgtgggtatgggtgggtatggagcagcgagggcccacagccccacgcccacagagccctgaggctgcacgctgctgcaggcagggcacctgctgtgtcccagagctgcggggccacggctggggggctcaggggtgaatggcagcactattaggcaggcaggcagggtgtcaggtcagttcggacacgggatgtgtgtgtttgtgtatgtggtggggggtgtgcatatgttgtctgtgcatgtgtgttttgtgggtgtggaccatgtgcatggtgggtgtgcatgtatgctgtgggtggtgtcgtgttcgggtgtgtgtgcactgtgtgcttgagtgtgtggtgcatgtgtatgttgtgtgtggtgcggagtgtgtgagttcgggggtgcgtgtgctgtgtgtgtatgttatgtgtgtttgtgtgtggtggatgtgtgtgtatgttgtgtgtggtgtggagtgtgtgggcttgggtgtgtgtgtgtgctgtgtgtgcatgtatgtgttggatgtgtatgtatgttgtgtgtggggtggagcgtaagggtttgggggtgggtgt

SEQ ID NO: 96875 - DNA, 27142 bp, Homo sapiens
  misc_feature (1)...(27142): n = A,T,C or G
nnnnnnnnnnnnnnnnnnnnnnnnnnnnnnnnnnnnnnnnnnnnnnnnnnnnnnnnnnnnnnnnnnnnnnnnnnnnnnnnnnnnnnnnnnnnnnnnnnnnnnnnnnnnnnnnnnnnnnnnnnnnnnnnnnnnnnnnnnnnnnnnnnnnnnnnnnnnnnnnnnnnnnnnnnnnnnnnnnnnnnnnnnnnnnnnnnnnnnnnnnnnnnnnnnnnnnnnnnnnnnnnnnnnnnnnnnnnnnnnnnnnnnnnnnnnnnnnnnnnnnnnnnnnnnnnnnnnnnnnnnnnnnnnnnnnnnnnnnnnnnnnnnnnnnnnnnnnnnnnnnnnnnnnnnnnnnnnnnnnnnnnnnnnnnnnnnnnnnnnnnnnnnnnnnnnnnnnnnnnnnnnnnnnnnnnnnnnnnnnnnnnnnnnnnnnnnnnnnnnnnnnnnnnnnnnnnnnnnnnnnnnnnnnnnnnnnnnnnnnnnnnnnnnnnnnnnnnnnnnnnnnnnnnnnnnnnnnnnnnnnnnnnnnnnnnnnnnnnnnnnnnnnnnnnnnnnnnnnnnnnnnnnnnnnnnnnnnnnnnnnnnnnnnnnnnnnnnnnnnnnnnnnnnnnnnnnnnnnnnnnnnnnnnnnnnnnnnnnnnnnnnnnnnnnnnnnnnnnnnnnnnnnnnnnnnnnnnnnnnnnnnnnnnnnnnnnnnnnnnnnnnnnnnnnnnnnnnnnnnnnnnnnnnnnnnnnnnnnnnnnnnnnnnnnnnnnnnnnnnnnnnnnnnnnnnnnnnnnnnnnnnnnnnnnnnnnnnnnnnnnnnnnnnnnnnnnnnnnnnnnnnnnnnnnnnnnnnnnnnnnnnnnnnnnnnnnnnnnnnnnnnnnnnnnnnnnnnnnnnnnnnnnnnnnnnnnnnnnnnnnnnnnnnnnnnnnnnnnnnnnnnnnnnnnnnnnnnnnnnnnnnnnnnnnnnnnnnnnnnnnnnnnnnnnnnnnnnnnnnnnnnnnnnnnnnnnnnnnnnnnnnnnnnnnnnnnnnnnnnnnnnnnnnnnnnnnnnnnnnnnnnnnnnnnnnnnnnnnnnnnnnnnnnnnnnnnnnnnnnnnnnnnnnnnnnnnnnnnnnnnnnnnnnnnnnnnnnnnnnnnnnnnnnnnnnnnnnnnnnnnnnnnnnnnnnnnnnnnnnnnnnnnnnnnnnnnnnnnnnnnnnnnnnnnnnnnnnnnnnnnnnnnnnnnnnnnnnnnnnnnnnnnnnnnnnnnnnnnnnnnnnnnnnnnnnnnnnnnnnnnnnnnnnnnnnnnnnnnnnnnnnnnnnnnnnnnnnnnnnnnnnnnnnnnnnnnnnnnnnnnnnnnnnnnnnnnnnnnnnnnnnnnnnnnnnnnnnnnnnnnnnnnnnnnnnnnnnnnnnnnnnnnnnnnnnnnnnnnnnnnnnnnnnnnnnnnnnnnnnnnnnnnnnnnnnnnnnnnnnnnnnnnnnnnnnnnnnnnnnnnnnnnnnnnnnnnnnnnnnnnnnnnnnnnnnnnnnnnnnnnnnnnnnnnnnnnnnnnnnnnnnnnnnnnnnnnnnnnnnnnnnnnnnnnnnnnnnnnnnnnnnnnnnnnnnnnnnnnnnnnnnnnnnnnnnnnnnnnnnnnnnnnnnnnnnnnnnnnnnnnnnnnnnnnnnnnnnnnnnnnnnnnnnnnnnnnnnnnnnnnnnnnnnnnnnnnnnnnnnnnnnnnnnnnnnnnnnnnnnnnnnnnnnnnnnnnnnnnnnnnnnnnnnnnnnnnnnnnnnnnnnnnnnnnnnnnnnnnnnnnnnnnnnnnnnnnnnnnnnnnnnnnnnnnnnnnnnnnnnnnnnnnnnnnnnnnnnnnnnnnnnnnnnnnnnnnnnnnnnnnnnnnnnnnnnnnnnnnnnnnnnnnnnnnnnnnnnnnnnnnnnnnnnnnnnnnnnnnnnnnnnnnnnnnnnnnnnnnnnnnnnnnnnnnnnnnnnnnnnnnnnnnnnnnnnnntgggtagagcccttcccttgcctggtggggtgggggtggagggtcctcaatccttggcctgcagaggcatcgcctggatgtcagtctctagccacacagtggctttttcccaggtcttttctggtaaggacaccagttccgtgggagtaaggccacctcaggaccttgccttaacgcaattccacctgcagagacccgacttccagacaaggtcagtttgtagctgctgggttagggcttggaatatcttttagggggcacagttcagtcccgtaacaggagccttgacagccaggatcccagccagacacaggtgggcaggtgggaacctggaggcctcaggggcgggggtgcctccggatgcaggtagcactttgcatcttgggggtgaccaaccaggccacaggcccggcgggtacccagggctggcccagagagctggagccaacgtcaggtgcctgcatgccagcctcagggggcagagaggcaggaccatagtccccaggaagagggcagaagggggtgctctcctcctgggggatcctgaagggaccagagcccatcctcttggcttgacctgcattccctgccggccctgtgcctcctgggggctgtgtgcgtgtggctgcgccgtgcccgtccagccctgacactgtcccctccatggtaggttctcggggccactagaggagaaacatccgtgtggctgaggaagagttggctgttttgtatcccaagttcccacatggaaatgaattcggtgaccccccatctcccgagggcctcctggtttggccctggtctccgggaaccgagtacctgggtgggtggggagctgtacaagctaagaccagggaaggacgcctgggggacggatgccacggcccgtgcacggtcgattggagccgcagggcagggaggatctacagggcaagttccaggtgagaccagagagagctgcagctgccccggctctggaagcccccagccctcccgaggcccagccttcagcccacgtatcctctgaacccgttcaccacggtacggctggggagggtcagcctggggcaggctttgttctgatatgaaatttaatgtcttaggctgaaaaacactaaatttccatttttttgtaggtcagaagtggttgcaaactggatttttagactcttcctgttgggggtctcggacatttgctcttttccacagcggccaattcttcagagccacaaagaactgggcgacgcaggccagaggtgtgggagtccagcccttggttcgaatcccgctctccactgtccatggggttctcagcaagccctctggcctctccaagcacacgcagggttcctcaagcaattccaaactccagagaagacatcccaggtaaaatcggatggcagggacctgggacaccgctgtgacgggcagcccctgggctcgagtccacaactcccacgggagggcagggccccatcctgctcacaccggggtccccagccctcgatcctcacgagtcctcgtccaagaacaaactgtgcacacacgggcggtcagtcctggattcaaggtggcccatcggagctcgaactcaacggcctgacctagggacgcctccagtcccacccctaccttttggaggtgggagaatcaccgtgcaggtcactgacccactgaccacagatcaccactctctcccgcccccgtttcttcctcctgagaccactgctgccttcaaacgcaagtaacccaaacctgctcccaaacccatggcaagactgacccggagcctaacccagccctgccccgagcctgaccctgatgctcgagactagaccccagactggacccggtcccaaagtgggacaacaaagaccacagcggggaccacccaggtcccccagagagaaaacccgcgtcggactccagggagctcatggtaaccccttgtcctggggcagcttcattttactttggcaaggaccgcagtgttcgcttttctcattaaacgaggggctttcaaggatgtgttaaagtacgtgagagacgggcctggtgccggctggtcctgttttcttaaggcggaagttggggaaccgcgtcagcactccggggttcggattcctggaacctggggcagagtctgaaataaagcagcaccggccctgtgtggcgcggacccatgggaagccttgaaaggaaagtctcttcagaaagaaacaatgggttcagtgacttgtacactgaaaagatagatggccagttttaaagttctcctgcgtttaaacacgggcagcagcggggttgacggtacaggcaccaagttctgacataaaagtctttccttaaatcatgtaaaaaaaccgagacgtgcgcactgccaacttacactcatcgacacaaacttacaatatttataaataagtcgcaagcaaacactgagttacatttaccacgaagtcactggacagagaccaaaatcccatgaaagcggattgatgtgaaaccacgttagatctgagacgcagacgtgagaaacgccactgataagagacacggaagatcggagcccagccccgtgagccggtcggggacagcacgggggtcagcgtgcggccgggcccggctcaggctcgctgaggtccaggaacgggcacctccacctggacacggcgcgctgccccggcaacccccaggggtctcccaaacgcagaccgggacgcagcgaccacaagcgtggctgcgggacgggggccttggggcccgggcgtagtgcgcccgctcggcacctgccccaaggcgccgccgggtgaagcaggtgtcccggagggccgggccgcggcggctcaggggatgccctcccttctctggcagcactgcgagggcggcgcggaccagtcgtacacgtaggacaggcgcagctgcacctcgcgcttgcacaggcggccctcgcgcgccagcgtcgcgtgcttctccagcatgtcctccaggctctgcttgtgcgtcaccaggtactggttgctgcagccgcgggaccggtattcggtgtcgaagcgcgggtcgtgctcccgctggacgtccaccggcgccagccaggcgcccagagacacgtcctcgctgtgccaggcgcgcaggtagtcgcggctgaggcgcaggtagtgcaccaggtcggccgagagcacgtagccgccgcccagcgcgtagggcaggtagtagtcgcagagttgccaggcggcctcgcgccagcgcccccccggcttgacgcggccgcggcccgagaagaagccccagtagaggcggcggcggcgcgcgggctcgcgggcgcgcagctcggccagcagcgcgtccagccgcgcgaaggagtcgtcgtccgccttgagcacgaactcgaaggccacgtgctcgtccagccaggccagcatggccagcaccttggccgtgaggttttcgtaggcgtcgcgcagcgcgggcagcagcagcaggtccccgtgccgcgcctgctcccgctccagggcgcgccgctcctcggcgcccaggccggccgtgcccacggcaaagcgcgcccacacgtcgcccggggccccgcgccgcgcaagccacgtgctgcggatcacgctgcggcgctcggcggcgcggggcgcgctggccaccagcactgccaggaaggcggcggcgcgcgcgggcgcggggggaggcgggctgcggcccgacatcgccctggggtccccgggctcggccgcgcagcgcgccaggtagagcagcgccgccccgcacagcgccagcgtgcccaggcctagcgccgcccgccgccgccacgcccgccgcagcagcttcatggcgcccgcgccgggccggcggcccaggccggactcgcgagtgcgcaggcgccgccggctcggggcggtgcgcgtgcgcacggcgctcctgggagcgcgccggggccttccgcagacgccgagccccggggcgctcggaggccggcggccaatcggcggccgtcacgtggcctcgggcacccttgtcattggtcaacctcggagcggccccgcgaccgcttccgcccggaggagagatggtggcgccggcgtcccctccgtgaggtcgcgcccgttcgcaccgcccccgcccgcaagaaagatggcagtggcctgatccgggcccgttggcggcgtcactgacgcttcgctccggtcctcggatcccgagcgcggggaggcagaccggtgagtgaggggcccgggacggccgctgcaggccgcggggccaagtgtacgccggccggacggcgagggcgggtctggaggccgccgccgcctcccgccttgggctggggcatcgtccgtccgctcggccttgagccctggcgagactccgccgccaccggggctcccggggttcccgggggcagggacaggccgacgacgctggcctccccggccgccggcacgtctggtctcctactggccaaaacctacgaatgccaccgggaaacggaggcccaaggggtctggttggactcgcgtttatcggcgaggcgaccttggacaagctgccccgcttccctgcgcctgcgcttccgcttctgaaccgcgtggaccctcatccccagttagtaggatttggagatgtgaagtcggctgtgtggagcccttgatgtctggctcagaggcggtgttatgaaccctgttgagcttttagaatctaaccgtgtgtgttgttaactgccagaaatagcctcgttccaccagagctgaagcccagggatggcaaagaaatagcgtctctgcctaagctgtttcccacgtccgttttgcaagggtgtgttgattccttgctgggaactgagctgctaggggatggcgaagtcgaaaccccattccggtgggaccggcccgctccgctgtgctgcgaacctggcacaccgtgatgaatagatactctgaagccaggagaggaagcgccacttgatggactcctgatatttatagttacttttgggttactttttattccccctttttcgagacagggtcttatctttttgtttttgttttttaaagagacgcagtctcactgtgttgcccaggctggtctcacgatcctcctgcctcaagtaaaccgtgtaactcatcaagatatgtagaatcaagaactagctttattttctctaggaacaaagtacagtctctttgcacacagcgtgtgttttacgactgtagttagtggagtcagcaccaggaggaggtgtcttggttcttatccaggactctcccctggtcaggcgatctgggacgacaggaatagaattatgccaccactagggaagggaaaagccctcagccatgttcagaaaatcaggccgggtgcatggctcacgcctatagtcccagcactttgggaggccgaggcaggaggatcacttcaggtcaggagttagagaccagcctggccaacatggcaaaaccccatctctactaaaaatacagattagtggagagtggaggtgggtgcctgtaatcccagctaactgggaggccgaggcaggagaatcacttgaacctgggaggtggaggttgcagtgagccgagactgcaccactgcactccagcctgggcgacagagtgagactctgtctcagaaaaaaaaaaaaaatcagacatgagcccctcacccagggtttccttccttgggggaactcaggcttgtacccctcttggtttgtggcagactgcactgacttcaggaccactttcatggcggccccactggtgtttctcgatacctggaggcagcattttttcgtttaatattacccagggtagcattcgttgagcgcctactgtgtgcaggcagagtggcaggtgccagaacagtgaagctgaataagacggccacagaacaggagtctcagtccatgtgtgttgagggaacagctgtgacatggcggggcctcagcggcacccgaaaggacccgcaggtgtttgccggaggggcagactgtgaaaggagtaggctcgtgggtgagaaggaccccgagttccctttgggatacatgaggcatgaggccctgtgagcccctgcttcccaccaggactggccacgcctcggacggcaggacagacttctgggctcctcggccttggcgttcgctcgcgagtgtgggcaagggcacatgtgtgtaatacgtgcatgcgtgagtgtggatgtgtgtgtgcacatctgtgtgtgggggttgtgtgtttgtttgctgggaccaggccctgacgccctctgcacttagggttggctgtcttcgcaaagcctggtcagtcggggggagagggggagcctcctgtttcttagtgagaagctgaggccggggaggccacatgacttagctaaggtcatagatctcaagaatgttcaagtcagggtctggagagtgaccctaaccccatgggtcagtggcatgatgccaggagggacagagccgggccccacaggaaagctgtgctgcaggtgttgggcgatggggacaggttagcccctggaggtgctgacagctcgagagagagatggaaagacggagagacagggctgaaaactcagtgtctgtaaaaaaaagaccgggcacagtggctcacgcctgtaatcccagcacgttgggagactgaggcaagaggatcgcttgaagccaggagtttgagaccagcctgagcaatacagcgagacccgtctctacaaagagtaaaataaaaataaattactgggcgtgggggtgcacgcctgtggtcgcagctgctccggtggctgaggcgagagcatcacctgagcccagagcatcacctgagcccaggagttcgtggtcacggtgagctgtggtcaccgctgtactccagcctgggtgacagagcaagaccctgtttctaaaaataaagaaaaaaacaccacgtgtggtccggagaaaacaaatgccacgtgtggtccagagaaaacaaatgccacgtgtggcccggagaaaacaatgccacgtgtggtctggagaaggcagtgccaygtgtggtctggagaaggcgatgccacatgtctggatcctgtgaatcgaggatatgtttcatgttgcaggatagacgtgcttggggaagtctttgctgagtcttgctaatgatgtgtctgtgtctctctgcagactgtgagctgcttgtccccatcctgcggccgtcctggggacacagagccctccgtggtgcccggggattggattggagccaggacctcacttcctcctctgcccctgcccctgcccctcccagcacctggcccacaccctgcagccygccccatggtctggccctgggtggcgatggcgtccaggtggggtcccctcattggcctggctccgtgctgcctctggctcctgggggcrgtccttctgatggacgcrtctgcacggcctgccaaccactcgtccactcgagagagagyagccaacagggaggakaatgagatcctgcccccagaccacctgaacggggtgaagctggagatggacgggcacctcaatcgcggcttccaccaggaggtcttcctaggcaaggacctgggtggctttgatgaggacgcggagccgcggcggagccggaggaagctgatggtcatcttttccaagtaggtgccgccatgtgcccagactggggggctgtccgcgtgcgctcgcctgtgtgttcctatcctggctttgcgcggtggggggcgccgggccctgtgtcgggacctgccgggctgggaagacgtgccggtgatgagcgccacttccagcctgctgtgtttgcgcggaggcctgcgctggcagcccagagccgctccttgaatgccctgggtccgccgggggctcagagggccagagtgggcctgtgtggccgtccctaggacagcctggaggagcccacgcggcactgcagtggtcagcgtcctccatgctgaggggcagacgccggccacgggcagcctccgcaggctgcagccccagttggacgaggcctggctgaggagtgaggggctgccacaggtggctggagagctggtacagggtgctctgggctcctcctgacacgccctctaccctgtgtgtttggggtccctgtcacacacgggccgcgtatcacacgcaggctgggggtgtgtggggttggcttgttttgctggcctggtcgggagcagagctgtgctgtcagtggcccatccttggccgtcactgcccccaccctgctgagtcccgagaccctcttgctgcctctgtgcctagtgccgagctttctcccccgaccccatccctgagtctcgagagcctgttgtgaggggtccaagatgggtcaacctgaccactcacccacaaggagccaggtcctgcacgggcgccttactccttacggcacggccggggtgccctgcggtgtggccctggaacctacttgcactcagcgctggcctcacccctggaggcagagcakggtcagggcgtgcccgtgagtcccccaggccagccagggtgccgggcagggagccgaggtgcaggtgagagaacaccctgggcctcctgggacctgcgagacctgggcacaaggaggcagcccccgccgcagggcctggccacgagctcaccttcccgcagggcctggccacgagctcgccttcccgcagggcctggccacgagctcgccttcccgccgggcctggccacgagctcgccttcccgccgggcctggccacgagctcgccttcccgccgggcctggccacgagctcgccttcccgcagggcctggccacgagctcgccttcccgccgggcctggtgctccaggaccagtgcagaggggcaggtggcaaagctggtgagcaaggggattgggcagggctggggtcctggggtgcaggagcaggtaggaaaggtgtgaggactggtctggctgtgccacggcccttgggctgagggccaggcgggagggccctgaggatccaggctttcgggcggagcacaggtgagctggtgggacggaggcacggtgccagctggaggacctkggcaccaggtgtggtgtccccttgcacctctcctcagatggtacggttcgggggtccttgcgtggcctgagttcacttggtggtgagctgaccaacccacgaagaggcygctggtgccmctggggcctgtcaggttcaccacccctgagctcaygaaggcctrgctcgcggcatcacaggggaagggtccccgtccctgctcagccggtgctgggggtgggctgcacgcctgggcgaggggagttgaggcttctgctcggtgcgtctccagctggaccggggtttctttttggtgcctgtaacgaaaccccaagctgtctcgtttgaggaggtgggcatggggagtgggaagtaacagcaggtctccgggtctccctgactcctgcgccgagcggcgacagcggccgctgtgggtgtttagacttcccttcccacacgcgggtcccttctcgcccttctcctgcgtagggccccgtccctccaggacccacgttcactcagctgtcctgtctcctctgtctcctctgggctggaacggtgtctcagactctcccgtttttgtgaggacgtaacagttctgagaagggctgggtaggaggttttaggctgtccctcagtttgggcttgtgggatgtgttttctcctgaccgtacagggttgagggtttctggaaagagcccccagaggggaggtgccatgtttcctcctgaccgtacagggttgagggtttctggaaagagcatccagaggggaggtgccctgtcctaggggcttttgagcttcacttccttcccgcttccctgcaccacgagatgctccaggctttccttcccgcttcctggcacggtgagatgctctgggctcgcctccgtgccacctgccccagtgcaatagctgccgcctttccaggaagccctgtctcccgtggctggagctggaagccagggtctgggcactgggcgtcttgcccttgttctctcaggagccagaacttgataacatgcgtgtgtgcaccagcccagtcacatctgtgttctgccagccctgttcacgtgtgtgtgctgtgtacacgtgggtaccggcctgtgcacttgcgtgtgtgcgtgccagctccatgtacktgcaccgccctgcagccgtgtcttcaggcacctgagtttggatgagtgactccttgccgacatcttgactggaatcctgcgccatgtggtttctttccacctttttgctttttgctctgcctcgtgtgtgtctgtgtctgtggagtgtgtagagcgtgtggagtgtgtggcccgtgtctgtggcatgtggagtgtgtggcccgtgtctgtggcgtgtggagcgtgtggcctgtgtctgtggcgcgtgtggagcgtgaccggagcattcgaggatgcacgtgtccacgtgagacccaccaggtgccccacctgccacatggccacccgggtggccccgtccccagccggtgtgttttggggactgtggagctgagggtgcctcccaggcccgtccacctctgggctgctgcggctgctgagggaggggcgcgtgtgagcggcagcctggccttcttccrtgaggatctctgcccagtgcttctgagccgtgcctgcggtgtgtgcrccctcgaagcttgcctggcccaggtcccagaggccacacctgcctgacgagggcctgcttgccacctcataacgtggccgcggctgcccctgagcggagcatagaggcaaggggccagggcaccctactctcggggatgcctccggcaaacgcaccagccggggtctcaagacctcgcacctctggaagccctgcctcccagtgctgttgccctgggggttaagtttccaacaggtgagctcaggacacgggcggctgcagcaggggtaggagcctgtggcttccacaaagacataatggtgaagccgagctctgaagctgggacgggagtgacctgtcctggggcctgtggcctcctgacctggcctgcgctggccccgtgtccccagtctgtgtccctatcccccaagtctgtggtctcttccatccttgcacacaatgttaagtccccacacggtcttcttcctaaatctcacaacttaaatttatatgaaggattttgttttgtcttgttttgagtcagggtctcggtatgccgcccaggctggagtgcagtggtgtgatcacagttcactgcaaccttcgcattccaggttcgggaggcctcccacctcagcctcttgagtagctgaaaccacaggtgcacgccaccgcgcctggcgaattttcgtaattgtttttgtagaggtggggtctccctatgttgcccaagctggtcttgaacttctgggcttaagtgatccacctgtcttagcctcccaaagggctgggattataggtgtggccactgcgtcctgcctatatgaaggtttttgtgtagccatacctgaagcatcgaaaataaaacatgggccgggcccagtggccacacctgtaatcctagcacgttgggaggctgaggtgggtggatcatttgaggtcaggagtttgagactagcctgcccaacatggtgaaaccgtatttctgttaaaaatacaaaaattagccaggcgtggtggtgcacccctgtaatcccagctactcgggaggctgaggcagtagaatcgcttgaacccgggaggcggaggttgcagtgagcaaagattgcgccaccacactccagcctgggtgacagagtgagactccatctcaaaaaataaaataaaacgtgaagagtgtgacttttggaagctgtggttggagagtggggtctggtggtgattctgtgtgacagagggggagggtccatgtgtttccccggggaggggaccgtggcatccaccttccccagtgtctctggcgtggcccggcrccccacaagccccacgtcccggacgcttttcgcgttgcctggtggagcctgtcgctgttggtggcaggttcacgcagccatggagtcctgggccggcggcatccgtctggctgttcggggtcctgggggcccagtctgacggccacctgcccatttgctgtcttgcagggtggatgtgaacactgaccggaagatcagtgccaaggagatgcagcgctggatcatggagaagacggccgagcacttccaggaggccatggaggagagcaagacacacttccgcgccgtggaccctgacggggacggtactgtggctgggccggggtgggtggggcggtgggcggggcgggcagggccatgggccttgcctggtgcctggagggcagacaggccctgtctgagggacgggcggtggggaagtgtcagccggagaccccgaggtgtggtggggtgcacggaagctgggttcatgatgccagaatcctggtgacaraggygtgtgtgccaagcactgggcgtggcccatggagggcgcctcttatgwcttyggggccttcatctggtggtgyctatgcctcttggtggccccgaggcacagacgttgccggctggcctcacaggtgaggaaacgggtgtggggtgctggccrgggccctggggctccagacgctggcatcctgccgcttccagcctgggcagcagagcaagaccccatctcagttgagaaggaagttcagctcagtatcagaggccctgacaggtgtgatctgctcttccaggtcacgtgtcttgggacgagtataaggtgaagtttttggcgagtaaaggccatagcgagaaggaggttgccgacgccatcaggctcaacgaggaactcaaagtggaygaggaaagtgagtgctcagccaggctcccgccaccggtctcaggcatcctgtgtgtgcgcgcgtgtgttgtgtgtacatgagtgtgccgtgtgtgtcgtgtatgagtgtgccgtgcgtgtgctcgtgagtacgtgtgtgcgtgccgtgtgtacgagtgtgctgtgcgcgtgctcgtgagtacgtgtgtgcatgttgtgtgtacgtgtgctgtgtgtgtgctcgtgagtacatgtgtatgcgtgtcgtgtgtacgagtgcactgtgcatgtgctygtacgtgtgtgcgtgtcgtgtgtacgagtgygctgtgcgtgtgcttgtgagtacatccaggtagctgttcatgtaggctygtgagtacatgcaggtgagtgcgccctcacacccgctgtgtgcacacgtgttcgtcttaacagcatggcccaacctggttggtggtggctgtcaggagggaagtgggtgaagccgttgctgacctaggcgccgcccaggagtccggtggggagcgtgtgagctgtgcctgggcagctttcagctctgctggtcacggcaccttcacggccgttactcagttaggtcctgcagagaatctgaggctgtgagtctgggttggggcctgccccgtactctgaaggccacgtgaggcagagtttcctggggagagggcacagcctgtgcctgagggcctggccctgaggcctgggtctgctggagacatctgtgtggccgtcaggtggtcaccagagagcggtcaggtcccagggagaggctcttccttgggtctggggtgtggccgttggccagcagggcagcctcagccctgggcgggtccaagctggtgcctctgcgtgaagagggtggggccgggtggggcccggcacccgggctaaggccaggtgaggggagagccgggccaccctgcacggggccaggtctgggagagccgtccaggcagaagcccctgctggcccagttgtgaggcacagctgagcgggtaccgtggcgttgctgccaccctggggctccgtgtgcccttcccggtcatgcccgtggtctggtttggggctttgaggagaacgtgcagagtcgcctgctccgtcgctgcccggcatcctggggtgggttctctgctgccctgcagggcgcccgtgtcgcccacgggactggtcacgtgatacggggctgctcctggcaggctgggtgtatcttacacctttattttttgtgcctgcttaacttatcagtaacacacatttcctcaccagagtctcaaggcaaaccacctcttctttcttttttcatgagacggtctcactctgctacccagcctgcagtgcagtggtgcagtctcggctccctgcagctgtaccttccagggctcaggcgatcctcctacctcagaagctgggaccacaggcaccatcaccgcgcctggctaatttttgtattttttgtacggatagattctgccgtgttggccgggttggtctcaaactcttggacttaagtcatccgcctactgcagtctcccaaagtgctgggattataggcgtgagccactgcgcctagtcttagcctctttctttttttaatttttaatttttaattgtttaagagtgagggcctcactgttgcccaggctggagtgcagtggtgcgatctcagctcacctgtagcctccacatcctgggctcaatctatcctccttggaggacagaaaaataaaggtgtaagatacgttcctgccaggaacggcccatatcatgtgaccagcccccatgggggcggcctcctgagtgactgggaccaccagtgtgtgccaccatgcccagctgattcaaaaacatatattttgtagacacaaggtctccccatgttgcctaggtaggtctcaaactcttggatttcagagggttcaagtgacccgctcggcctccccccgtcctggggttgcaggcgcgagtgacccgcctgccttggcctctccccatcctggggttgcaggcatgagcccctgtgcctggccttgaccttctagaatgacgcggagacttttgagcctgttggctctgcctgctcttttcccagttcacgtactcttatctggagtttggtcctgtccgttctaaatcctgcaaattggacattaaaaaaactaaaagtaagaggatctccctgtgttgcccaggctggtctcaaastcctgggctaaagggatctgcctgccgcagcctcccagcatgccgggattacaggcacaagccccagtgcccggccaaattggacgttattacttcctttccaaaagagtggtttacattttcctccccacacacggttcgtgcctccaccccggtcccgcgttccctgctgtcctgactgcgtctttaagcttcatcccgttggtccggcctgttggcgatgtgcttggggcaggaggccttgcccgtgcccgccccccaactctgattgtgtctgtctttccttggtgccactttrtttgggtcttttctgcccaggacatggcccacctggacctagagctctgtgacatttctgtgaagcctccgtctacctttgggactcagcagaggtgtgtttagaattcactctgcgttttgggggtccccatgcatgctgaggtgctgttccctgcccacccgtgtccgatccgtcttggcctccccgacctcagggtgcctaggaccccccgacctctttgggtatttggtttctggctcaggaagagcagctgccgggtcctggaggaggggcctgggaagcgctggcaggcgtcactcctgcgacctcccacccctccctgcrtggctcctgcgagggtcaccgcgtgagtccgggggctgctgtcctcrcgcctcagacctgattctggggaccgcggtgaaggcgtggcaggcgggcatcactcccttcccccgcctccatcgctgcctctctctgggtctgcgtcctcttctcacagggacagcagtcgttgactctccctgatccaggagggtctctccagatccttccctaacagcagaggcccggctcgtggggagggactgggactcaaggcttcttcaccagcctgaggttggtgctggggctcggcggcggctgtgagaatcctgtgctggagaaagcgtctctcggccggcctgtctggggcgtctgtgcctctcctggatgggtctcagtttggccccgtccatccatcccaggagctgcggtggagcagacagggaggggtgccccaggaaccacagccccgtcactcctgtcttcctttaagtgaaccggtcgtgtagatggaggttgttcagaaagggataagatgggacggcagctgggcctcatcccgcagtgagcgcgacgcagaggctgccgggcttgtggcaggggcttcggccagggcagagtcgggcctcacgtgcagggggctgagtgtgggcctcaacactggacttggccactgactgcagtgagccccaagatggggcaggaggtggtgtttctgtcctggagacccagggtggcttgggtccttgggatgtgtggggacctcggggtgagggcccgttggggccggrtgggcacggcaggagagcgggggccacacacccagaggcagtgccgtgtcccggctgggagggttcctgggaagctctgctcagccccagtctcagtcatttctagaaactgtgttttcctycctgtgacgtcacacgtgaaggaaacggaaaagggcagtgagtccttcgccccrcggcgccgtgcgcacgtcagccttcagggtgattccgctcctccagaggggcaggcgcrggtgtggggggtggggcccaggcccatcctgaggggtcccaggcatgaggggctctgagctgtgtcctggggtggtctgggccatggggaggttctggatcatgtcttgagaggtctgggctgtgtggggggtccaggccatgtcctgggggtctgggctgtgtctgtggggagtcagggccatccatgtattgggggtctggggcaggggggggtccaggctgtcttggggagtccgggctgtgtggaggggtccaagctatgcctttggggatcaggcctgtgggaggctctgggttatgtcttggcgggggtccaggctgtgtcttaggggctgggccatgttctggggacgtgtgaatcctggagggtggggccccggtctcgcgggtggctgtgtccctcgagttcaggcagcacctctyggaactttctggatttgcgtgctggcgtctgtcggcctcgatacccacaggctgcgcccctctcagcacaggaagtcctggagaacctgaaggaccgctggtaccaggcggacagcccccctgcagacctgctgctgacggaggaggagttcctgtcgttcctccaccccgagcacagccggggaatgctcaggttcatggtgaaggagatcgtccgggacctgggtgaggctgggtccagcctggccggcaygccaggacccaggaccgactggcaggggccgggcatcgtcgggaggtcggggcaggtcctgygggagccccagcctgggtgtgggctgacccattcccgtctcgcagaccaggacggtgacaagcagctctctgtgcccgagttcatctccctgcccgtgggcaccgtggagaaccagcagggccaggacattgacgacaactgggtgaaagacagaaaaaaggagtttgaggagctcattgactccaaccacgacggcatcgtgaccgccgaggagctggaggtgagccctggcgcagccgtgtcccggagccggccctgcgaggtgctgtggcgggaggggctggtggatctgggcctgaggcaggaagctgtgctggtgtctggcctgagactccatctgggctggtcactggggcgtttgctcagcggtgtccaccaggctgcatggccgttgttggcgtttaggttcagacggatcagagacaggcgagcctggccgggctccatcctcagccccttgcggaggcgtcagggttctcacagcccctttttaacgggaccacaaggggaagctcatgctgggcccagcatggaggcaggtccaaggcccagcaggtgcaggtgggcggggcggcctgtgccacatggctggaatttaccaccttcctctgaagcgttttcactggtatcatgtgtaggcttgtttttctcccactgctgagtgagtcatcttgtttttatgtagaatcctgtgattcctggcgacagccagtgggcccggcccaggttagggatccttcagaactggggtccaggcctgtgtagcccctgtgccccgttacccctgctggccccgggcaggccttccggggcccccggcttctccctgccctgtgttttcatttgtgccgcctcccttcgggaaccttccagaacgtgcccacactcccgctgcagccaataggcaccttaaatagccacttcgtgcggctggccgcggagctcggagggggaaaggcgacgctgacctgtgccccgctcgcccgcagagctacatggaccccatgaacgagtacaacgcgctgaacgaggccaagcagatgatcgccgtcgccgacgagaaccagaaccaccacctggagcccgaggaggtgctcaagtacagcgagttcttcacgggcagcaagctggtggactacgcgcgcagcgtgcacgaggagttttgagcgcccggccgcgccccgcgccgccccccacgcaccaccggggcggcctcgcgggtgactccgggctccgtggctgtcccggaccccacctcttccctgccgcccgccaccggccgaccgaccgcggctgccccagttgatgagcggcgtgtcccctctgcagcgcgcaccccggcggggctttggctgtgacgcggtcggggcgcggggctgggctgtggccccgcggcgccgcctcctccctggtccctcgaaatcgtkgcatctcacttctgagaacgaaatctcgcttcagtcactctgccgaaggcgctgacggcatcgcggccggaacctctgggcccggcccctcccagggccgccgctccgtgggaaaaaacagctcctccatttccttgaaaactgaacgattattaaaaatagattaaacttcgctggaaatgagtagccaggaagttcaggggagggtgccgggtccttcccgggcctggcgtgtcggagccacccaggtcccgcagctgccgctgagaaaatgcaaatatttgttgtgacaagaatcacatacatttactttaaatatagttgccttttttggtcagcttcattctttgggcgtgaaacaaaacacaacagcagcgtgctaggtttgtggttacagtttccactggagcgctggaggctggtgctgggtcacgtggagggttggaggtcatggccggttcgaggtgattctcctggcaggtggcaacgggcaggggctctgggaggacggagggcagcgctgcgtttgtgagtaggggtcagggggcagcagacgtgcccactgagtttggggtttggacatttaaggcaggagacagagccgcctgggggttttgggtggaggatggcaaggtctttgggtgcagtggggcaggcctagccccagatggggcagagaatggggtgtgttaggacggctggtgggggtcctgctctgtggcgtgtgggggcccaggctgtgtcctggctctcccagtgggagctcagggaagccgggagtgtgtcctcttcagtctgccctgtggtgcccatgtgaccggcctctgccctgagcccacctgcccaggggcccctgtggggccgagagggcgggttggcacctgggctggttcccaggcaaacgagattcacagagccacggccagcgcaggtggtgggaggatggtcccacgccctgctctaaggggctgtaattccctggagccaaccttcggtggcctggactctgtctttccccatccgtggccccaggccacagccagggaccatcatagctgcagcagcattcgacgccctgtgctgagggccgtgcacccagaggtgggaggtgtgagctgaggccatgctgtgctggacatgaaggcggggggacagctgggtatgtggtggcacctggcccttcagaggccccagccagctccagtctggtactggaggagcagtggccactcatgggctgccctgtgccgcccgcgacactactgtgtggagcggggagcccagctcctggggatgtggttcgagctgcaggctgccttacagaccttgggggtcctgagctctgggtcagtgtccagcctcctgtggccacgccacacccggttccatggacacagcagggctttcttggacctgtgaccttaagcccaggacaaggagacctgagcttcctgggcagcttcaagcaggaggggccgtgccccatcctggggccattgcagttgccagcaatatgctgggggtgccctctccatggtgcacgggccccactcactgcacctgtgggcagatgtggccacttaggccccaggagagcagtgttgcccaccaagacccccagttcacctgaacctccaaggaaccaattgcaaatgtaagctttttctcactgtcagtgggaaacccttgtgaacgctgggtggaaccttccacaaaatgccagaactttcctcctctgcccacctgggttggggtgtgcacatgcaggtacacacactgtctgggatgctctgagcccttccagggtcctctctacttgtggggacgtggggagggtgaccaacttagggaccctcagtccgagggcgggtggcctctccctccactccctccctctccagggccagcgggctccacggctgggaatttccccacgggtgggccgaggacaggcagctgtttcctgtgctcctgggaggaggggatttccagccccttccctgctgctctgttcctagaggcccctctccacttgcaacttcaaaaatgaacttttggataatcacaggctggtcacagttatttgaaaggtgcagaaagggcccagggagcccccagccccgcacctgctccccagctctccgggcagttcgcatcctctgggcaaacctggaacctgagaactgtttgcatagaaggtggaaacctgcctgcgtgcccgtgtgcgccaggccatccaggacccaccctcaccacctcctcagaggcctgtctccaaacactgccacatgggggttagggcttccacgcaggaatttaaggggcacagttcagccatagacacctgccgtgctcaggcacactcagcgtgggctgtggtcacgggtgtctttttttttttttttgagatgagtctcgccctgtcgcccaggctggagtgcagtggcgccacctctgctttgcaacttctgtctcctgggttcgagtgattctgctacctcagcctcctgactagctgggattaccggcgcccgccaccacgcccgaataatttttgtagttttagtagagacgggatttcgccatgttagccagactggtcttgaactcctgacctcaggtgatccacccgccttggcctcccaaagtgctgggattacaggcgggagccaccgtgcctggccatgggtgtctgtcttaccatggctgtggtcactgctgctcagagctagtcttgggcatacaagggggaccatgcttcagcagtgccacagccctgaaggtccagactgaggagttgcctctcctgactcagtgctgcctcagtttacccacgtgctccatggacctttttgctgagggtcgagccgcaggccaggccctactgtgccctggggtctgaacacggtggtcttgggcagaagaggtcagaaggcagaataagccaatgctgggggtgcccagaccccgcctttgtgcccagcccacagccagggtccccggcctgccaccttcctcctcccgcctcctctgccctcctcccctctcccctcccctcctccacagtccttatagccacaccccgcaaggaaaacccagactctggcgacagcagagacgaggatgtgcgtgggggctcggcggctgggccgcgggccgtgtgcggctctgctcctcctgggcctggggctgagcaccgtgacggggctccactgtgtcggggacacctaccccagcaacgaccggtgctgccacgagtgcaggccaggtgaggcctcaggaggggtcgccacgcacgggcactccagggactgggggctggggcagggatgggccagccaggaggctggtcctggggagggggcgggtgaggggccggccaagcctggcagaggagccgcctgggggggtccacgggcgcaagcctggggcctgaccgctgcctgacgccggcctctgctgcaggcaacgggatggtgagccgctgcagccgctcccagaacacggtgtgccgtccgtgcgggccgggcttctacaacgacgtggtcagctccaagccgtgcaagccctgcacgtggtgtaacctcagtgagctcccacctggccccacagccccacccagcacagggggcggcagcctggcacccacattcccacgcagcagcatggggctcccacagccgcagaaacgaacctcaaaccacagcggggtctgctccgccacaggggtccttcgaggagctgaggcgtctcccaggggcaccccctctccctccgggggcccagactcggcccaggccacgtggagtcggggagaccacgctggccatgtggcctggccttgctggcctgagcagtgaggctggggggttgggccatggagaccctgccgcaggcggggctggcggctggaggcggtggaggggtagggaagggtggctggggctgccacggaaccagccccaggttgtggccaggaagggagggcccaggagcctcgggggctgcaggggctccaagtctcaggggaggccgcagacccctgcccacggccctctgtgtggtggggaggccaacctgtcctccagtgcccacgcttcctgaggaccctgtccacagcccccacctgaccacccccccatccggcccctgctcaggaagtgggagtgagcggaagcagctgtgcacggccacacaggacacagtctgccgctgccgggcgggcacccagcccctggacagctacaagcctggagttggtgagctcggtggctgcggccggcggttgggggtgtgcatagcggctgtctgtgacgcagatgggccgtgggccgcagggacctggccccaccggtgcctcctctggcatcctcaagaccgagctcccgggtcagggcccacgggtgggatgtgggcagggagggcttccagaggccaaacccaccacccagccatggggggcaagtgcctgccccacaggctctgccccatgtccccagcacccggggcctgtgggcagcccctgaccaccctatctttgttgcagactgtgccccctgccctccagggcacttctccccaggcgacaaccaggcctgcaagccctggaccaagtgaggggcctggccaggggctgggaggggctgggggggggttggggtggttaggagggcggagtgagctggggagctgggagggcctgggggggcaggtggggtgggggccagttttgggggaaggggaggtgctggtgcccctgggggcctggctatgtgcctggacctggttggggagcaggaagctgctgcctgggggcagcctttccctgtgggtggagctgggtgtgtgggaccctcaccctccgcagctgggaggccctgggggcacaggacagggaggtgctggtggggggtgtagatgtgggagaagggtgtgtggccttggaggcccctgtggggggcacgtggggctgggcagcgtccttggctgtcactggcctggtgtctgtggtagatgctgcctgtggctggccagcgtggaccctgttatccccaccgcatctcccgggtcccagggggtttctggcctgagcaacacctcctgttccccaacagctgcaccttggctgggaagcacaccctgcagccggccagcaatagctcggacgcaatctgtgaggacagggaccccccagccacgcagccccaggagacccagggccccccggccaggcccatcactgtccagcccactgaagcctggcccagaacctcacagggaccctccacccggcccgtggaggtccccgggggtaagggcgcctggcccagcccagcggggcccccaacccgaataggagaaggggagggcggcatgggggcccctcctgtggaccccacccagcagaccccttcctgcaggccgtgcggttgccgccatcctgggcctgggcctggtgctggggctgctgggccccctggccatcctgctggccctgtacctgctccggagggaccagaggctgccccccgatgcccacaagccccctggtgagtgcctcatggccctgccgcactgctcctggcgggtgaggcccacccaccaatctctccttttttcctccccagggggaggcagtttccggacccccatccaagaggagcaggccgacgcccactccaccctggccaagatctgacctgggcccaccaaggtggacgctgggccccgccaggctggagcccggagggtctgctgggcgagcagggcaggtgcaggccgcctgccccgccacgctcctgggccaactctgcaccgttctaggtgccgatggctgcctccggctctctgcttacgtatgccatgcatacctcctgccccgcgggaccacaataaaaaccttggcagacgggagtctccgaccggcactgtgggctgcacacctgtggcatggaggcttgggccgtgcccgcctctgactggagaggggtcttgggaggcttgggccgtgcccgcctctggctggacaggggtcttgggaggcttgggccgtgcccgcctctggctggagaggggtcttgggagacttgggccgtgccaacctgtggctggaaaggggtcttgggagacttgggccgtgccaacctgtggctggagaggggtcttgggagacttgggctgtgccaacctgtggctggagaggggtcttgggccagggtggaggtgagggtagcggggtcaagtgggaccctggaggttggtccctgggtgcgagttccagattgagtggggagcggggggagagactgggaaagctcaggcccaaggctgcctggggtggaggt

SEQ ID NO: 96876 - DNA, 46193 bp, Homo sapiens
  misc_feature (1)...(46193): n = A,T,C or G
aaacaactcaaatgtcctttaacattgatatttccacataatgaaatattattcagcaataaagagaaataaactattgatacatgcaacaacttggatggatctcaaaagcaccatgctttttagtgcaaaaagccaaagccaatagaaaaaccattaactactacagttgaccttgaacaacacaggtttaaactgtgtgagcccatttatatgcagatttttttcaataaatatattggaaaattttttggagatttgcaacaatttgaagaaactcaacagatgaaccatgtagcctagaaatatcgaaaaaatttaagaaaaaggtatgtcatgaatgtgtaaaatatatgtaactaccagtctatttttgtgttgactatgttattggtaaggcttccagtcaacagtaggctattagtggttaagttctggggagtcaaaagttgaacatggatgttttactgtacagggggtcaatacccctaacccctgcattgtttaagggccatttatataatggtacattggacaaaactatagtggtagagaacagattaatggttgccagggatggagacaagagtggatataactataaagggatagggatacccagtgaagttccttggtggggatgaaacagctatcttgatttatagtcgtatttgcagtaatctgtaaatgggaccaaattgcatagaaagaactatatacacacatacacacacacaggagtggatgtaaaaactggataaggtctgtaggtctagttaacagtattgtaccaacgtcattttcctggcttttaaattataccacagttacataagatgtcatcattgggggaagctgagtgaaaagttcatgggattcttggtactatttttacaacttcctgtgagtctataattatttcaaaataaaaaggtaaaaaaatttcacttttattttattttttgagatggggtcttgctgtgttgtccaagctggagtacagtggtgtggtcatagctcactgcagccttgacctcctgggctcaagggattcttctgtctcagcctcctgtgtatctgagactacaggtactcaccaccacacttggctaattatttaatctttaattttttttttttttgtagagattgggatcttgttatgttgctcaggctgtctctaactcctggcctcaaatgatcctcctacctcagcctcccaaagtactgggattcaagacatgagccactgcactcggccaatttcacctttcttttttaatgtgaccacctgaaaattttaaattacatatgtggcttatatcatatttgtattgaatattgctgctctagagactccaatgtatgcactggattaagctatggggtcaatcattatatgttccagtaatctatggggtcaatcaatatatgttcctagtaatctgcggtagactttcctcacaaaactctgtagtcaaatacattcaggaactgtaataggttgaacaaagttacacagatttctttacaagagatcttccaggtctttaatatgcaaatgtttatcataaatctcaaatactctcatttcaaaggaaactaaggcacagagggattaagtaacctgcttaaggtcatttggttagtaagcgatgaagccaagattcaaatcctagtaatctggctctcagaggaaggcctctagaaggaaatgaagagtttgagattttagtgaattgtaccattgttctatataaagataaagctaagagcccagtcagtggagcttgcactttaaattatttctcaaattgtggagatcaatttgtgcagacttacctgtatgtctctcattcagtggtcctacaaccaagagcttgtctttgaaaaagtggaaaggataagaaatacaaattcaagctatgaaatagagacttaagacattttttagtctgccagggaaatctatgaattgacaattagataacaaaaaatatcattaaatttaataatggcactatgactacatacaaaaatgtccataatttttagagatgcataatgacatatataggggtgaaatggcagtatctgcagttttgctttcgttatttcacagagaggtgcagagaagttaataaaaggataaggaggccaggtgcggtggctcacgcctgtaatcccagcactttgggaggctgaggcaggcagatcacgaggtcaggagatcgagaccatcctggttaacacggtgaaaccccgtctctactaaaaatacaaaaaattagctgggcatggtggcgggcacctgtagtcccagctactcgggaggctgaggcagaagaatggcgtgaacctgggaggcggagcttgcagtgagccgagatggcactactacactccagcctgggcgacagagtgagactctgtctcaaaaaaaaaaaaaaaagaaagaaaaggataaggaagatagatgaagcaaatatattaactttgttaactgttgaatgtggggtgacaggtagtgcatgatactattctctatatgtttatgtttgaaatttttcattaaaaaatgttaagctgtatgttgaaaatcattcctttcccatactcttttcaacaattataatttttaatggctaggtagaaaactaaagttacggcttcaaagcaggttatcattattataacatctaaagtaaaaattgctttgaatttgctcccattaagatacattttatcttcattatcttcattattcacttcatcctgactccagctacagaatcatcttttgggccttatagggagtatcaaatcaacaatcaagaacaagtaggccaggcgcggtggctcacatctataatcccagcactttgggagaccgaggcagacagagtccaggagttcaagaccagcctggggtgaaaccccatctctactaaaaatacaaaaattagctgggcatgtagtcctgtgacttgggaagctgaggtggaagaatcacttgaacctaggaggtggaggttgcaactgagccaagatggcaccactgcactccaacctgtgcaacagagactccgtctcaaaaaaaaaaaaaatagaaagaaaactgatacaactatactagttaataataattctggcccaacaagtgcctatcatttttttccatacaagattttttttaactttcagaatggttggaattaatcataaaagcagatttttagctaaacctcagtcactttattgggaaaagacagtttcctcacaattttttttttaagtaggaacaacacatcccaaatctaagagatgactgtttcttcttcctagttcccaaagagtttactaggaactaaactgctaccatgtagatatcttattccttaataaataataagcttctaaaaggcaaagagaggttttagacttattttctttgtatgcctattgtatcccaagtaaaagtgcgaagggacaaggaaaataccatttattgaggatgtatatgtgtcaagctccacaccatcactttattcttatttttatttatttatttatttatttgagacagagtcttcctctgtcacccaggctggagtacagtggtgtgatctcggctcacggcaacctccgcctcccaggttcaagcaattctcatgcctcggcctcccaagtagctgagattacaggcatgtgccaccatgcccagctaattttttgcatttttagtagagacagggtttcaccatgttgcccaggctggttttgaactcctgagctcaggcaatcgcccaccttggcctcccaaagtgctaggattacaggtgtgggggtccacaccatcattttaaataagcttttggataaggtgttactcctatattgcagaaacgaaggctcagtgatgtagtaatttgcctaaaagtcacgtggctagaagacagcctagccagaaacccaagaatgattcaaaatagcatgcttgcaattatcatgtatgtgcataattaatatttaataaattaaatagttaataattaatattaatagttaatatatttatggttgctaaaattacatagctaaatgaaaggaaaagttaatatttaattaataaatttatggttgctaaaattatatagctccatgaaggaaaaaaaattggaatttggggttaaagcccaagctcaactcctgactttttggctatataatcttaaaatatgtaacatttctgatataatttcatcttctgaaagactgaagataatcatacccactttacagagttgttaagatcaaaaagtgaagtgagctgggcatggtggctcacgccaacactttgggaggccaaagtgggagaaccgcttgagtccaggagtttgagaccagcctgggcaacatagtgggaccctgtctctaccaaaaaaaaatttttttttaattagccagttgtggtggtgtgcacctgtagtctcagctactcaagaggctacattgtgaggatcacctgagcccataggtggaggctgcagtgagcaaggattgcactactgccctccagcctggacaactgagcaagaccctgtctccaaaaaaaaaaaaaaagtgaaggcccttttggaagtgtaaagcattaataaatgtatgacactattattactttctaaattattatacaccacttcggtcagggtagggggcagctctttttatttttttattatttatttatttattttgagacggagtttcactcttgtcacccagactggagtgcgatggcgtgacctctgctcactgcaacctctgcctcccgggttcaagtgattctcctgcctcatcctcccaagtagctgggtttacaggcccccgcctccatgcccggccattttttttttttttttgcatttttagtagagatggggtttcgccatgttggccaggctggtctcgaactcctggcctcaagtgatccgcccgcctcagcctcccaaagtgctgggattacaagcgtgagccaccacggccggccgtgagggtggatctttttaaagccagaaatatttgctctttaaagtctcaaaagcaaaactgatctttatggattctggtgcttaattgcagaggtggggaggcagtatgtgtgatggttatgaccacaggcttcggaatcagatcgacatcaggtttgtacctctcagctctaccaccttcaagctgtgtgatctttggcatgctacaatctttaattctgggatctttatctgtagaatgtgcaaaataatgttcccaatctgatatcattgataggaatgagcaaatgtatgtaaatagctttgcacagtgtcaagtgagcactttcctggagccctcagttagctattaataacttctcgagctaccatggccattaacaatgggacctgaagcactgcggatgctacaaatgcttcagcagacccagtgcttgatttcaggaatttcagacgaagggcgacacgccctcagctggagatggaggaagaaggggcagggtccagcagggctgagaggagagaattccgaagaaaaatctctccccagccctgggaaaggaaaggaacgaaggactggtcaaggagggtccccagagcgcccgccgcccgccccggctggggtggctgagcagtccactcacagctccaagctctgtggcaccgccttccgagtgtatctggagatcatcctcctcctcctcctcctcctcctcctcctcagccgcggccggggcaggcacgccagggtgggggcctccgggcctggccctcccgccggctccggcccggcccctcccgccacctaccggccccgtctcgccccgtcacctagactccgagcagccacctccccagggtccccacctctccagtcctccgacctccctgctttgccgcgggggcggaagtgacgaaggcccccggacactcgcaaaatgctcccgccgacgcacagcagtgacgacacacaaggtttcggggactgagtgggtttcagactttctctcaggatttccgctggcttcaggttccggtcaggcgtcgggacagagcctgatccaggcttcggcggccggtggcagctctcgatcagctctcgcagtcggagaggcggctaaggaaaggtgccacagcagagacgcgaaggagaggccctagaaccgtaagagaaattggcttcattttgttagatggcaggagggagcctagactggggaaagagcactagactccaagtcaagcccctgctgcttggtcgcttctttttctgtactctgggttttctcatatgtacagtgaggyattagcctgagtgatcatagagtcccttccagttctgacaccaaattctgcatgatgacgtgtgtttggcgttatggggtggatgggtaaaattactgtctgtccctctgggttgaaaggcaaaatgatgatttggttagactgtggtgagtgggtgtctggataagaagaagcaggttccttacgagtctcttagaaagctgagtaagattggaatcatggagttagggtggtccatccaccgccatttctttctttaccaagcatcacctggcagcaagaataaactagtactcttatttaggaaaacccttagaaaattaagagataaggaaaacccttagaaaattaagaggtatcaatgcaacctccatcaaaataccagtgacattcttcacagtcatagaaaaaagatcctaaaatttatatggaaccacaaaagagccagaatagccaaagctatcctgagcaaaaagaacaaaactggaagcatcacattacccgacttcagattatacaacagagttatagtaaccaaaacagcatggcactggcataaaaacaggaacagaatagagaacccagaaacaaatccatatgtctgcagtgaattcattttcagcaaaggtaccaaaaacatacattggggaaaagacagtctcttcaataaatgatactgggaaaactgatacccgtatgcagaagaatgaaaccagacccactacctcccaccatatacaaaaatcaagtcaaaatggattagagacttaaatctaagccctcaaactatgaaactactaaaaggaaatattggggaaactctctaggacattagagtgggcaaagatttcctgagtaatacctcacaaacagaggcagccaaaacaaaaatggacaaatgggagcacatcaagttaaaaagcttctgcacagcaaaggaaacaatcaacaaagtgragagagaacccacagaatgggagaaaatatttgcaaactacccatctgacaagggattaataaccaaaatatataaggagttcaaacaactctctaggaagcagtctaataattgattaagaattggataaaaactctgaatagacatttctcaaagaagacataaaaatggcaaacaggtttatgaaaaggtgctcaatatcattgattatcagagaaatgcaaatcaaaactacaataagatagcatctcaccccagttaaaatggctgttatccataagacaggcaataacaaatgctggcaaggatttggataaaacactgttggtgagaatgtaaattagtgcagtcactatggagaacagttttggagattcctcaagaaactaaaaatagagctactatatgatccagcagtcccactgttgggtatttacccaaaaraaaggaaatcagtatatcaaagagatatctgcactcccatgtttatcgcagcactattctcagtagccaagatttggaagcaacctaagtgtccatcaacagataatgaagaaaatgtggcacatacacacaatggagtgcttttcagccataaaaaaaaaaatgagattctgttatttgtaacaacatggatggaactgaagatcaagtggaactggatggaagtgaaataaggatggcacagaaagataaacttcaaatgttctcactaatttgtaggagctaaaaattaaaacagttgaactcatggagatagcaagtagaaggatggtttaccagaagctgggaagggttgcagagggtttgtgggggagtatggttaaagggtacaaaaaaaatagagtgaatgaaaactagtatttggtagcacaacagggtgactatagtaaataataatttaattgtacatttaaaaataacgaagttcagatgagagcatgtcctggctataaaaatttttttaataaaaataactaaaagagtataattagagtgtttgtaacacaaaggataaatgcttaaggcaatggatatctcatttaccctgaggtgcttattatgcattgtatacctgtatcaaaatatctcatgtaccccataaatatatacacctactatttacccttaaaaattaaaaaaaaaaaacagcactttgggaggccgaggcaggtggatcatgaggtcaggagtttgagaccagcctggccaatatggtaaaaccccgtctctactaaaaatacaaaaattagccaggtgtggtggcgtgcgcctatagtcccagctactcgggaggctgaggcaaaagaatcgcttgaacctgggaggcagaggttgcagtgagctgcgatcactccactgcactccagcctgggcgacagagcgagactccatctcaaaaaaaaaagaaaagaaaaagaaaagaaaaaaagaaaagaaagatatacctaccatcccatgagacttgaaaaaggggcaaatttaggacagaggtaaaatgacaggacatgaatgttttgtagttctgaattcctctacgccatacaatgttcataaaagagagagatgtacattctgtagagcaagacagattgtactttagagtttaaataacaaaattttaaagcagggagagattttagagatggtagataacttatcctaaattaaagaaaaaaacccagaaagagaaagtgaaatgtccatagtggcacaactaattagtggcagaactggggtttttgatagtatgtaaacagtaggtgttagtgcagtgtttctcgaaatatattacacataccactgctagtacaagggcaaacattaaaaatttcattcttcacttccaaaataggaaaaatataaaaagtaaagattttattcttacatacttactaattggggaatgtgatactagatttctattcactgtattatatcaaggtttccttttaacgtaattttaaagataaagttttaagtgtaaagggtcattaaaaataatattaggccagatgcctataaccccagcactttgggagaccaaggtggaagaactgcttgagctcagaagttctaggccagcctgggcaatatggcaaaaccttgcctctactaaaaatacaaaaaaagttagctgggcatggtggcatgcacctgtggtcccagctacttgggaggctgaggtgggaggatggcttgagcccaagaggtggaggttgcaatgagctgtgatcatgccgctgcactccagcctgggcaacaagagtgaaactccatctcaaataaataaataaagtttaaaaaaattaaataaatattactgtaggtggtgtatggttaaggccaaaaccatggtgatggtatgtgactaaattttatttttttattttttatttttatttatttttttttttagttggagtcttgctctgtcacccaagctggagtgcagtggcatgatctcggctcattgcaacctctgcctcctaggttcaagtgattctcctgctttagcctcccaagtagctaggatcacaggtgcatgccaccacacccagctaatttttgtatttttagtattttgtatttttagtagagacggggtttcaccatgttggccaggctggtctcaaactcctgacctccagtgatctgcctgtctcggcctcccaaagtgataggattacatgcatgaaccactgtgcccggcctaactaaattttagaaaacartgttcatagaaccatctaaaagagttcagatgttacttctgcattgttctatgtggtttatattttggaactttaaacatagttttcaaagaagaatggaagaaaccatgaagcttgctamgatggaagacacagtggagtactgcctgttcctgataccagatgagtcaagggactcagataaacataaagagattcttcagaagtacattgagagaataatcactcngtttgcacctatgctggtcccctacatctggcagaatcagcctttcaatcttaaatataaacctgggaaaggtaaggctcttttacttgtttggattagtgtgacttttaatgttatcctgacaacagtgatgtgtaatagtccacgcttcattcagtgttgccaggaagagattaatacactaaactttttagatgagtaatacttgtctatattcagttagccttaaagcttttttttaaaaaaaatcatattaatgaaaactttctaaatttgccttaggaattagcatatactaaacattattaaactcatggctattcttttgaactttagttactacactatgccataatgtatctaagtatctatactaaatagtttcaggcatctggctttaatcatggttccttttgctgttactcaggaytccttattttggtgatgtgtttggtaggctgccttgtttcatatagccattttggtgaggatctgagtggctctgcccagcttataaagataaataattgggctttatgactaatatttgccacttacaagcattttgaggtttcttcattgcttccctgtgttgttggtgcttgagatctgacctctggcaaaatatggcactctgtcctgttatgagaaaaacccaggattaaactaggagggagcggagagaccaaagaatgactcggacaggtctatcttggcaagtagatgagtttattaggacttacagacaagacactcctgggcagcatcaggacagctctagaaatccaccccacctcccatatttaagttgctwgtaagctaattttttggctctttgcctactgcgtatatgcaatgacactgttttccttggtatgttcccagctatgccctgcaatgtttgggttctcaggacctgctcctctgctaggcaygatggctttggcttgccagctggcctttgaagtttaagcagcagacatatacccttaagtagtctggtggggaactggtcacattacagttctatcatttcttatagttttatgaaaataaatcatgggtaggtgaccaagtctctccttacacagtgacttatgtgaggtcttatttgggatcaggagcctggcatcttgtgataccatcacaagatataccccccatgtatacatcacaagtatacatcactgtgatactctcagtttagtgcgtatctgttatcttttggcaacaattgctacatatcttactgttaattttattgaactcttattcattgaaatacatatgatatttattggcaagaacactgtcacattggtgtagcacatctaaaaccaaccctttatccatcctctagaaaaccatttttactgttttcttatcttgtttaatggcattgccatccacccagttatccaagctagtcagtaattcaaaatcataatcagttcctcacttcaccatgttcagtcagatgctaaatcctgaatgcttctaaaatatgaccccttctctacatctatttggcttcagtgtagaccctctttatctctacatctggaaaacaacaacagcctcctaacttacctctctggttcctgtctttctagttcctaacactgttgctggttatgtttgtaaaacacaaatttgattgtgtcactctcctgcttaatatccttcagtagttcccattgcttcaagatgaaatttaaatcaaagtctaatatagacaaaaatagttactttaattggagttctctagttgaagaaacttgagatctggggtggggagaagaagagttggttgggctgttcttctacctattgtttgccatggcagctcttgagacactctgtaatgcacttgtttgaccttcattctgttaatgtgggatattaactgtacattgattttcgtgtgttgaaccatccttgcatcccaggaataaatctcgcttggtcgtggtgaataatctatttaatgtgttgttgaattcwgattgctgatattttgttaaggatttctgcattgatactcatcagggatattgatctacagctttctcatattgtctttgtctggctttggtattagggtaatgctggcctcagaaggaatttgggaattccctcccttttatttttttggaagattttgaggaggattggtgtcaaattctttaaatgtttggaagaattccccggtgaagccagcttttctttgttaggagcttttggattattgattcaatctccttactagttatagatctgttcagatttttgtatttctcatgatccagtcttgacaggttgtgtttctaggaatttgtcaatttcttataggttatccaacttactggtataccattgttcatagaattctcttatccttcttatttctatgacataagttgtactgtcccctctttcatttccgattttagttatttgagtatttgctcttattcctggttaatcaagttaatagtttgtcaatcttttaaaaaaaacccaactcagctgttttgtttttctattattttttctggtctctatatttctctctgctgtaatgtttattatttccttccttatgctaggtttgggtttagtttttgttttttttttttgaggtataggttgttgatttgagatctttcacaactacaaacttcctttttagcactgctttcactgaattccttaagttttggtatgatgtgcattcattttcatttgtcccaagatattttctaatttccctgtgatttattccaagagtgtgttgttgtttagtttccatgtgtttgtgaatagtgcacatgtttgaaaacttctgctccatccaaatctagcgtcctggtattcccagaatactctatacatacatactctatacatcatgcctctgtgcctttgcacatacttttccatttttctggaaagctcacctcttgtcattcctccaggcaagcatagcacagatatcccctcctttatactcacatagccgttactgcacactcctgttctagagttcattatcttgttttgagatcatttggttgtcttgttttaccctgagctcctcaggagtaggcttcttcttcaggattrcaacccctgctccccagtacttagagcaatcagtcaatkaatgtgtattcagttgaatgattatgtgcattttatttgcagtaacaaatttatctggttacatggttgcttttctcttgtttttaggaggtgttcctgctcatatgtttggcgtgacaaagtttggggataacattgaggatgaatggtttattgtttatgtaataaagcagatcacaaaggaatttccagagttagtagcaaggtattgtagttattttaattattctaaaggaattctattactgaaacaaagtgactacatttttatctatttagtaatttatttttctcctgtagtctgctggaaattgtacagattttaatagtatctgtgctctttttttttttttttgagacagtcttgctttgtcacccaggctggagtgcagtggtgtgatcttggctcactgcaatcttcaccttccgggttcaagcgattctcctgcctcagnnnnnnnnnnnnnnnnnnnntaattgaataaaagaatggtaagttaagagaaaatcaaaatataaagtgggatgagtatattgattaagaaaatacaaaaaaaaagatatagagtggaataaggatgaggacaagaataggagtgaggaatgattatagagaggagaataggaaagaatagtgtattagaggtcatgtagtggatgagaggaaaagaagataaaagatttatgaggttgagagatgataaaagaagtgaagatgtgtgatgaaattgaaagatatataaatgttatagagttgagaatgtagtgattgtaaaggtaatgatagagaaatatgaaaaatatagagtagtatggaaatatgtaagagaagaaagatgaaagaagtataagaagaagaatattgaggaagagaagtgaaggagtgatgagaggtagtacatgtaggagagaggggagatagaccattatagtgagttaagtgtgatataaaagtgagaattcaagagtagtgtgagaagatattagtagtgcgcggcacaggagcggtggctcacacctgtaatcccagcactttgggaggccgaggcaggcggatcatctgaggtcaggagttcgagaccagcctcaacatggagaaaccctgtctctactaaaaatacaaaattagccaggcatggtggtacatgcctgtaatcacagctactcgggaggctgaggcaggagaattgcttgaacctgggaggcggaggttgcggtgagccgagatcgcgccattgcactccagcctgggcaacaagagtgaaactgtctcaaaaaaaaaaaaaaaaaaaattaaagtactgtcaaagagttcaacttccaaaagatttcaaataaaacctacttattttaggttttctttttaaagttctaattatgaaaaaacaaatacatgtggtaaacaaaattcaaaagatacaaaggtttctactgctcttgcttcccagaagtaatcaccattaaattccttgtggatctttgaaaaataaaattccattcatacacatacacacatatttcacgtatttttaaatatgtattcctgtactagaccatagctatattttttgagaaatcatacacagaaacaatttaaagagaagtcagtgaacacaattgtataggaagcaaagtaggtaacattacgttaaaaatgggacctgggttttctgtaattaaccacgtattgccagcagagggcgttccgcccacttatattttgtcctagttttcctagtcagcacccaaattctgatctttttttacccactcaacctctttcccaacagaacaaaatagaagggagaaaaaaacctttgaaaacttattatttaaattttaaacatacattaaagtagaaagaatgaacccacatgttcccattatccagcttcaacaattaccaactcatggtcattattatttcatctgtagctgtcatttgatccttaaatatttcaggatgtaaatctaagcgataactcattttatttttatctttaaataaatttatttaaaatttttaaatgttttaaatttatttattatttatttagttttttaaagacggggtcttactattttgcccaggcgggacttgaactcctgggctcaagccatcctcctgcctcagtctcccaagcagctggtactacaggcacatgccactgtgctctattttattttattttatttttttgagacaggctctcactctcttgcccagactggactgcagtggaacaatctcggctcactgcaacctctgcctcccgggctcaagcaattctcttacctcatcctcctgagtagctggggctatgggcgtgcaccaccacacctggctaatttttgtattttttgtagagacaaggtttcaccatgttggccaggctggtctcaaactcctgacctcaagtgatccacctgcctcagcctcccaaagtgctgggattacaggtgtgagccactgcgcccagcctatttttaaaattgataaataaaaattttatatatttattatgtataacatgttgtcttgaaatacatatatattgtaggatggctgaattgagctcataacgtacattacttcacatgacttgatgtattttggtgtgtggatgcgaacatttaaaatctactgcccttagcaagtttcaagaacacaatacattgtaggcctggggcggtggctcacatctgtaatcccaacgctttgggaagtcgaagcggaagcatcacatgaggtcagaagttcgagacgagcctggccaacatggtgaaccccatctctactaaaaatacaaaaattagccatgtgtggtggcccatgcctgtggtcccagctactcgggaggctgaggcaggagaatcacttgagcccaggaggtagaggttgcagtgagtgtgattgcaccactacattccagcctgtgcgacagagtgagactctgtctcaaaaataaaataaaataaaataaaataaaataataaaaatagaagtatagagctagaacgatatataacagtatataaaatatgccatgtcttgtgtaaaaaagggagaaaatacaagtatatatttctatagttagattatgtgtaagcaaactctagaaggatatacaagaaacagcagtgatgcatgtagggttgagcagatagggacaaaagtaggagggagacttttttattttgtaactttttttttttttgagatggagtttcgctcttgttgcccaggctggaatgcaatggtgcgatctcggctcaccgcaacctctgcctcccaggttcaagcaattctcctacctcagcctcccgagtagctgggattacaggcatgggccaccacgcctggctgattttttttgtatttttagtaccagacggggtttctccatgttggtcaggctggtcttgagctcctgacctcaggtgatccgaccannnnnnnnnnnnnnnnnnnnnnnnnnnnnnnnnnnnnnnnnnnnnnnnnnnnnnnnnnnnnnnnnnnnnnnnnnnnnnnnnnnnnnnnnnnnnnnnnnnnnnnnnnnnnnnnnnnnnnnnnnnnnnnnnnnnnnnnnnnnnnnnnnnnnnnnnnnnnnnnnnnnnnnnnnnnnnnnnnnnnnnnnnnnnnnnnnnnnnnnnnnnnnnnnnnnnnnntgcactctaggcctgagtgacagagcgagactccgtctccaaaataaaaaaaaaaaaagtgatgcaaatgaggcagaaataattatcttttcaggcccaaataacacctcctacatgaaggcttttctaatctcagctatgtgtttcttttttttcttttggaaccctatagtactttcgtatattttcatatttttgtctaatatttctttatgtaaattgcttatcttctctccttatcatatctaccttcaactcctccttacaatcttacagtctccttcagtgcttaatgttatcttaaatattttgctttcttatagccatctgcacatagtacatactcaaatatttactaagatgaagaggaaaatgtattagaatgaaactgttttggttactagcagatatatgctttttgaatgcaaaattggaaattttcttgcattaggattgaagacaatgatggtgaattcttgttaatagaagctgctgactttctccctaaatggctggatcctgaaaatagcaccaatagggtaagtatacccaagtttagaaaatttatagagatgaaatcatgctgcattacattcatatgtacctgcagtttgccagtgcccactgtgaaaattgaaatgtaccgtttgcaggtatttttctgccatggggaattgtgtattatccctgcwccaagaaaatctggagcagaatcttggttacccaccacacccccaacaattccacaagcattgaatataatcacagcacattcagaaaaaatacttgcttcagaatctatacgagctgctgtgrataggcgcatcagagggtaagaaaaatatcactttcattgctaattmaggaaccttttggtttcgtgtagttcagtctttctttgatttttgtttgttttccttaaagctctgttggagttgatcagtctttctttgactataaaatacctttcacctagattaatgctaattttcattttgtcttcattcctctttatgaaatagactagtaaattaaacttacagattttaaaatcaggaaacagatacatctttaaattcccattcagaagtgttacaatcttgtcccaatatttttgcatttatttaccttagatattgtggctaagtattagctatatccatgggtaaaaaatttgagacctttaaaaatagaaacttcatgggcctggagcgatggctcacacctgtaatcccagcactttgggaggctgagcagggggcggatcatgaggtcaggagttcaagaccagcctggccaacatagtgaaatcccatctctactaaaaatacaaaaacaaaatagcagggcgtggtggcaggtgcctgtaatctcagctactttggaggctgaggcaaggagaatcgcttgaacccgggaggcggaggttgcagtgagctgagatcacgccactgcactccagcctgggygacagtaggaaactccatctcaaaaaaaaaaaaaaaaaaaaaagtagaaacctaatggagcacaaacaaggtgctcaggttttttctgttgttctgggtctgtatatgggattctttgacctatgtcagaattcagtttctgaataaaactttagcttttattcagaaaagaaaggtcttagcctaattacatattcgttcatccattcaaatttgggtgcctattaaatattaagcaccattcaggtattaacaatattaaaaatatttttggccgggcgcggtggctcacgcctgtaatcccagcactttgggaggccagggcgggtggatcacaaggtcaagagatcgagaccatcctgaccaacatggtgaaaccccgtctctactgaaaatacaaaaaattagccgggcgtggtggcaggcccctgtagtcccagctgcttgggagactgagcgcaggaaaatcacttgaacctgggaggtggaggttgcagggaggtggaggttacagttgcagccgaggttgcagccactggcactccagacctggtcgtacagtagtcgagtactccgtgctcgaaaaataatatatgaaattaataactatagaatactctctttctagtctgcagtcatactattgattaccatgtctattttagctaagagataatatctcctgtattatttcatgttctttgtaattgcgcgcgtctaggtagtgatattcacggctcattttacctggcttgttctgttttgcgcgtatttttctgtcgcgagtgggtgactacgtgtagtcatttgttgtttagtctttcaaaggtgtcttattgctttgtcgtttccttcggtcgtatactgttccccacgtgttttcatgctctattctcaatcaatatcttcttttatatcttattgcttccaactttctctatattctttcaatattacattattctctttttatatactatgccatcataatttttcttctatatctacttcgttactctttattttactatatccttttttatgttcgtacttatcactactcagcttcttctctcttcatcatcnnnnnnnnnnnnnnnnnnnnnnnnnnnnnnnnnnnnnnnnnnnnnnnnnnnnnnnnnnnnnnnnnnnnnnnnnnnnnnnnnnnnnnnnnnnnnnnnnnnnnnnnnnnnnnnnnnnnnnnnnnnnnnnnnnnnnnnnnnnnnnnnnnnnnnnnnnnnnnnnnnnnnnnncattattatttttttctttttacatttctcagtgctcagtgaatgaaacattattttaattgttctctagaaaaaaaaggaaatattctgtttcttcatagcatgttaatatagattgaatattccttatctgaaatgcttgggactagaagtatttcagatttcagatttatttggattttggaatatttgcattaaacttactacttgagcatcccaaatctgaaaattctgaaatctcaaaactttgagcatatcgttgggactcaaaaagttttggattttggaacattttagatttcagatatttacatttgggatgctcaaactatacacgttttttcttttcttgcacccagtgaaggaaattttcaagagacctgcctccccattttatactcaatgttttatagctatttttgaccatatgtttctatttctataattatttccttttttttttttttttttttttttgagacagagtctcactctctcacccaggctggagtgtagtggagccatctcagctcactgcaacctctgcttcctgggctcaagcgattctcctgcctcccgagtagctgggattacagtcacctcccaacacgcccagctgatttttttatttttagatggtgtttcgccatgttggccagactggtctcgaactcctgacctcaagtgattcacccacctcagcctcccaaagtgctgggattacaggtgtgagccaccgcacccagcctaattatttccttcttaacaataaaacatttcatctcttccagagaattaagaattattcttggccgggcatggtggctcacacctgtaatcccagcactttgggtggccaaggcaggtggatcacttgaacccacgtgtttgagaccagactgggcaacatggtgaaccccatcgctacaaaaaataaaaaaattagctaggtgtggtggtgggcgcctgtaatccccgctacttcggaggctgaggtaggaggattgcttgaccccaggaggtttgggaggccaaggtgggcagatcacctgaggtcaggagtttgagaccagcctggccagcatggtgaaaccctatccctgaggcttcagtgagccatgattgctcactgcactccagtctctgcaacagagcaagaccctgtctcagaaatagaaaaaatgaattatctttatcttccagccatttaattgctgtataatgtaactaatgataagaattttactagcgattactaaaaagtaggcagtagggtaaaattttttttgcaacagtgtcttgctctgttgcccaggccggagtgcagtggagcaatctcagctcactgcaacttcctccacctcccgggttcaagcaattctcctgcttcagcctcccgagtagctgggattagaggcgtgcgccaccatgcctggcttatttttgtatttttagtagagatggggtttcaccatgttggccaggctggtctcaaactcctgacctcagatgatctgcccaccttggcctcccaaagtgttgggattacaggcatgaaccaccatgcctggccagcagtagggtaaattttatggtatgtgagttgtatctcaataaagctgttactaaaaacaagtaggcaatgaataggttgaatcttctttgcatttcatatgaatatgaagcttataaatggacttctcattatatttaactgtgaagtgttattcacaatcttaatttcaggaaaagactcatgtattttgtgtcttgatgcccaggtcacattcactaaatgtctatatgcacaattggtgcaacaaaggtttgtgccagaccggcggagtggatacaggctgcctcctccatctgatccccagtaccgagcccatgaattgggcatgaaattggtaatgttgaaccagaaaatgttgtttcctttctttatgtaaatggactcttaatagaatagtggcacaatatacaaagtccagaaatacaccctgtttatgtaagaatgcagtaaaatgtggcatttcaaattagaatgaaaaaaatggattacttagtaagtgatgatgggacaagtctgaagtcatctgaaaaattgaagttgattccctaatacctataccaaaataaattccaattggatcaaatatttgaacataaaaattgaaactatacaatttgaaaaaaaaccaagaaccttttataayttgaataggaaaggcctttctatgcatgacttgaaaccagaagctataaagggaagactgatgaatttgattatgcaaaaattaagcatttctgcacgggaaagaaaaactccataaataaagtcaaaagcaaatctggaaaaagtgttatatttgcaatctaaatgaaaaagagctgacttctctaatacataaagtgttcctttaagtcaatatgaaaatgataatactagccaattaattttaaaatgttcagaactatgaacatagtccacagaaaaggaaatacaggtgacctttaatttaaacatatgaaaaatattgaatcttaactcataataaaagaaatgcactttaaagctacaaaatagtgtttttcttttttttttgtttgctttcaaaaatgttacaatctagacattgataggaatgtctagattttctttttttttttattattatgctttaagttttagggtacatgtgcacaacgtgcaggtttgttacatacgtatacacgcgccatgttggtgtgctgcacccattaactcgtcatttatattagatatatctcctaatgctgtccctcccccctccccccaccccacaacaggccccggtgtgtgatgttcgccttcctgtgtccrtgtgttctcattgttcaattccccacctatgagtgagaacatgcggtgtttggttttttgtccttgcaatagtttgctgagagtgatggtttccagcttcatccatgtccctacaaaggacatgaactcatcattttttatggctgcatagtattccatggtgtatatgtgccacattttcttaatccagtctatcattgttggacatttgggttggttccaagtctttgctattgtgaatagtgccacagtgaacataygtgtgcatgtgtctttatagcagcatgatttataatcctttgggcatatacccagtaatgggatggctgggtcaaatggtatttctagttctagatccctgaggaatcgccacactgacttccacaatggttgaactagtttacagtcccaccaacagtgtaaaagtgttcctatttctccacatcctctccagcacctgttgttctctgactttttaatgatcgccattctaactggtgtgagattaccatctcattgtggttttgatttgcatttctctgatggcgagtgatgatgagcattttttcatgtgtcttttggctgcataaatgtcttcttttgagaagtgtctgttcatgtcctttgcccacttgttgatggggttgtttgtttttttcttgtaaatttgtttaagttctttgtagattctggatattagccctttgttagataagtagattgcaaaaattttctcccattctgtaggttgcctgttcaccctgatggtagtttcttttgctgtgcagaagctcttgagtttaattagatcccatttgtcaattttggcttttgttgccattgcttttggtgttttagacatgaagtccttgcccatgcctatgtcctgaatggtactgcctaggttttcttctagggtttttatggttttaggtctaacatttaagtcttcaatccatcttgaattaatttttgtataaggtataaggaagggatccagtttcagctttctacatatggctagccagttttcccagcaccatttattaaatagggaatcgtttccccatttcttgtttttgtcaggtttgtcaaagaccagatagttgtagatatgtggcattatttctgagggctctgttctgttccattagtctatatctctgttttggtaccagtaccttgctgttttggttactgtagccttgcagtatagtttgaagtcaggtagcatgatgcctccagctttgttcttttggcttaggattgacttggcaatgcaggctctttttttgttctatatgaactttaaagtagtttttttccaattctgtgaagaaagtcattggtagcttgatggggatggcattgaatctataaattaccttgggcagaatggccatttttacgatattgattcttcctcaaaatagtgtttttcatcatttattagcaagtatcaaacggcttgataatacatactgggttgttgagaatatatacagaaaaacattctcagacattgttgataggaatataaattgattgtatcccttaggagaacattttggcaaaacagatgttccttgacttacagtggggtaacttcctgataaacctgtcaaaaattgaaaatatcataagtcaaaaatatatttaatacagctaaccaaccaaacatcatagcttagcctagcctaccttaaatgggctcagaatacttacattagcatacagttgggcaaaatcatctaacacaaaggctattttataataaactgttgaatatgtcatgtaatttattgaatacagtatactatagagtacagtattggttgattgcctttgtgatcacattgccaactgcagcttgctgccactgtgtatccagcatcatgagacagtatgcatattgctagcctgcaaaaagataaaaattgtaagtaaggtttctactgaatgcatattgctttcacaccatcataaagtcaaaaaatgttaagtcaaaccatcataagttggggaccatctgtattcatcaacatttaaaatgcacaaacctttttagtcagcattttcacttctagaaaatgattctttatgtattttacctatatacaaggacatatatggagcatagtcatgacagcattgttcatagtagcaggagactggaaactacttaaatgtccattagtaggggaatagttagataaattgtgctctagccatgaagtaagatggatgaatttgtgtgtgctcatgtaagtgatctccaaggtatatggttaagtgtaaaaagcaaggtgtagagtagtgtgtatgcgtccattgagcaacaaaaggggtggagtagaaagctatgcatacagagaggcacacacataatacttcagtgtgtaggttacttctgaaaggatgtgcaagaagttggtaatggtgttctctagcttgatcagggaagctccctgtttgaattatttagccatgtgcatctattattttttttaatcaaaggacttttaaaatgaagtgatttcctctctttactatgtctgagatcatgttcaatatatgtataatttctgttggacaagaaaccttttgtaaccctgttcataatcaaacaaaaaataaatgtaaatttctggttttgtaatcagcaggaaaaggaatctctttgaagagaacaggaatctttattgtatattattttctttccttttatgtttttagtaatctataatgattgagaaacttgggaataagtttatatttttcataaaattcaaaaagtgttataattgtccaaatgcccatgtatccagtcatctagttctagagtgtggctcaatggraaaaaagtaatgtgttataataagatacgggaaaaaaggaacttagtaacaaaaattctacctatctcatctaggctcatggatttgagatcttatgctccaaatgtagcccacatttttctgactgcaagaaatcccttgtgactgcctcaccactctgggccagtttccttgaaagtctgaaaaagaatgattactttaaggtaggacttgcartatatttgcttttaagtattcaatccagggaaaatcaagccagcgacttaaagtcctatagtccatatttaaatgtatgacataattatggaagctagacttaaaggagacctttctagttcagtggtactcaggtgctaatgaaggaggtatctatgaactgtttccagtattagagaaaaactaacactgttggtattaaatgatgaaagtgattatctgtaccagataaaacaacttgcaaaaacttgataatgcaaacatgaaaacaccagataggaaaattagcaaagatgtggattttaaaaattattaaaagatacctagtaaatttctcttaaaatattcaacttcacaagtagtaaagatatatatatatatatatgaacacagtaatgaagaatgtctttcatgtatgtacaaaaggatatgaatgatattctgtgctgtcgagagtatggtaaaaataacactcctataccttgctggtaacattgcaaactggtagaatcttaactggaaagtaatttggtagtgtcttccaagaggtatagaaaggttcaaacttggaaccttcactttgaataatctttttaaaggaaatatccaagaagtggaaaagtcccgaagmatatgatgatgataaagatggcacagcaatacgaaaagtactaatgatattatagtatatatatggtatttttttttttttgagatggagttttgctcttgtcgcctaggctggagtgcaatggcacaatcttggctcactacaacctctacctcctaggttcaagcgattctcctcagcctcagcctcctgagtaactgggattacaggcccacactaccacacccagccgatttttgtatttttagtagaaatggggtttcaccatgttggccaggctggtctcggactcctgacctcaggtgatccatccgccttggcctcccaaagtgctgggattacaggcgtgagccaccgtgcccagctattactgttgttgttattgttgttgtatagggtcttgctttgtcacgcaagccagtgttgtggtaggatcatagctcactgcagcctcgatctcctaggctcaagtgatcctcctgcctcagcctttcaaatagctgagactaggcatgtgccaccattgcctggctaaagattgtttttttttctttttagtagagtcgaagtcttgctatgttgcccaggctggtctcaaactcatgtcctcaagtgaccctcccacctctgcttcccaaagtactgagattataggcatgagccacagtgcccagctagtatattcttaaaaaatgtaaaatactaagtatgactatcactataaatatgcatttagaaaacacaaatgatagtaatggtgggattttgccattttttattctacttggcaaactttctgtactttgttttgtgaattactagttaatcagctatatctttaatttaattttttttttcatagaggcagggtctcaccatgttgcccaggctggtcctgaactcctgagctcaagcagtctgcccatctcatcctcccaaagtgttgggattataggcgtgagccatcgcacccagccaattatatcttaataagtaattaagtaaaagaaaatggtggaaaactttccaaactggaaataggcccttaatggtggaaaagattaggaatcactacatctagccgcgtcccctcatttgaagaaactggagctcaaacaggcccattaatgataaaacagggcctaggacttggggcacgtgattcctgagtagtagattatttgctgcctccctgaaagttgctggtgaacacatttttttcatgacaacttgtgagtaatgttctgatagacctttttttttttttaagggactgatagaaggttctgctcagtaccgggaaaggctagaaatggcagagaattacttccagctctcagtagactggccagaaaggtgagttattgttaagactcctactacaaagattggtatttaggtagttctttttattttttatttattatttattattcttatttatttatttttttgagacggagtctcactctgtcacccaggctggcaacctccgcctcctgggctcaagcgatcacaccactgcactccagcctggatgacagagtgagactctgcctcaaaaaagaaaaaaaaaacaacgaaagaaattttgcatcctcctctatgtaattttactcatcatgatatcacattttccatggcattatgaagtctttataaacataatttttaaaagctgcacaatatggccaggcgcggtggctcacgcctgtaatcccagcactttgggaggccgaggcaggcggatcacgaggtcaaaagatcaagaccatcctggtcaacatggtgaaaccccgtatctactaaaaatacaaaaattagctgggcatgatggtgcgtgcctgtagtcccagctactagggaggctgaggcaggagaatcgcttgaactcaggaggcggaggttgccgtgagctgagattgcacctggggacagagcgagactccatctcaaaaaaaaaaaaaaaaaaaagctgcacaatatttcagcaaatggatgtacccccataatttactcaactattttttactgttggggaaaaaattacaagtagcttaaatgtccaacattttaatttatgttgcaggagaggctcccattctgcacaccaggataatttttaaacagtttaaaaccaaacttccatctccctccagacctgttgttgaattcccaaagtttgtggtttttttaaaatagctgaattaatatcgtagacttttattttagatttacctttcattttcactttttttcatttattgttattattatttatttatttattttagacagagactcgcttagtcacccaggctggagtgcagtgctctgcctcccgggttcaagtgattcttctgcctcagcctcccaagtagctaggactataggcatgcaccaccaggtctggctaatttttgtatttttagtagagatggggtttcaccatgttggccagactggtctcaaactcctgacctcaggtgatccacccaccttggcctcccaaagtgctgagattacaggcgtgagccaatgcacccagccattaattttttatttttaattattgtggatacatactagttgtacatatttatggggtacatgtgattacatgtataatgtccatgtggcatacaatgtataatgatcaaatcagggtaattaagctttccatcacctcaagcatttatcatttctttgtgttgggaatatttttagttattccatttttttaaggtatttggaactatataataaattattattaactgtagtcaccctgttgtgctaccaaacactagctctttttaattttttaaaaaatattttttgggatttgccaggaagatgttactaaaaagcattccagatccagaccccaagagaggggtcttggatctcatgcaagaaagaattttgggcaagtccatagagtaaagtgaaagtatgtttattaagaaagtaaaggaataaagaatggctactccataggcagagcagcaaacactagctcttattccttctatttaactaatttttgtaaccattaactatcccctcttttccccccgctctctgctacccttcccagcctctggtaaccatcattctacttttattattattattatttgagatagagtctcactctgttgcctagactggagtgcagtggtacagtcatagctcattgcaatcttgacctcctgggtttaagagatccccctaccttggcttctcaaagttctgggattacaagtgtgagccactgcacccagccagccattattctgctctctgtctctcagtttagaattgtttttagctcctacgtataatatcatagactttcccctaatttatcagagattgtaatagtgaaaaattataagcaaccaaagtatccatcaataatggataaatgaattgcagtgtacttatatgatagcctgctatctagtagttaaccagagatgaactatatttacatatatctgatttaggatttttcaacctcagtgctactgacattttggatctgataatttattgtgagggactggcttgcacttcataggacatttaacagcatccctggcctctatccagtaaatatcaatagcacttctccctcatcccccaatcatgacaaccaaaaatgtctccagacattgccagaggtacctgggcggcaaaatcgtccctggttgggaaccactgatctaaatgggaaccactgatctaaatgaatagatttcaaaaacataatgcagtgaaaaaaaaaaaaaaagcaagttataaatacgtacagtaatgggtaccaaaaaaaaaaaaaatagaacgaatgagtaagacctactatttgatagtacaacagggtgactatagtcaatgataacttaattatacatttaacatagagtgtaattggattgtttgtaactcgaaggataaatgcttgagaggatggataccccattctccatgatgtacttatttcacattacatgcctgtatcaaaacatctcatataccctataaatatatacacctactatgtacccacaaaaattaaaaatgaaaatgaaaaagaataaaatatataccgtgtggatgttacacatataaaaattttaaatatacaaaatactatacaggctgggcgcagtggctcacacctgtaatgccagcattttgggaggccaaggcgggtggatcacgaggtcaggagytcaagaccagcctggccaatatggtgaaaccctgtctctactaaaaattcaaaaattagctgggcgtgttggcacgcccctgtaatcccagctgctcgggaggctgaggcaggagaatcgcatgaaccctggaggtggaggttgcagtgagccgacatcgcaccactgcactccagcctaggtgacagagcaagactccgtctcaaaacaaaacaatacattatttatagatacatatatattcatttattcaacaaatatttattgaatgcctcctatgtgccaggccctattccaggtactggggatataataaatgaacccaaagtgtccttgtccttatagagcttacatgctaatgtaggagaaagaccgcaagccattatgtaatattagggggtggtaagtgctatgaagaaaaagcagtgtgtggggtagaggggtagagactgctcttctagatagattagtcaaggaaggcctttctaaggaagttttctttgaaaagagacctgaatgaagtgaaggagtgagacattcagttatttaggggaataacattccagcaaaaggacagacagcaaatacaagaaatagaaacagaaatatatatacatacagagagagagaaaagtgccgaagtatacttgagaaagcagtcacctctggggagcaagacaatggattgggatgggtggcagtggtcatcaaaggaaacattagctttctctacaatttttttttttttttttttttttgagatggagtctctctctgtcaccaggctggagtgtagtggcacgatctcagctcaccgcagcctccacctcccgggttcaagcgatgcccctgcctcagcctcctgagtagctgggactacaggcgcgtgccatcatacctggctaatcttttcgtattttagcacagacagggtttcaccatgttggccaggatggtctcgatctcctgacctgtgatctgccctcctcagcctcccaaagtgctgggattacatctctacaatatttttaaggtacatgataaacctatacacttttttgtcaattaaaaataaacaaataggccgggcacagtggctcacacctgtaatcccagcactttgggagaccgagatgggtgaatcacctgaggtcaggagtttgagaccaacctggccaacatggtgaaaccccatctctactacaaatacaaaaaattagcyggatgaggtggtgggcacctgtaatcccagctactcaaattaaaaataaataaatagccaggcacagtggctaatgcctgtaatcccagctacttgctgagataggaagattgcttgatcccaagagtcaaggctgcagtgagctgtgatcatgccacgcactctagcctaggcgacagagtgagaccctgtcttagaaaaagaaaaaaaagaaactatgcacagagatacttatgtgttgagtgagtgacataatggtgacatgatttgttacataaattgatggcaccctgtctgaactattaagaatggatcaaatcaagttgtataaaggacttgctttaattggataaacatttgcataccttgcaaaatcacgtaggtgatggggaactgtctctactctgtattattaatatgtaaacgttactaggagagagaataaaccaaataatcataacaaaaggcaaaataaaaatcattctggaatatcaaatgctaaagagagtcatagtgagaaggtaataaactttcactaaggttgaagcagagatgttaaaaaaagaaagataatggaaggcttcagggaggaggtatttgagttaagtcttaaagaatgaggattttttttctttttatggagtctcttttttttttgagamggagtcttgctctgtgcccaggttggaggtgcagtggcgcgatcctggcttactgcaagctccacctcctgggttcacgccattcatctgcctcagcctcctgagtacctgggacaacaggtacccrccaccacgcccagctaatttttttttttttttttttttttagkagagacggggtttcactgtgttagccaggatggtctcgatctcctgacctcgtgatccgcccgccttggcctcccaaagtgctgggattacaggcgtgagccaccgcacccggccaacggagtctcgctcttgtcgcccagcctggagtgcaatggcacaatcctggctcactgcaacctccgcctcctgggtaatacagactttgcaaaagttaaagaacttccctgggttctggttttctcatctgtaaaacaggattattaccttctataatagtaacaaaaggactcaataagaaaatgtatttaaagtgttagcatagcatttaatacatgctagataaattttaattgatgctttccttctggatcttcttttcctcgtatataaaatatatattatatgtatatttttatgtatttttagtacgtgttttatatgtatatgtactattaacataatacaactgtatgtacatatatatacatatatagagagagaccctgtctctgcatgtatgtatagaaagaattatacgagatcagtggcttcataatgatgttccatggagcctgcttcagagccaaaaaggaaggccaattgtgtagatctctgagcttctatcctccaatttatttatttttattttattttattttatttatttattgagatggagtcttgctcagtcgcccatgctggggcagctcactgcaacctccacctcccgggttcaagcaattctcctgcctcagcctcccgagtagctgggattacaggcacgtgccacaatgcccagctaatttttgtatttttagtagagacggggtttcaccatgttggccaagtgaactcctgacctcaagtgatctccccgccttggcctcccaaagtgctgggattacaggcatgagccactgtgcctggcctatcctccactttaatgaaggccatttttctttgaccccttctatattttagagttcctggtaaaagttttgtttgagaaaaagggatctgcaacctaaaaatatgcttaaaaacaaattagaaggctgggtgcggtggctcatgtctgtaatcccagcactttgggaggccaaggcagggggattatgaggtcaggagttcgagaccaacctggccaatatggtgaaaccccatctttactaaaaatacaaaaattagctgggtgtggtggcgcatgcctgtagtctcagctacttgggaggttgaggcaggagaatctcttcaacctgggaggcggaggttgtggtgagccgaggtcgcgccactgcacaccagcctgggcgacagagtgaaactctgttaaaaacaaacaaacaaattagagccaggtgttttggcatgtacttgtagtgctggctacttgggaggatgaagtgggaggatcatttgaacccaggagttcgagtccattctgggcaacaatgaaaccccatctcttaaaaaaaaaaaaaaaaaacactccccaaattagactagctaatcccttccaaccttaaaatactatgtatttatgattactattctatgttctcttatgaagaaatactcatgttttttatttttcatagttctcttgctatgagccctggtgaagaaatcttaaccttattacagacaataccatttgatatagaagaccttaagaaagaagcagctaatcttcccccagaggatggtaagtgatggaccaggatacagtggaagggttaaaaaaaaaaaattaaaatgttctactcagtctcacaggatcctctcctaagaggacttatgtgaatgtagaatggcagtattatgctttcttctttttcagatgaccagtggttagatctctcaccagatcagctggaccagctgctgcaggaagctgttggcaaaaaagaatcygagtctgtttcyaaggaggagaaggagcagaactatgacttaactsaagtctcagagagcatgaaagcyttcatatccaaagtctcaacccacaagggagcagagctgcctcggtaatttgtgttaaagtataaatatataaatagctagaacccaaatgttgaagtcatagtcattgccatttccactttttttttttttttttgagtaaatgagttgtactgcttgctttcttttttgtgcctagtatagtgataacttacttatttgaagtcagatttctagaagcctcatcctttgcaatccttgaaataagccagaaagatcaccctaaaaaccatcatccagaaccacacagggaaaccatatactttactctttagtagctttatgggctcaacatttaactttcaacaagttcagacctctgatctcccaccctgcaagcagattggatactgaaaaaggaattcatcagaggcagaaataataacagaaatatgaaactacatttggcaaataacaggaaaaacaggtagatagaattattacttgtaggctgggcgcggtggctcatgcctgtaatcccagtactttgggagaccgaggcaggcagatcacgaagtcaggagttcaaaaccagcctggccagcatggtgaaaccctatctctactaaaaatacaaaaattagccgggtatggtggcgcacgcctataatcccagctacttgaaaggctgaggcaggagaatcgcttgaccccggaaggcagaggttgcagtgagctgggatcgtgccactgcaccgcagcctgggtgacagagcaagactccgtctcaaaaaaaaaacaaaacaaaaaaaactgttacttgtgtatcaaatatatcattattagtgttgatgctcttgaacctgatgaaagatmtaaatttatatttggtattctctctttaagaaagcagggataagggaagatatgttcttgtttattttttaagctttagttcttaaaagaacaggctttatttaaattaactcaaataaataatggttttgctaatgctagatatcttattggggctagagagtgggtaggtccctaaatcagcataagctaaatgtacataaacaagatgcaatttttacttttcatttatcagactttcccatttctgttgtcctgcaaggccagtaaactcaaggatttttaaaacttaaactacaacttttcttgctgtgcctccttagaaattctatctttggtagctttcctaagaatggcaccactttagaaaagtttcraagagttgtatttagaataaattaattgtctttgtcctttaatattgcagaraaccttctgargctccaatcacttttgatgcagattcttttcttaattattttgataagattttaggtaagtagtggtgtgatgttgactttcattttgaaactgttagtagtatggctgttgctagagcattggkttatgagatatctcagaagccaaaatgtttgctttctcttcctggtttgagttgctttcaaccatgaattactacccatgaataattttgtagaggctgcctagcttagtgtttgacatatatagtagctgctcattaattttttttttttttttttgagacagtgtctcgctctgttgcccaggctggagtgcagtggcacgatctcggctcactgcaagctccgcctcctgggttcatgccattcttctgcctcagcctcctgagtaactgggactacaggcgcctgccaccacacccagctaatttttttgtatttttagtagagacggggtttcaccgtgttagccaggatggtctcgatctcctgacctcatgatccgcccatctcagcctaccaaagtgctgggattacaggcgtgagccaccgtgcccggcctcattaaatatttgagagtgactgaatgctgtgtgtttaaatagggttttaccttggctcccatattatattgttcttttttggaattactgtacttacaaatcagtaataaaaagataactcaaaaaataattataatatgtatatatgtacagaactgcagagagaaagattgggatacccggaaactgctaaaagatgcttacctctggggagagagtgagattggagacaatacttgtatggcttgaatgtttacatcaaaatgtattcatttattaggtatttttaaaaattttttaagaaaaatattttaattaattgaattcacttttttttaagctaaatcttttgattcagcttgtacgcttttccacaacattaaatgcacacatatctgccagcattaccatttgtagaagggatttttgtgaagtagactgactgtgtgtattagtctttttcygtgggtaacattctaattattttgagatgtgtagtaactaaawaataataataataataataataataataataattactaagtggctctttctttcttgggatctgtrtagggccaaggcctartgagtcagattctgatgatctggatgatgaagactttgaatgtttagatagtgatgatgacttggactttgaaacacacgaacctggcgaagaggcttccctgaaaggaacacttgataatctcaagtcatacatggcccagatggaccaggaactagcacacacctgcatcagcaaaagtttcaccactaggaaccaagtggtatgtgtgtttttaacctctttctctttctgagtctagtatgtcagatagctaaaaccatattttatcatagtttttctttttttggtgtgtgagatttgaaataaataagaatgttaattgttttcctaastctggtaggataaaggatcatagacttaattttccaaaacataagcttcattatattacttattctacgttatctatcaggatttaaaataaaaagtcatataatatgctcaaattagaatgcgattgtacactactacttcttaaatacattttttttcaaaagtagtttaaaaaaactacagcttaaatggattttaaaaaagagagggcacatgttctcaagaccttttgagactatgccttgggccacagtggattaaaacaaaataacataagtaaataaacaggatcttaaacattcaaataactttccagttttaacagtttattttgtatttttccctaatttagagccaaatttaggattcaccttccgtttatgttttcatcctagtttttaatgccaccactgtctaatcctaaacagaggtattatggaaagagcaagaaccctggagtcttatgggttagggtttgaagtctagctcagctgtccactgtgaatgtatctataaaccagtaatcctcatatcataaaattaacatgagaaccaaattagacagcagtaaaacctacaataggcctttaattaatgttaattctccttgctttgatcatctaaaccacttttaaaactatagtcacttccagaattgtcaaaatctagtagaaaccatacattagatttatctaaagcagtatttcttaaattttaatgcgaatataaaccaaaagatcatgttacaacatagattctgattaagtaggcctgggatgaagcttgagattttccttttttttattattattttgttttattttattattattattattattttatttgagatggaagtctccctctgtcacccaggctggagtacagtggcacgatcttggctcactgcaccctctgcctcctgggtttaagcaattctcctgcctcagcctcccaagtagctgggactacaggtgcgcaccaccgtgcctggctaatttttgtatatttagtagagacagggtttcaccatgttggccaggctagtctctggagctcctgacctcaagtgatccacccacctcagcctcccaaagtgctgggattacaggcatgagcgaccactcccagctgagtttttccatttctaataagccccaagcgatggagactctgctgctccatggacaatgctttgggtagcaaggacataaaagtctatcgagctgtaatctttcaaatcctttccccagcttgtggaatcagaggcccaactaacaatttagaatctttgtggttggaaccacaaagccttgtgtttttacttttaagctttttcactggggggaaagaaaggaacactcgcttctttcattttgaagaaaatttacattattatttcatttaatattcacttttatgtttgtttcttttaagactcttagacaagttataaatgtaccttcttaattctattagcccttgagctatttcaaaatagacatgcaatttattcgatttgcaggaatctttcctggagagaaatgtgttataacctttagaaccaagttttattatgtgtgctaggccatataacttgtagacttcattttcagtttatatcaccaaggataagaagtttcctttttaatttggaatgcaaatttacattgtggcttagttatctttttattgtaaccaccatgcaacctaatgatacattagcccataattttcttttccctctatgaataaggaacctgtatcccagactaccgataacaattcagatgaggaagatkctggtacgggagaatctgttatggcaccagtagatgtwgacctgaacctggtttcaaatatattggaatcctatagctcccaagctggactggcaggacctgcttccaatcttttacaaagcatgggagtgcagctgcctgacaacaccgrtcacagaccaacaagtaagccaacaaaaaattaaccagcacatttagcttctcttttttctttttaaataaatattgaatatgattctgttcatttctagtttagattactcatttrgtaaaaatgtttcttcattacaagttttacagattgacttctccatgagccccaaatgtggccctcttggcacaagtctttgtgatctcagctgtgggttatacacaggttttgaactcggcagggtagaatctagcccctagacaaccttgagatgaaattcacacacttcatgctaaagacataccctaccacaatatacccttggagtaattctaaatatttaaatttctcccttactgctattcatcctcagatcaaaatttcaagttgacaaatttggatttgaaaactsattcactttttcaatttttttaatgaggcayaacatgcatatggttaagtgcacaaatcttaagtgtacagtcagtgaatttttgcatgtatgtatgtacctgaagcaagatatagaacttatttacttgtaaataacagctatattgatatgtcacataccaaaaaatttaccctttaaattatacaattcagtggtttttagtatatttacaaaattgtgcaaccatccctaccatctaattctagaatattagaaaccccatactcactaatagtctctcattcccttctactcccagcccctagaaaccacwagtctactttctgtctctatggatttgcctattttggatatttcatacctgatactgtacttaattgttttaattaattaattggtttgatatttaatataactgatatatcttttgctaagatgaaatgtttatttcttaaaatgatgctcatattcctcctaaaataaatcaagtattatctatatatcataaaattcaccattaaaagcaaaaaaaaagtcttctttacagacagctccatatactgaccatgtttttataatctaggtctctggattcttctttattattgtatgcagcagagagatgcctttactatatcttaccctatccaagtaaaaacaatggaaatagtttcatactgttccctctccagtgaccaagggaggaattaggagaatggtgtagtagagttctcatctgagaacttactatcacgaactaataaaaactgaatatggccgggcatggtggtgggcgcctataatcccagctacttgggaggctgaggcaggagaatagcttgaacccgggagccggaggttgcagtgagccaagattgcgccattgcgctccagcctgagcgacaagagcgaaactccgtctcaaaaataaataaataaaaactaaatataccatatcccactccaatcctttgtcttcctagtgttcactgaaatgaactaaggaagaggataagtgttacacattgactaaagtaacacatcagatgatattgtgcaacattttaacattttaaataataattattttaaatatatttttattgtttgttttgaagctacatttctcatgttaaaaatggggccagaatgccgtcccagctcaactgtgagaaaaaggtttccccccatcgcacttgtggtacattaggtttatcttcattgaggattaaatattgggtagagaaagggtgataggcaaaaatataaatgaaatttttttttattctggttgccacggctgactgactttcagccaggctcacaagattttacctgtttttctattctgcatcatggacccagatgggttctatttatccttagcaccttcataatttattgcccatgtatatattctcaggtcaggtaggtcctgtaccaaagtttcttttatttatctgccattttcagtattccaggcctgctctcttctgcctcagctttcagatatccttggggttctacagcaaagctcttttcccactcactactgagaagcaaagttcaatgttgcagctcctgctgttagccactctcatcttttcttttccaaaaacacattaatcaaaaaacaaacagttactccatggtaagtttgggaaactcataaccaggaattccgcacactcccctttctatcagtattttcagattggggatgtgtacacatgcgctcacaaacacacccacatagagatagaaaagattgggagatggtaatacacatggaccctgaactgttttcttctaactgcaagatatgaagaaatctcaggacctctcttttgtgagtgcttttcccttctgcatgctgggttcagcccaggtaaaggcaagctgccaatctaacaagacaatcaagtcccatcacatattatccctcaacatttcctgatgaaggcactttgatttccccaaagcaatgatggtttgctggcagtggagagagcaatgaccttttgagatcaaaaggaaattcagtgctttaacttttctagttttagaatctctttagtgctatgggactttgggacttagtcctatgggactttgacatgtaaataaccttagggtctctggagcttttgtctttaatcacaaataagtccctagaatcttctgaagatatgattatttcctcttttcagcaagacctctaacattcctcctgcacattgcttcagttgttacactgacttgaaacctggacttaaatgtttaattgtcaccaatagggatcctttcccctacccccaaattctcaccttgtaaaattttctcaattcacaggacagaaaaagacatcagaacaaaggtgtggaaatttcttttattttccccaaataaactcttctcccttatggcatcatatatgaatgatgagaaatcctaaatttagtttattccataaagtttaagaaataggtcaggtttggcatctgtttatctccaccaatccctttgttaatcaacacgttgtggatgtgcaaatgccagcaactgttttatttaggaaaacaggcatggcaaagcaatagtcttttccctgggtcacaaactgagcatgtgacagagctgaaaacagcgaaaaagatttactgtctggagtcccattgggattctacttcctcaacagagcctcagggcatctgatttattataaagtactctgagtcataatgacttaattgtgacttttatttaactagcatgttcatgtaactagaatgcacctgtacatgaattttaaaatgtcatactgtgctatttttcttaattctgtaagggtaacaagtaactcagtaatgacttaaaacttgctatatattttcaatactaagataaaagttttaaccaaacttacaacaggcacattttggcagttagtgtaaacacaacattaacaagccatatgccagaagatgtttgcttccaaggccttagagaaaatgactgaacaagggcctacatccaaactaatgcttcccccttccccctgatttttgacagttgacagctcatcagttttcttctcacactggcttttttgattgcccattggtaggaatttcttccattaacactgctgatagaagtgtcttactgtaggctcaccctttgctctgcccttctgaggtccttctgcagcttatcttttgtcacttctcctttgtcaactgatctctagtttgtccctcaggaataccaaggagcgatctaagtgacttgatccgggctaagcaggcagggaagaacaggtctgtttttccacccactccttaatcagttggtgggagatggctaacttagggggcagccagaatgggaaagtcccattctgttgctgagtataggggccctttctcttcagggctgtggctacctcatcatgactgaaccaggcagctgtctctaattctctcaagttcacctggatctgaaagacataaggaagaaaaggatgtaaggtcaggagctacaaaatttagaatactatggccaaaggtcagaaaatgattctagaactaagcaatcttagaagataatacctgggatcttcaggttaggtgaaagtcagttctagatactgcccagaagcaaaagaggcataattaagaaatgagagttttatatgtgtgtgtgtgtgtgtgtatatatatatatatttttttttttttagacggagtctctctctgttgcccaggctggagtgcagtggcgctatcttggctcaatgcaagctccacctcccaggttcacgccattctcctgcctcagcctcctgagtagctgggactacaggcgcccgccaccatgcccggctaattttttgtattttttagtagagacagggtttcaccgtgtcagccaggatggtctcgatctcctgatcttgtgatccacccgccttggccccccaaagtgctgggattacaggtgtgagccactgtgcccggccgagttaaatatatttctaacatagtaaaaaaaaaaagataagatacattaaataaatcctggaagtacaaatactaaaatgttaagagtggttaacattgagaataaattatgaataatacctatttttccttgtgtctctattgattgtataaatttttcaattaaaaaagaacatacaaatattactttttttttttttgagatggagttttgctctttttacccaggctagagggcaatggtgtgatcttggctcactgcaacctcccctcccaggttcaaatgattctcctgcctcagcctcccgagtagctgggattacaggcacccgccaccacacctggctaatttctttgtatttttagtagagacggggtttcaccatgttggacaggatgtttttgaactcctgacctcaggtgatccacctgcctcggcctcccaaagtgttgagattacaggcgtgagccactgtgcccagccactcttttttttttttttttaaagggtaagggttaatgatagtcaaaagcatagtctcatctttgcaagaagcaaagtaatgcaaacttcatcccaaggaagctgaaatagattagatattctataaaaaccaaaacatacaataggcaaactttggcaggcagagaccatcagtcagtgatgctagagaagtgcaagatgagattggataaaacaatgtctagccgggcatggtggctcatgcccataatcccaacactttgggaggccaaggtgggaggatcacctgaggtcaggagttcgagaccagcctggccaacatggtgaaacccccatctctaataaaaatacaaaaattagccgggcatgctggcaggcacctgtaatcccagccactcgggaggctgaggcaggagaattgcttgaacctgggaggcgaaggttgcagtgagctgagattgtgccactgcactccagcctgggcgacaagaatgagactccatctcaaaaaaaaaaaaaaaaaaaaaagacaacgtcttaagtttctttcaactacaagtacctatagttttatatttttagttcccagcatcctgactgacttgagcaataagaccaatcctgcagtcagtcattaaatgatgcctgattgtgcgcctactatatgtaagacactcttaactcctgacaataaaaggtaaattgtcttatataaacagtgttgggaaaattggatatccacatgcaaaagaatgaaatcggaccgttatcttacatcatatgcaaaaaccaacttaaaatggattaaagacttaaatataaaacctgaaacaataaaattcttaggagaaaacataaaggaataaatttctagacattagactgggcagtggtctcttagatatgataccaaagcacaggcaagaaaagcaaagatagacaagtagggattctatcaaactaaagcttctgcagagtcagggaatcaatcaacagagtgaagagacaacctgcagaatgggagaaaatatttgcagaccctctatcttataaggagttaatatccaaaatatataaggaacttctacaacttaataccaaaaaataaataagccaatttaaaaatgggcaaagaatctgaatagacatttctccaaagaaggtattcaaatggccaacaggtatgtgaaaaggtgctcaacatcactaatcatcagggaaatgcaaatgaaaacctcataccttctttgatggctactattaactcataccttctttaatggctaccattaaaaaagtacaacggacagcaagtattggtaaggatgtagagaaaagggaacccatgtacactgttgtggggaatgtaagttggtgcacctactatggaaaaaaatatggaggttcctcaaaaaattaaaaatagaattaccctttgatctagcatcccacttctggattgaaatctagatcttgaagagatatctgcactcccatgttcactgcagtattcacaatggatgaatggataaagaaaatgtggtatatactataatagaatattattcagccttaaaaaggaaggaaatcctgcagttgcaacaagatagataggcccaaaggacatgctaagtgaaataagccagacacagaaagacaaatattgcatgatctcacttatatgtggaatctaaaatagtcaaacttacagaagcagagagtagaatggtggttgccaggggctgaagggaggggaaaatggaaaaagttgcatgccaggggctgaagggagggtggccactggtcaaagggtaccaggtttcagtcatgcaaaataagttttgaagat

SEQ ID NO: 96877 - DNA, 60892 bp, Homo sapiens
aacaaaaccagaaaaactacatttcctgtgattctaggtgggaagttttttacttctaaaattcatttttataaaaatatcattatcaaattaagctcttccttaagcctatatttcaaaaataggcatttcactagttcttcctgaacctaagataatcagtattttcctaattttccagagccaccaagaggttgagtgacctgtacaaccgttaataaagtcagcagcagcagtctcagtgagcctgaatcctcatctcctgattgacaggaaaaatctctgtggtatcagatcacctggattgcccagtgctatgggctcctggactcaagaaaattgttcaaagatgcaccaaaattaagtattcattattttcagagtttgtatcaaatttacagtggtagccaaacaggaaatatcacatgctgccaagatcaccacaggcatatttaaaaacttgtattaaatatctggttgctggagtgcaatatgaggtgctgttcaaagagcctctgtagctgtggtcctgccttctggcagcttacagcagcctaacgcagacaacccttacccccatgtaaagtgtaagaaggtaaggtttgacagagcagaagcatcgccatcttggacaagcactgccattttaagttctcccaattaaaaaccgcctaaatccagcccagaaaacatcagcctaatggctaatgtcagcatgaccataaaccataaatgacaccttagaccagaaactttccaaccctgagataaagccccctctgaccagagacatcccagccccgagataacctcccctccgaacagacattccacccttgaaataaaattctcctccacccagaaacactccgagcatgcgataagctctcccttgctaaacccttaagtaccctcagtctgtaagacagaatgctcctgattgaaatcagccagaatactccccaaaataaacctgtctttgactattgagccacttcttgtgtttcctccttctttcttcaactcttacaaggttgaaaatattaagtcgttttttgcattcaacaaatggtatctacatacttcacacattctgttaagctttgcagggttgtgtttgttttggttaggttttttaaggaaaatgaaaacatgattcctgcctttaaggagcttacaatttgaagtttaaagcaggagtatccaatcttttggcttccctgcaccatactggaagaagaagaattgtcttgggccacacataaaatacaccaacactaatgatagctgatgagctaaaacaaaacacaaaaaaccctcaatgttttaagaaagtttacgaatttgtgttgagctgcacacggcctgcaaaccatgggtaggacaagcttaaagtatagtgaacaacaaaggaaaccttattaaaaaatgggcaaaggagttggacagttctccaagaaaatatataaatggccaataaacatgaaaagatgctcaacatcactaataaggaaaggtaaaactaccatgaaataccacttcacacccatcagaatggctattatcagaaaaagcagaaaataaaacgttggtgagaaattggaacccttggtactcctggcgggaatgtaaaatggttcatctcctgtgaaaaatggttcctatggtggctcctcagaaagtgaaacaattaccatatgatccagcaattccacttctgggcatatgtccaaaagaattgaaagtagggacaaacgtgtacacacatgttcatagcagcgttattcaccatagccaaaaggtaggagtaacctgagtgtccgccaacaaatgaatggataaacaaaacatggtgtgtgcacacaactgattattattcagccatacaagaatggaattgggtcacatgccataacaaggatgagccttgaagacacatgctaaatgaatcaagctagtcacaaacggacaattactgtatgactccacttacatgattcgtcaaattcatagaaacacaaagtaacatagtggctgccggggtgagggagggaagaatgacaagttattgtttaatgcatacagagtgtcagtttgggaagatgacaaagttttggaggtggttggtggtgatggttgcccaacgatgtgaatgtacctaatgccactgaactgtacacttaagtggttaaaatgatagattttatgtatattttaccacaatagagaaaaaaaagcatagtggattagaggcaaataatgatagtgtcaaatctattactgagtgtaagtaatgcagttttgctgaggaagcatagactttagaggtggaaaaagtagaagggttctcagaacatggtccccagagcagcagcatgtcatctcctggagctgttagaaatgcaagttctccggtcccctttggatcagaaactaggagtggagccaagtgttcaacaagccctcctggtgattctgatgagaaccatcactttaaagagaaaggaactgaggctcagagatggcgcctacatcacaactcctcagtgcatcctgtggtcaagtaccagactgagtggctggaggactgctgagcatggtgactggtgagtagaaaagatgtaaccagaggtgatgttaacactaatgtggtatcctgcttgtcagggtgcagtggtaagcacatggtggatgctttcaaaaacaaatacaaataggttgactttttaaatctatctggaaagatttcacagaaaaatgggacttcttagattttagagctcagtttcaccgaaactcttcagagttttaattcagttttatcactgccaacgtttgtttgttgctctcccaaatgagtccaagctccttatttcccatggtgcgcttgtgatatttccttaggataaatgtgtaagttatttttaatgaatcctactgaatataagattacctactttgcctgtaatcccagcactttgggatgccaaggtgggtggatagcttgagttcaggagttcgagaccagcctgggcaacatggcaaaaccccatctctactaaaaatacagaaattagccgggcatggtggtgcacacctgtaatcccagctacttgggtggctgaggcaggagaatcatttgaaccccgcaggcagagactgcagtgagctgagattgcgccactgcactccaccctgggttatagagtgagaccctgtctcaaaaaaaaaaaaatacttatttgataaatgttaatattttataaatgcatcattcactgagcaacccctcctccttgaacttcagctcctgtgactccacccttgggtttccgttcgtaaatctgtgactacttcttggtctcctttacagcgtcctattcctctgcccacatctgtgatattaggcttccccaaggttccatcttggaccccattttccatgggtgtgatctcacccctctcccctatttaaattaccatttatatgttggtagctctcaaattgttactctagctcagatatatcctagactgatttatcctcttcgtaactggtctatttctagcattgccttctgtacattaaattctctcaatgtcaccagagtatttttgtttttaaattctaatagcacataatttagaaaaattgtaacatatgaacaagcattaacattaaatatgggggaggaaagactacaagacaccacaaagaagcaattcaccaaacccaaaacgtggaacattctgtaggacaaatgatggggtttcttcaacaaatggaaggaaggggggaagaccattatggataaaaatatatatatatatatatattttttttttgaaacggagtctccctctgttgcctaggctggagtccagtggcacaatctcggctcactgtaacctctgcctcccaggttcaagtgattttcctgtctcagcctcccaagaagctgggattacagacgtgcaccatcacacttggctagttttgcatttttaatagagatggggtttcaccatgttggccgggctggtctcgaactcctgacctcaggtgatccacccaccttggcctcccaaagtgctgggattacaggtgtgagccactgcacccagctgataaaaataaatttaagtgacaatcaaaatgcaatatataaatcttgtttggatcctgactcaacccagcaataaaaggaatatttggaactattggagcaatttaaatatggattggatatgagttaaggaattattactaattttcatagttgtaataaaagcatcatgattatgtaaaaaaatacaatgtgttagaaatgcatactggtatgtaaatgaaattgatagaatgttagtaattattatagctgagtgttcattattgttctttatacttttgtatatatatttgaaatttttcatcataaaaagtaaaaaatgaaagagcaggtcaactaaaaaggaaaaaatagaaataagggggaaaaaacatcttaccatcctgggaattcttgtttacagaaccaaaggctatctggtgaaagtccttgactccagcaatcaatcctggcaacaagtctgggtttatctcatgcacacgtcctctgtttctctgcaacacatatgaagccctcagatggcttcctaggcgcaggaagttgtgggggattgttttttctgtttaaagcactgatacttagcaacactatcctgcaatgagacagcagagtcatccattgctgccatcaaaccacaacttaataagttaatggtcaaattgcctgtgtcccactgatgttagtaatgaagtagctaactacaattttagatcaatggaaaccccttgcttgaccataaaccctgtgcttctggagaccatgtgtacttttgtcattgtcaaaaaccagtgattgcccgagctcggtggctcacacctgtaatcccagcactttgggaggccaaggcaggcggatcacgaggtcaggagatcgagaccatcctggctaacacagtgaaaccctgtctctactaaaaatacaaaaaaattagctgggcgtggtggtgggcgcctatagtcccagttacttgggaggctgaggcaggagaatggcgtgaacccgggaggcgaagcttgcaatgagccgagatcacaccactgcactccagcctgagcgacagagtaagactccgtctgaaaaaaaaaattgtgctaagaagcacattttctctcctttgtctaaaagtgaaacttcaggaaattttgacatttaattttccagagtgttaatttaatgagtagtttctaattttaagctcctaccccatcttaatgtgagaattagtgaaataaataacattaaaccattttttaattttgggagtaaagacaataaaaatatgaggtattgctgcttgaattagtaaaaacacaatttaaaccttgtttctttcagaagttttgaggccaaagaccgtaataaaacaaactcaggagcttatttcaagagaatactgtccttgtctcatacctgtccttactactttgttttgtgtgctattataagctcctcaaccatctgaccaagacagttgcagtgatttggcttcatccattctcgtttagtgtgcagtgctatggctgcaacattgtgaaatcaattcctagaagtcacaaagcaagaatttgacgtgaagggatgtccctcatttagaattcccttctggataagatactggggtttcattgcagggaattcttgagagaaaacaataggaggatgagggattgtgagttgtgtttttttttttttttcctaaagaaaactattaataaaggaaccctgttgacagtgtaaagcagtgcttctctctggggccaaggccagagctgtggacaccttatcccactcatcctcatcctcttcctctgataaagcccctaccagtgctgataaagtctttctcgtgagagcctagaggccttaaaaaaaaaagtgcttgaaagagaaggggacaaaggaacaccagtattaagaggattttccagtgtttctggcagttggtccagaaggatgcctccattcctgcttctcacctgcctcttcatcacaggcacctccgtgtcacccgtgggtgagtctcatgtcaagaacttggcacaatgcactttttgttgtggcaatttgctataatgtacagatgattaagaactagattccagtaccttaaatgctagctctagaatcttgtaagaaaagtccctaataatccttgaaaatagatttcccgagaatttctgttacatgttccatttagcctcttgcctggactccaaaatttccatggatctgccatatcccacagctttcactagctaaagagttcctggagtatgtgtaaaaataattctatcttctttgtgttctaggcactttatagttccaacttgaagagccaaaaaaaaaaaaattaaagttgagcatagaatttttctttaatgaaggcaagggactgaaagctctgttgccatggggggcacagatctggataaaccaaactcattagtctttatgtcagaaaataagactttttgcacagatcgagtgaatcttaaattgtctccctcctcaggcttggtgcaaaactggccagtcaggcaaagaaaagtttcaattccagttactaacagatttctctcttgcatctttttctagtagaatgtgagtactaactggaacagagggtgggggtgagatggagagaaccatccttcttgacacttttgagtagctcagtatctaattgaccctggcttatttcttcatggttgctctagtacctgaaaggatacacattaaaaataggcttgtggccaggcacggtggctcacacttgtaatgccagcatttgagaggccaaggcgggtggatcacctgaggtcaggagttcaagaccagcctggccaacatggtgaaactccgtctctactaaaaatacatacacacaaaaaaattagatggtcatggtgttgcatgcctgtaattccagctacttgggaggctgaggcgggagaatcacttgaactcgggatgtggaggttgcagtgagccgagatcgaaccactgcactccagcctgggcaacagagggagactccatctcaaaaaaataaaaataaaaataaaaatggtgatttgagaccctaaggagacctgacacctaaaggtaatgtgggatcctggaacagaaagatatgggtggaaactaagggaatctgaataagtgtggacttgagttaataatcaggtatcaatagtgggtcattaatgtgacaaaggtaccatgccaatgtgtggtaaatgtatggctaaaggtaacgtgtcataacaagggaaactgggtgtggggtatgtgggatctctttgtcctatcatctcaattatgctgtaaatccaaaactattccaaaaaatatgcttgagctacctgtcattaatcaccccctatctgctgccaataactaacccaagggtcgctcagaaagttgtcctcccgaaaatctccactcccctttcttcccacccttctccttacctattctccctctagtacctcctatattccccattctttccatataccatcgcccttcccagatcttttcctccaacccccagctcctcaaggatgatatttggctcaatgccagaagcatgataaagggggaactttgggaactagagctggtgtttgccctgagaggacaggggaagtgagagaagaggaaaagaagggatgagaaagggggaagcaaagtggggtgatgagggaggaggatggaagaggatggagcaggaaaggaggggcacttcccgaccaagctcaggcacagggtcgaaaaggggctgtgattcaggggcggctgtctgccggataggacctggagggttggaggactcaaccctggggcgaaagggtggggacgcagacatggttccctgcccttggccctgcgtggtcctggtggaagacagcagaggggcagctggcaagtgggcatcttagcaaaccattgaggagcttctggcaggccaggaagctgttctttttgaagccttcgcactgagatgtatagatcagcattttaggatgaatgtgcgcaataccagattctgggcttcacgctgagattaaaaacaggatataagaccagtggccagattattagattggattgctgccttaaaagggggtagagtgggatgggtacgttaaatgtcagaaagtattggatggttaacttttaaaaatatatatgtattatttaattagttatagaagatggtagataaacttttcctcctcataccctatctcccctacagcaggggaggaagtgaacttttagcaaacagcccaagaaatgacatttaacttgaaggaaaaactttataaataaggaaatagttactgagagaggtttaggagtttctgtagaagcgattaaaagttaagtatctaaccatttcttataaaattagagccagggagaggaatcaaatatttctatgactctgtaatcacctgtgaaactgctctggaaaccttatttgtaagaaaaagtcacagctgggagagcaaaggaggaagaaatttgtcccttttgatgggagaaagaatctgaggatatttcttcccctcaaaggattatggtctagggttcagccgagatacataaggggcattttaaagaaagagggttgtttctgccatttgcaaccctgcgtgttatttccagaaaatgcaatatcccacttatttcttgtcttacattgtcatattttcttggaggccattagcagtgggctacacttttctctacatgtgactgaagtttagagagtaaacttaactttgaattgtggatatgtagattggaaaaatctaaagtattttctagacaagttagatttggtgatcatggcccattcatatttaatttttgtgcagtatttgctaatactgaattccctgcccacaaaatgtattggccctaatgtgaatttcctgcctatgatatcagttacgtaagtcaacctcatgtgcattaagaaggataatatagtactctctggccaatgttcctttctagaatttcttggtttcatagattcttcataaggacaatttacctatgttgattcattaattagtttccctggagttaaggggagcaatgagaatattggagatattggttctttagtcattaaaatgttgtttttctatttatttatttgtttgtttgtttatttatgagacgaagtttcactctcttgcccaggctggaatgcaatggtgtggtctcggctccctgcaacctccaccttccgggttcaagcaattctcctgcctcagcctcccaagtagctgggattacaggcacgtgccaccacgcccagctgatttctgtatttttagtaggggtggggtttcaccatgttgaccaggctggtctcgaactcctgacctcaggtgatccacccgcctcggccccccaaagtgctgggattacaggtgtgagccactgtgcctggccaaaatgttgttttccaatgttttcatgacatacaataaaatgttttggttgagatatttgtccttgtaatttatgcactaaatatgtatgcctgagaaacttggctatatgacagctaggatagtaatgccatggttaactgtgaatacacaaagttcttggtattttcaataagctggtaaaatatataccaaaattcactttgagaatatttctggtaacaacatgctagtatactctgtatttcaaagtaggtgacatgtgcccgaggcctttttcttttcagtggaatgagcttttacacattcctgatcaagtcaaactttctaataatgcaaaattccacctataatctttacaaatggccagccaaatacttttttgaaaatttccaaggattggaagctaactgcactgtgacacagcctctccatgactggatagctgaactgaaacgtgctttcccataattcattcttgttcttgtaacagaatagctaattcctctttcacacgcctgttccagatttttaaaaactaatatgcattttcttccatcttcttttttcaaaatgatagttctcaacttctcctgtaaataatttttaggaccccttctaagtctgttcaactttctctgaacaaatttgtcaattactttcataaaatacagtctccggccgagcaccagattcatgcctgtaatcccaacagtttgggaggctgaggcaggaggatcacttgagcccaggagttcaaaaccagcctgggcaagatgccaaaaccctatctctaccaaaaaaaaaaaaaaaaattagccaggtgtggtggcatacgcttgtggtcccagctacttcagaggctgggtggggaggatcacttgagcccaggaggcggaggttgcagtgagccatggttgtaccactgcactccagcctgggtgacagagccaaaccctgtttcaaaaataataataatacagtctccatgtatgaacaaaatactcagagtgtggtctgactcgtgcagagttcagtgagtctttaatcctaacctcccttggtctgatcaactatccttctatcaaataattactctggataaaaattcagttcaatgctaacacttaactttaggtttgaaatacttttgaaaagggcatttatgcaacatgtttaaatcaacctgaggaaccttaaacagctattttttgtgaccttaactaatttctctctggaattcaaaaatgtccaaatgcaagaccaagaagttggacttgggctgttggtggtgtgatccgaaacactccaggtactctgaggtatctttttcatttccagccctagatccttgttctgcttacatcagcctgaatgagccctggaggaacactgaccaccagttggatgagtctcaaggtcctcctctatgtgacaaccatgtgaatggggagtggtaccacttcacgggcatggcgggagatgccatgcctaccttctgcataccagaaaaccactgtggaacccacgcacctgtctggctcaatggcagccaccccctagaaggcgacggcattgtgcaacgccaggcttktgccagcttcaatgggaactgctgtctctggaacaccacggtggaagtcaaggcttgccctggaggctactatgtgtatcgtctgaccaagcccagcgtctgcttccacgtctactgtggtcgtgagtaccttccctgtgctctttttctccaccaacaaggccacaggtggagtccaaaagtgccaattataggatatgcagttacagtggcaactatatctcaatctgaacaacattgatgtggggctaaagatacctctgatttctgagatctcttcttagaacttctgaaaaattcctgaagaaatagaaggggaaaggagctatgactttgatcagttctttttaattttgtctgaattccattcaaacaaaacattagaaaatgaaacattgggccaggcgcagtggctcacgcctgtaatcccagcactttgggaggctgaggcaggtggatcacaagatcaggagtttaagaccagcctggccaatatggtgaaaccctgtctctactagaaatacaaaaattagacaggcgtggtggcaggcaactgtaaccccagctacccgggaggctgaggcaggagaattgcttgaacccgggaggtggacgttgcggtgaggcgaaaatcgtgccattgcactccagcctgggtgacagagtgagactctgattcaaaaaaaaaaaaaaaagaaaaaaagaaaatgaaacactgatttagattatctaaatggtggatttccaacttttgagtatggagaacccctttttaagatagatagatgatagatagatagatagatagatagatagatagatagatagatagatagatagatgatagatagataatcagacatccatgtgattggattgtgtttagtgtccactgatttttttaagtgatatacaatgggaagaagctactttatgtcagtaatacttttaatttctgtgttattaatcctgtcaatgtctgtattcattttttaaatagaacactagaagagtaggacataacactttcttagtctatagctcttgtatggtgaggttttggatttgcagaaactctatggccactcaagggcctgtggatctgaagttgggaatcattgatctagatgacagaagatgccctagattgttgttttccattggtttatataaaccctgaacaatgaggattcccttgatggtggctggaaactcatcccccaggctgcacttatgaggctctctcaagaagagggtcagctggatgcagtggcttatgcctgtagtgccagctacttgggaggccaaggtgagaggattgcttgagcccaggggttcgaggccagcctgggcaacatagggataccacsccccccgaccccccgcaccatctctaaaaagaatgaaagagtgtcttctggtctcctgccctcatgaagataatctttattcttccatagatttttatgacatctgcgacgaggactgccatggcagctgctcagataccagcgagtgcacatgcgctccaggaactgtgctaggccctgacaggcagacatgctttggtaagaaactcatcaaaggtagaatcaggctattaggatcgaaaggacaaatcaaaaactcttcctgcctcagagcaccatcattttcccagtgtgtgtctccaaacacttggaatggtgtttgctttttagtttatgcctggaccgaaagccccacgccaaatttgtatcatgattagggacagcagagaattgtgccctccactagggtagccacagatggccatggtgcacttgaaatgtggctagtgtgactgaaaaactgaattttaattttattttaattttaaaagtgatgtttggctacacacggtggctcgcacctgtaatcccagcactttgggaggctgaggctgacagatggcttgagcccaggagtttgagaccaccctgggcaacaaagaaaaaactcatctctacaaaaaatatgaaaattatgtgggtatgatggcaggtacccatagtctcagctcctcaggaggctgaggtgggaggatcacttgaacttgggagttcaaggttacagtgagccatggttacaccactgctctctagcttgggtgaaagaacgagactctgtttctaaaaataataataatatctttaatattggttatatatcaaagtgaaaatattttgcatataattgggttatataaaatatattattaaaattaatttcgccagtttatttttaaaaaattttaatatgactactaaaaaattttaaatatgtaatttgctttatatttctgttgaacagcactggtctggtctagaattatctaaggacttactyctctagcttcactgatacaattttggttgttctgagtagcaagaaagatgagtcagattgtctgtaggaaatccagagttcttgaattttatattatgttgtctataactagaagagaacagagatgaaaaccccaagattgaatattatttctctttctctttaatgttatgaagctttttggattcagactcaaatagatttaaaacaagtctagagagaaaggggaagattgccctaccctggtcccccaagaagaacagtaacaggtcaggattgaggtaggagattaaggtgaaaggagcataaaaggcttattggtttttgtttgtttgtttgtttgtttttgagacaggatcttgctctgtcgcccaggctggagtgcagtggtgtgatctcagctcattgcagcttcgacatcctgggcccaagtagcttcttgttttagaaaagcttttgctcttcagtctcctaaatgagccaggggcaatggctcatgcctgtaatcccagcgctttgagaggacgaagcaagaggattgcttgaggccgagtttaagactagcttgggcaacatagtgagaccccatctctataaaataaaaataaattagccagacatggtggcagccttccaaagtagctgtagtctcagctgaggtaggtggattgcctgagcccaggaatttaaggctgccatcagctctgattgtgtcactgcactccagccagggcgaaagagcaagaccctgtctctgaaaaacaaaacaaaacaaaacaaaacataaatacttcaataaataaagcctcctaaatgaaccccactgaccatcctgtgaagcatgtttcggctctgccataggcgttgttagggatctcgtgtgattgattttgagtatgtgatttaatgctaaatgccttggggtaggggcaatagtggttcctgaagtctctgcccaccctcatgtatttctgttcaaaaatatttggctttattttaagccaggagttgttcatgcatttctttgcttttgttttaatataacttttgaagaggtaatacgtttaaatggttcccaaattaaacaacatgaaaaagtatacagcaaactgtccagctctcagtcaccctcttgccccatttccctcttccccaactccatcccaaggaaacggctgtattattttcttatatgtgcttccagggtttctacagtcagatttaaaaatgtaaatatatatatgtgtattagtctgttctcatgctgctagtaaaggcatacccaagcctggatttataaaggaaatttataaaggaaagaagtgtaattgactcacccttccacattgctgaggaggcctcacaatcatggcagaagatgaatgagaagcaaagtcacatcttacatggcagcaggcaagagagcatgtgtaggggaactcccatttataaaaccattggatttcgtgagacttacttactaccaagagaacagtgtgggggaaattgcacccatgattcaattatctccacctggccccaccctttacacatggggactattacaattcaaggtgagatttgggtgcagacacagccaaatcatatcaatatgtttacttattggccatttttaaacatcaaaggtagcatatcattcacatctcttccttaatttatcttagacaatctttttctatcaaagccccaagttcctatgtggggtctgtgggacttcagggagatggtgaatcctctgaaattgtagacagtgttttgtgtttgtaagcatgtgtcaattttcctttagtttttatttaaatgtaataattttaattattttaaattatataatttgttcaggcagcatacaagaaaataatataacagacactcatgtacctagatttaactagagttaagttttgcttcctttttgtttttcttttctttttttttgagatggagtttcactcctgttgcccaggctggagtgcaatggcacaatctcgactcactgcaacctccacctcccaggttcaagtgattctcccgcctcagcctctagagtagctaggattacagatgctcaccaccatgcctggctaattcttttgtatttttagtagagacagggtttcaccatgttagccaggctggtcttgagctcctgacctcaggtgatccacccaccttggcctcccaaagtgctgggattacaggcgtgagccaccatgcccagccccctttttcttttaatttaaatacaattttgtaaatacagtaaagccatcccaccccatcctgctttcttctctcagcctccaggggtaatcattgttttgaaattaacatgtgttcttctcatcccattttaatgcttttattatttatgtatgtacccataacaatagatagcattgttttgtgtgttcttagaattaacataaaaatgataccttacccaatgtgtgagattttctctagcaggtacccataagaatggaactgctggggcatagagtatcttcactggctataacaataaaccccaaataatgatgggttaaataagtagaagtttatttctctctcatattaaaaaaaaaatcagtcctaagggaggagaccacccctcatattgtcttatgcctaatttctgcctccaaaaaaagaagaagtaagaactaaaagacagaaatgaaatccacaggcagacagcccggcgccacaccctgggcctggtagttaaagatcgacccctgacctaaccggttatgttatctatagattacagacattgtatggaaaagcactgtgaaaatccctgtcctgttctgttctgttctgattaccggtgcctgcagcccccagtcacgtacgcccctgcttgctcaatcgatcatgaccctctcacgcagacccccttagagttgtaagcccttaagagggacaggaattgctcacttggggacctcagttgttggagacctgagtcttgccggagctcccggccgaataaagcccttccttctttaactcgctgtctgaggggttttgtctgcggcttgtcctgctacagtccaagataagcagtccaggcttggaatagaggcttctaagtgacctacccaagcacggatgtcaccatgtctacatccaggaaggctgtgggcctctaaccatctactttccaggcagtataatgaggaaagggaaagaaggagccctgataaagattcttaatattatcaacattttgcatttctacaagttctgtttgtttgttttcagttctgccttgtctttttacacacttcttttattttgcttattatcctttcttttatctttttactaattctttaaatacttgtattatggatttttctggataattctgttatctccagttcaaagcctctaattatcacgataatgctctctcacagtggatcatccctcatgtaagtgtcttgtggcagaccatcttctgttgtagttttttctgtaggacaccactcgtgtcatctggtatctttgtttagtgttgctataaaggaatacctgaggctgggtaatttataaagaaaatgggtttatttggtttatgattctgctggctgggagactgagcatctggggagggcctcaggctgctcccactcatggaggaaggtgaagggtgctggcatgtgcagagatctcatggcaagacaggaagtgagagtgagaagggggaggtggcaggctccttttaaacacgctgaaactaatctaatagagcaagaactcacttattactgcaaagacagcaccaagccattcacaggggacttgcctccaagacctgaacacctctcattaggcctcacctccaacatcgagatcaaatctcaatatgaggccaggcactgaggctcatgccagtaatcccagcactttgggaggccaaggcaggtggatcacttgaggtcaggagttcatgaccagcctggccaacatggtgaaatcctgtctctactaaaaatacaaaaattagctgggcgtggtggtgcgtgcctgtaatcccagctactcggaagtctgaggcaggagtatcgcttgaacctgggaggcaggggttgcagtgagcagagatcacaccactgcactccagtctgggtgacagaggctccgtctcaaaaaaaaagaaaaatctcgctatgagatttggaggggtcaaatatccaaaccacagcacctggtttgaggaagttttacacagagcactttttcaaatgctcctgtcagcatcacagatgctttatcagacctaggccaaattttccatcaatttctcagcttcaagtttccccataccatgtgggaagtgtaaaaccgtacttcagccatggcagagccctggcttggggcttccattgcttgtgaaggcttttctttctcctagagccttgggcagagtttccttattgcttccctgggccactgggcaaagttctccccatctcattgaggggatacatcttctggggtcctagacttaagcagggtttcagtcacagcttatctcctctcctggggccaaggtcatgcctcctgtcatcgcatgggtgtttaaccccagtccttggtttatgtcctatctaggcctgttattcctgaggactatgacaaatttagctcccaagcttccttttccttgtttgtagaaagaaaagcatagacatttgctgccaactgtgcatttttttacaagagtccatacctttcatcagattcttaaaaaggttagcaatcattgcttaagtacagagtgagaatatactaatttaaaaaacagattttgagggtaatagttcatgttacaaaagaaaattgccttacaaaatattttatcagctatttccttctgtaatggaagctcctttcatgacttaaaacaatttactttataagtttgtatttatttagcaacttctcaggaactcattaaagaaagtgaaattcaccaatacaaatargtaggtgtacccacgactsaaaaggaacttcattttcccattgtttttccctgaagagaaggtaattggcaagcaattaggtaccttccactcagcaaagggcagatgaaccaataacgtggttgaggagatcaggtggatgggagtgatgatactggatcagagggggagctggatggtggaaggtgcatcaacaggatctgaaaagatgtggaaattctgcccggggggttgggaaaaggctgaatcactcagcagtatagaaacagtgtggtttctcttctgcagatgaaaatgaatgtgagcaaaacaacggtggctgcagtgagatctgtgtgaacctcaaaaactcctaccgctgtgagtgtggggttggccgtgtgctaagaagtgatggcaagacttgtgaaggtgagaatgggcaaaaasggacccaaatcaagagcccagaggaagccactggcttattctctgatgttcaggaaactgccttagtgtccgaagagagcaaccgtttggctgtgcaaagaaatgacaaaaggcgttcatcaacattgagaatactcacgctatggacagaattcagttttgattttgtctctaagatttaacaggagggaattttgcaagaggcagaaagccacatttttatgtgagaaataaaaatagggtgttctggccaggtgcagtggttcatgcctgaaatcacagcactttgggaggctgaagtgggaggatcacttgaggccaggagtttaagaccagcctgggcaacatagtaagacactacctctacagaaaattaaaaaataaaaattagttgggtatggtagtgcatgcttgtagtcccagccactcagaaggctgaggcagtaggattacttgagcccaagagtttgaggctgcattaagctatgattgcgccactgcactccagcctgggcaacagagagaaaatatctcaaaaaaaaaaggagggtggatatttggtatttctcaaactttaatgtgcccacgaatcacttaggatcttgtcaaaatgcagattctgatttagtaggtctgagatcaggtcaagatattgcatttttaaacaagttctaggagtcagctatgctgctggtccaaggagcacacctggactggccaggtaatagaggcagtagcataaccactggccgacagctgtgtttcccaaacttccctgctgctgagaagcacctggggcttttacgcttagcccctcccagaccctctcctggagccttggcttcagaggagctaagatggggacttcgagtttgtgtttttaacaagttccacgggtgatttttatcatcttggaagtttgagaaactggtttacatgaaaccatttcctctcctccccatatgctttgtgtttatgggagaggaatacagtttggggggataaataaaataatctattttattttacttttagatctatttttaatagcagacattttataggactttatacatttatataactaataaaaaagaattcataatatatatcaaatatttgaaatggaaattgcctaccattattatatgaaacttagataatatcccttctctaaggcacatttacccttgcaaattatcacaactaaaattccatcacttcggccaggcatagtggcttacgcctgtaatcccagtactttgggagactgtggcgggtggatcacttgaggtcaggagttcgtgatcagcctggccaacatggtaaaaccccgtctctattaaaaatacaaaaattagctgggcgtggtggcgggcgcctgtaatcccaactactcaggtggctgaggcacaagaatcacttgaacctgggaggtggaggttgcagtgagccaagatagcgccactgcactccagcctggtgacaaagagagactccagctaaaaaaaaaaatcccatcacttctactttaataagtcagagttctcatgacaccctgcagattatatggagagataaatggtgtaattgttattatttacagaggacatatatttgttccttaggataattaaatttgtggaataatagagctgtggtactggttacaaaagttcactttattctagcaatattcaaaataataaaaatactaccccaaaaggaaaaattatggctactgtccatattttatttcatgcaacaaactttgcattattaactgagagaccattaaccagaatattaaattactgttccttataataagtctaaatgtattttaaactttattgaataggcgtagtatccagagtcctccttaaatcttaattattttatgtaataatctttgtatatttgaatattaataaaatgttccataaaaacatttgtaattatttatgagtactttattggaaagattgcagttaatcctcccttatataatcttaaaaactaataaccataactgaaaaaatattttagcagaagatgaaaattaagtgtgagttatactttaggattaatattcctgtttataacccttaagttttattgatagtccaaacatatatgtttctttagctaagctatttgataattatatgttctttttttttaaaaaaaaggccctttttaatttttttttttttagattcaggggctacatgcacgggtttgttacatggatatattgcttaatgctgggtttgggtttctattgagcccatcacccagatggtgaatgtagtacccaataggtagtttttcaatcctcaccctgctccctcctcctaccttttggagttcccagtgtcttttttttttttttttttttgagataaggtctcactctgtcacccaggctagagtacagtggtaccatcttggctcactgtagcttccacctgcctgggctaaggtgatcctcccacctcagcctctcaagaagctgggactacaggcgtgcaccaccacaccaagctagtttttgtatttttatagaaacagggtttcaccatgttggccaggctggtctcgaactcctgagctcaagcaacccacctgcctcggtttcccaaagtgctggggttacaggtgtgagccactgtgccaggctccctgtgtctctttttatatagtttgtatttgtcccatctttatgtctgtgtgtacccattgtttagctctcacttacaagtgagaacatgcagtatttttctgttcctgcattaattcagctcttgttagtttttaagtaatttttattgttttgttttacttattttgtatttattattattaattttttttttgagacagagtctcactttgtcacccaagctacagtgtggtggggcaatctcagctcacagcaacctctgcctcccaggtcaagcgattctcctgcctcaacctccccagtagctgggattataggcaactgccaccatgccctgctaattttttttgtatttttagtagagatggggtttcaccatgttagccaggatggtctcgatctcctgacctcgtgttctttcaccatgttggccaggctgttttgaactcctgacctcacacgatccacctgccttggcctcccaaagggctgggattataggtgtgagctaccgcgcctgacctgttttgttttatcataaaagtgtagaagaaaatatagaggagcaagagaaaataatttaaatgacccacaatccatttgccagatatatccattctaaacattttggtatatcttcctgagagacttaaatattttaagctaatttaaattttcagtttattttgtattttgtatttttagacctggaaatatcctgaatgaacatttagtgcaacctcttcattttacagatattgaaattgtgactcagagaaataaaatgacttaaggaaggtaacttttaaggaaaaaaagtgctattaatgttcattttaacatcttatagcatatttttgtgctttcttctatagtattatatataatcttcagccatttcaaaagcctctaggtgtgcttttatcctttaaaaatacacagatgtataatggccaggtgcggtggctcacgcctgtaatcccaacactttgggaggccgaggcgggtagatcacaaggtcaggagatcgagaccatcctggctaacacagtgaaatcctgtctctactaaaaatacaaaaacaaaaaacaaaaaaaaatacagatgtataaactggtattaatctcttaagtgttgcaaagagtaattcattgccatatttttctctacatacatttcacaaaaactaattcatgttccaaataactgctttttaaaaactattattgaactgagagagttatagctataactggaaatcagcttttctctttacctgagtgtctcagatgttttgaaaacatcccctttctttactttaacctagaacaggggtcagcaaacttttctccaaaggtcagatggtaaatactttaggctttgtggaccatacagaatctgtagaaactactcaactctgttcttgtagtgagaaagcagccatgaaggtaaatgaatgcacatggctatgtgccaataaaactttatttgtaataatgtgtgcagattagaatttgacaacctctgacctagaagataatgtccaagtcccacaaaggtcattttttttttctctgttaaatttaaaatcaccttgtagattcttttgttttcaatggaatatttttcctttttgtccatttggcttgagtttgctttttgaatatgtaaaacattaaaaaaggaaaattaaacaaaaccatcctgtgaaaggaccatcaccaagggtttggttgaatggactcagcatgttgtccaggcctcctttttatagtgtgctatcagcccaaagccgtttacccccagtgctcttgtcctaaatatttgaggagagggccaggtgacccagccagtccacaataagtcagatccatccagccagttcaggtgaattcatattccatcagtctcttttacatcaataatgctctataaaatgtcaaattgggtagattaaatgttacagcaaataagaaatgacttttgggtcctagtcctaaaaactcataaccccaggctaaccatgagaaaaacatcagacaaacccaacctgaaggacatgctacaaaattcctcaccagcttaattgggtagagttatggatgttggaagattgctctttgtagctatgatatttcataaacattccttgaggtcttgcccgaatgtccagtcactaggttaggcaccagggatgctgccataagttaagtataatccctgatgcaaagtgccagaattcttggggtagagggttacgagattattcccttttctgttggtttctactgcagaygttgaaggatgccacaataacaatggtggctgcagccacycttgccttggatctgagaaaggctaccagtgtgaatgtccccggggcctggtgctgtctgaggataaccacacttgccaaggtagtacatggggyagggggacttgtctctactctgattacacttcttcctctcccaaagctctttgtcttcctcccccaagtgtgtcagggttctcatcttttagaacaatggctcttcgagcagtgtgtattgctgaatcatcactctggaatcatttaacagagaagatctctaagaaaagattaccaaaaacttaactttcctttgctgtttacctttgatttttgactgctttctatggttagttgtatgactaatactcaatatggaagcataagacattgatacatctcctgtcttttctaacagggttgaaactaagtgaactcagttgaaaggcctgaggaacatattcttctccctacacttaggatatgagggttaacaatcctctgagaattattttctggaaatctaattcttttttttctttttttttttttttttggcagagtctcactctgttgctcaggtggagtgtgaagtgatgtgatctcagctcactgcaacctccacctcctgggttcaagtgattctcctgcctcagcctcctgagtagctgggattacaggcgtgtgccaccatgcctggctaatttttgcatttttagtagagacggggtttcaccatgttggccaggctggtctcgaactcctgacctcaagtgagccgccctccttggcttcccaaagtgttgggattacagacataagccatcgcacctggcctggaaatctagttcttgatgtccagaatattcattcattcatctaacaaatatgtaatgggcacctatttttgatttctttgcacaataccattgttatgatatgtcttcatgtattggactctgacagaactcaagtattcttttcaggatacttgcagagtctagagaagaacctgggaatgctaaggaaaagcaatcttttttatattaaggtaaagtggtgaaatttatagtcagagtttatggtttcctgagcaatgcaaggacaatttggaagcctttcccaagtgcactaacactgtttttattgtctctgttttacgaggcagtaattaatggtaaagtcacagcagtatcgttatgtaccttaggcctatatcaaagcagcactttttctgtgttgctaataaattgtgtttgtgctgaaagttaatatcttaggtgtttcagttcacagagttatgctgtctacacttcgaaaccaatgtttggtgaattgaaagtcgaacctggtatttcctaattcagggaaccatatatttgaggaacattatttcaccataatcttgggagttaagaatagtggttttattcaccaacttgttttcagcccctctgatttccttggggatggaacaaaaagcttgggttgtgtgagggtgaaattatttctcctaaaagccttcctcccgattcaggtttcctggctctaacagtggccctttttctctgcagtccctgtgttgtgcaaatcaaatgccattgaagtgaacatccccagggagctggttggtggcctggagctcttcctgaccaacacctcctgccgaggagtgtccaacggcacccatgtcaacatcctcttctctctcaagacatgtggtacagtggtcgatgtaggttcctcctggagggcacttggggaatgaccaaaagccggttatttgggaggcagtggacagaggtatgccatgtggcttgtgtcatcgatgagatatttacacacaaaagaactgagctcaaaacatcttacgtcattcttttaaccaacgtgttattgagcatctgctgtggtcctggcactgtgaagaattctgctattcctgttttcaaatagtcccatctctccagcatgcacagacattttcctgaatgcatcagtaccagtggtactgggaggctggctacatcctctctgaccaattattttatttgaagaaagcaactaatacagttggtggttcatttgtggtgcagtgaatgagttcaagtattgaaccaggttgagtgaaaaggtttatactttcatccaaaaatctgcacacagccctgtgctggagagttagaaatgtatgaaatcctgccttttaggaacttgcacagcagaattgagatgacgacacagaaaatgtaaggaaaggatgaacagcgagacagatgacaggtcctgtaggagtccagtcaagggacaaacacaggagcagtcaagacaagtgggacttggatccaggtggaagtgtgtgtgtggtttacacagcagagaggaaaagaaagggcctttcagataggaaacaagtgagctagtctctgagaggggatatgcaggcctgtgcagaggtgtgtggagagtttagcctactggaaaatgaaaccggaaaagtaggtggggtgggctgagcttccaaaggcctgccttgtgtgctagggtgagccatctggatttgatcccacagaaatgggtttaggtgatgtggtgatgaatgccatgatctgacagcaacttgcaagatggatagagcagagggggcctgcatctggatcagcacggaggcctttgcgatcctttggttaaatgaatatttatttatgactctaaatgaaaatcagaaagctgattcgacttgcagtgagacaagtgagggatattcaaggagcaggcggtcccacttgaggcaagttatgtcgatcgtatctgtggataatcaaatggacatgccacatggtaggttggtactattgtcccatgcatggcagagcagaggaatctggtgataaaaagctgaaaaccatccggtaaatgccacagccaaaattctgagtgtgcaagagttcacacaaggtcatgctgccgcagtatcaccaggtctaaaactcctgaaagaaacataacaggcggaagctgtccttttctaaaataccagagctttgaattcgctgattctgcatagatcaggtattatgagtaacactccaaaggaatatgtgggtctgcccaagaagtagtgtgtaaaactcttttttttttttaaattttgagatggagttttgcttttgttgcccaggctggcaatggtacaatcttgactcactgcaacctctgcctcccaggttcaagcgattctcctgcctcagcctcccaagtagctgggattacaggcatctgccaccatgcctggctaatttttgtatctttagtagagacggggtttcaccatgttggtcaggctggtcttgaactcctgacctcaggtgatccaccggcctcagacccccaaagtgctgggattataggtgtaagccactgtgcccagccctttttttttggtattattttcttatttattaaaaagtacacaacaaagagctaggcggtataataccaatagttagaatataaagccatgtataataatgggctaattaggaggtagaaagaagttctaaatgagagccatctgagtttaagctacagttgattcttgttattcacagtagttatgttctacaaagctgccacaagcaataaattagggaatactgaagctaatttctttagcaattaagtattgctcctaggggaaacactgggttaggttcctgtaatcctctggttgcaacatttttgttaactgatcagttaacagtcttgttctgtgtgtgtttctgtttaaagataccttatttaacatacattatagattcattaacattgcactcatggccagcagcaccgcaactcatgtctggagtttatcaaacacatattttcccattttccctgtaaggatctcatagcctccttgtgcttaggatcactagatagcccatctgcactgcatttgggggtccctttaaacagcaaaatctcccacgaaagcacaaacatgcaaaaaacatgccattctgtagatcacaaaaaggatcctggtttacaatgagagctaaaacaagaaggcagtggtgccttgttggacctcagctgggaatgtgccactgtgcacattctgtgaataacctcagaagcatagtgagtactgattttggggttatacataaatattagctgctaggtgaattcacacataccaaatccatgaataatgggcatcaactgtacatggtaaacctgaggggcttcatagaagagatgagtttgagtgaggcattgaagggcgggtaaatgaagatgggaatgatgggtgaggaaagatgtcagcccctaatgagttctactctcatcgcactcatcccttcctgaccatagatcatttcttactctcgtataccatactgtctttgaagcttakttttatttttatttttattttaagttcaggggtacatgtgcagcatgtgcaggtttgttacatatgtaaatgtgtgtcatgggggttggttatacagattatttcatcacccaggtattaagcctactacccgttagctatatttcctgcttctctcccccctcctaccttccactctctgataggccccagtgtgtgctgttccacactatgtgtcagtgtgttctcatcatttagctcccacttataagtgagaacatgtggtatttggttttctgttcctgtgttagttggctaaggataatggcctccagctccatccactccctgcaaaggacatgatctcattctttttttgtggctgcaagtattccatggtgtatatgtaccacattttctttacccagcctatcattgatggcatttaggttgattccatgtctttgctcttgtgaatagtgctgcagtaaacatacacgtgcattacatgtgtctttataataggatgatttataatcctttgggtatatacccagtaatggcattgctaggtcaaagggtagttctgtcttcaggtctttgaggaagcaccacacggtgttccacaatggttgaactaatttacactcccaccaacagtgtaaaaacattcctttttctccacaacctcaccagcatgttattttctgactttttaatagtagccattctgactggtgtgagatgatatctcattgtggttttgatttgcatttctgtaataatcagtgatgttgagcttttttttcatatgcttgttggccacatgtatgtcttcttttgagacgtgtctgctcatgtccttttcccacgttttaatgtttttttcttataaatttctttaagtttcttgtagatgctggatattagaccttcatcagagaaaaaaatttttctcccattctgtaggttgtctgttcactctgatgatagcttcttttgctgtgtagaagctctttagtttaattagatcccatttgccaatgtttgcttttattgcaattgcttttggcatcttcatcatgaaatctttgcttgtgcctctgtctccaatggtactgcctaggttgtcttccaggatttttatagttttgggttttacatttaaggttttttttttactttattaaaatactgagttttatttcatgtgtatatttttgtctccccatcgtttccatgcccaaccaccgctactacgatgtcctatcataacattccatacatacttaaaccaaagcaaagggtggagttccatctttaaaaactaaacaggcattttggacaacacattcttggcaatggaacctggacaacatttatcaaacatggtagggaaagttctcactctgcattataaaagggacagccagatatcaactgttacagaaatgaaataagatggaaaatttttaacaaattgtttaaactattttcttaaagagacttcctccactgccagagatcttgaatagcctcttggtcagtcatccggaagcaattcttcacataactgatgaacttggctgccactttgggaagagaatcacctttttctgtacttgcttgcatttttgctttaatgtcttctacagaactaggtccttttggtgttttaggagttttttcctgttttttgaaggattcttgtccttttgatcttggtgttgatgatggttttgagtcttttccattctgatttgacttctgtacatttttggctggagtatcttgtatagatttcttcactggtgctttttcttcagcttcctcattatcttcatcattatcatcattatcttcatcatcatcttcatcttcttcatcgtcatcatcatcatcatcatcatcttcctcagcagcaagttttacttttttctgtggaaccttgctaccacctccaggggcagactgctttccagttatacttaagagtttcacatcctcctcctcttcaccttctgactctgcatcttcctccacagctactaagtgctgtccactaatatgcactgtccctaaaccacacttcaactgtaagatcactgggggtgttatttcaaagcccccaagagaaaccgttggctatacagacattttcaaagttgccagtgtgactttaattggactgccttcgtaattcattgcctctgcttcaacaatgtgcaattcgtcctttgcaccagcccttaaactgactgtttttaaagataactggtgctcatcttcatcattatccaccttaaagtgatcatctttgtcagccttaattcacaaccaaaaagatagttctggggcctcaggaggctcatgtccatgtccatcgaatcttccatcgggtggcggcacacacttaggtgggagagaaggcggatggagataaaccaccactgctcaagagaacagccgcacaggacagaatcacaccagggtacacttaagtttttaacccatcttgagttaattttcgtatatggtgtaaggaaggggtccagtttcaattttctgcatatggttagccaggtatcccagcaccgtttcctcattgcttgtttttgtcaggtttgttgaagatcagagagttgtaggtgtgcagtcttatttctgggttctcttttctgttccattgatctgtgtctgttcttgtaccaataccatgctgttttgattactgtagccctgtagcataatttgaagttgggtagcatgattcctccagctttgttcttttgcttaggattgccttggctattcaggctcttttttgattcgatatgaattttaaaatagatttttctgcaaagaatatcagtggtagtttaatgggaaagcagtgagtctataaattgctttgggcaatatggtcattttaataatattgattcttcctatgtatttccatttgtttgtgtcatctctgatttctttaaacagtggtttatagttctccttttagagatctttcacttctcttgttagctgttttcctagttattttattcttttcgtggcaattgtgaatgggagttcatttgtgatttggctctcggcttgactgttgtttgtatataagaatgccggcatttttgcaccattgattttgtattctgagactgctgaagttgtttatcagcttaagaagcttttgggctgagatgatagggttttctagatatggaatcttgtcatctgcagacagggatagtttgactcctctcttcctatttgaatgccctttatttctttctcttgcctgattgctctggccagaacttccaacactatattgaataggagtggtgagagagtgcatctttgtcttgtgcttgttttgaaggggaatgcttccagcttttgcccattcagtatgatgttggctatgggtttgtcatatatggctcttattattttgaagtatattccttcaacacctagtttattgagcgtttttaacatgaaaggatgccaaaatttattgaaatccttttctgcatctgttgagataatcatatggtttttgcctttagttttatttatgtgatgaatcacatttattgatttgcatatgttgaaccaatcttgcatcctggggatgaagcctacttgatcgtggtgaataagatttttgatgtgctgctggattcagtttgccagtattttgttgaggatttttgcatcaatgttcatcaaggatattggcctgaggtttcctttttttgttgtgtctctgccagattttggttcaggatgatgctggcctcatagaatgacttaagtaagagtccctccctttcaattttttgaaatagtttcagtaggaatggtaccagctcttctttgtacagggggtagaattcagctgtgaatctgtctggtcctgggcttttttttggttgtaggctattactgcctcaatttcagagcctcattgttggtttgttcagggattcacagtcttgggagggtgtatgtgtccaggaatttatccatttcttctagattttctagcttatatgcatagaggtgtttataatattctctgatggttgtttgtatttctgtggggccaggggtattatcccccttatcatttctgattgtgtttatttgattcttctctcttttcttccttattagtttagctagtggcctatctattttattaactttttggaaaaaccagctcctagatttgttgatcttttgaatggttttttgtgtctctgtctcttccagttcacctctaattttggttatttcttgtcttctgctagctttgggatttgtttgctcttggttctctagttcttttagttgtgatgtcgggttgttaacttaaaatctttctagcttttgatgtgggcatttagtgctataaatttctctcttaacactgcctaacctgtgcccctgagattctggtatgttgtatctttgttttcattagtttcaaagaacttcttgttttctgcttaatttcattatttacccaaaagtcattcagaagcaggttattacatttccatgtaattgtatggttttgagtgaatttcttagtcttgagttctaattcgattgtgctgtcatctgagagcctgttatgatttcagttcttttgcatttgctgaggagtgttttacttccaattatggatcaattttagagtaagtatcatatggtgatgagaagaatgtatattctgttgttttggggtggagacttctgtagataattatcaagtccagttgatccagagctgagttcaggtcctaaatatctttgttaatttctgtcttgatgatctaatattgtcagtggggtgttaaagtctcccactattattgtgtgggaatctaagtctctttgaaggcctctaaaaacttgctttatgaatctgggtgcccctgtgttgggtgcatatatatttacgatagttagctcttcttgttgaattgaaccctttatcattatgtgacattcttctttgtcttctttgatctttgctagtttaaagtctgttttgttggaagctaggattgcaactcttgctttttcctgttttccatgtgcttgataagttgtcctcaatccctttactttgagcctatgtgtatttttgcatgtgagatggatctcttgaagacagcataccaatgggtctggactctttatccagtttgccactctgtgtcttttaattggggcatttagcccatttacatttaaggttagtattgttacgtgtggatttgatcctgtcattgtgtatttcagtatgtttttgtagtggctggtagtggttttacctttgcatatttagtgtttccttcaggagctccagtaaggcaggtgtggtggtaacaaatttcctcagcatttgcttgtctgaaaaggatcttatttcttcttcacttatgaagcttagtttggctggatatgaaattctgggttgaaaattcttttcttttctttctttctttttttttttttttttaagacagtcttgctctgtctcccaggctggaatgcagtggcatgatctcagcacatgcaacctctgcctcccaggttcaagcgattctcttgcctcagcctcccgagtagttgggactacaggtgtgtgccaccatccctggctaatttttatatttttagtagagacggggtttcatcatgttggccaggctggtctcgaactcctgacctcaagtgatccgcctgcctcagcctcccaaagtgctgggactacaggtgtgagccactgcacccagccagttaaaattcttttctttaggaatgttgaatattggcccccagtctctcctggcctgtagggtttctgctgaagggtccactgttagtctgatgggcttcccttgtaggtgacttagcctttctctctggctgcccttaacatgttttctttcatttcaactttggagaatctgaagattttgtgtctcagggatgattttcttgtggagtatcttactggggttctctgcatttcctgaatttgaatgttggcctgtctagcagggttggggaagtgctcatggatatcttgaaatatgttttccaaattggttttattctcccagctctttcaggtaccccaatcagtcatatattcagtctctttacataatcccatatttctcggaggttttgttcattcctttttattcctttttctctattcttgtctgcctgtcttatttcagaaagacagtcttcaagctctgagattctttcctctgcttgatcaattctgcttttaatacttgcaattgcattatgaaattcttgtattgtgtttttttagctctgtcaggttggttatgttcttctctatcttggctattttctttgtcagctcctacaatatttcatcatgatttttagcttccttgcattgagttagaacatgctcctttagctcagcgaagttcgtttttatccacattctgagatctacttctgttatttcagccatgtcagctgcagccccattccaaacccttgctggagtggtgatgcggtcatttggaggagagagggcactctagctttttgagttctctgtgttcttgcactgattctttctcatctttgagggcttatctaccttcaaactttgatgttgctgacctttggatggggttttgggggtttttttctcccacttttttttgagatggagtctcgctcttgtcacccaggctggagtgcagtggtgcaatctcagctcactgcaacctttgtctcctgcattcaagtgattctcctgcctcagcctcttgagtagctggaattacaggcccctgccatgacacttggctaatttttgtgtattttttagtagagatggggtttcaccatgttggccactggtctctaacccctgacttcaggtgatccatgtgacttggacccccaaagtgctgggattacaggtgtgagccaccgtgcctggcctttccccccggcattttaacagtctggccacttttctgtagggctgctgtggtttgctgggcatctgctccagtccctagtcacctcagattttccagtatctggtatcaccagtgaaggctgtgaaacagcaaagatagcagcctggcccttcctctgagagctccatccctgcagggtacagatctgttgctagccttaacatacctgtagatggtggttggagaccccagttgggaggtctcacccagccaggaagaaaaggatcagggaactgcttaaagaagcagtctagccctgctttcatagagcaactgaactgtgctgtggtaccgtttccttcacctccccctcctcaggttgagctctccaaagtctggaggctaaaacagctaagttgctgaaacagcaaagatggtggcctgccccttcctctgggagctccatcccagtggggtacagacctgttgctgacctgaacacacctataggaggtggctggataccccatttgggagatctcactcatccaggagaaacaggatcgaggacctgcttaaagaagcagtgtggccatgctttcctagagtaggtatgccatgctggggtactgcttccactttcagacagtttggacaccccacaggctggaatggctgagttgtccaaacaactgtccaaacagcctccccctcccgcttggcactccatcccaggtagaaatcaaaactctgtctgccagagaatatgggcagagccggttggaggccccagttgggaggtccccctcagagataaggagcagatcagggtcccacttaaagaagcagtctggctgtgttttggtagagctaagactcttaacagtcaggatggcttgataacaagaggagggcagtgggaaaaaaaaacaaaacaaaacttcatccttaggcaaccaaatctctaatgtgttttgaggtagatagaatgttaaggtgagaggaggggraaaaaaaactgtagaaacaaacagacaatctctttcctctcctcaccctggcctggctcaggtggtgaatgacaagattgtggccagcaacctcgtgacaggtctacccaagcagaccccggggagcagcggggacttcatcatccgaaccagcaagctgctgatcccggtgacctgcgagtttccacgcctgtacaccatttctgaaggatacgttcccaaccttcgaaactccccactggaaatcatgagccgaaatcatgggatcttcccattcactctggagatcttcaaggacaatgagtttgaagagccttaccgggaagctctgcccaccctcaagcttcgtgactccctctactttggcattgagcccgtggtgcacgtgagcggcttggaaagcttggtggagagctgctttgccacccccacctccaagatcgacgaggtcctgaaatactacctcatccgggatgggtaatgctgctgcargaatggtctcatcacccctagttcacatccggcctctaagttcacagcacacccagtcatttactaaaactgcatggtaccactgtcagcaatttattagttcaggaaccacttattgacattttggaggtaaaactagtgagggagaggagagtcaaaagtggctcctaggccaggtgcagtggttcacacctgtaatcccagcactttgggagccaaggcgggtggatcacctgaggtcaggagttcgagaccagcctggccaacatggtgaaaccctgtctctactcaaaatacaaaaattagctgggtgtggtggcaggcacctgtaatcccagctactcaagaggctgaggcaggagaatcgcttgaacccgggaggtggaggttgcagtgagccaagatcgcaccattgccctccagcctgggtgacaagaatgaaactcctaaaatctcaaaaaaaaaaaaaaaaaaaaggctccaagtggtctaacccaggtgactgactagatgccattaaccaaggtgaaaagatgtatatagaaaagcagatttgaggttaaaatactgaatttggtcattcaaaatgacatattgaataatttaattttttagatacctgcaggatgtctaggaagagaaattcagtgggcattcagtggaaatgcattatcaattagactcaggaacacagtctggactagaactgaaggacagggaatcaccagatttagagatgaaactgtaggattgagtaacctgctaggagatggcagagcatgtgtgaaggtggaggtgagatcctgttcatgtggctgagagtgcagggaacaaggagccagcaaacataaattcctcttttaagaagtttggtagtcaaggacagagaagaaatagttggtagattttagaagaaagacatagatatagcagtttggctttgtgcttagtttttttcaggggtggagggcagtgcagggtcttgctctgtcacccaggctggagtgcagtggtgcaaacacagctcactgcaaccttgatcctcaggctcaagtgatcttcctgtctcatcctcccaagtagccaggaccatatgcgcacgaccatgcccagctaattcttttttttctagagacgaggtctcactttgttgcccaggctggtcctgaactcctgggctcaagtgatcctcctgccttggcctcccaaagtgctgggattataggtgtgagacaccatgtttggcccctgcacttgttttatacaaaagagagttccatggtatttcctaaggatccttggtgggatctgtaggtgtcctgaggtactgatggagacctagtccttttcataggcattgcctacattcccaggaaaattacactcaaacccaaattcatagcagtatctcatgggcttcttccttgttctccatgtcaggtgggacacagtctcaggtaggatcaggaactgcagcttaaccaaagggagaatggtccagtacgagcagctcagcaccctcgggggcttgccctctgctgggtggcctgcaggctcttggacattactatgctgcttttactcctcttgtttttcactacagccagccttcacctgctgctatcaatctcttgcgcagtgatatttcaccccttgatatacataggatcaactgagatgctttttaacaaatagcaatgccccaaccctgtcctctctattccattcctattgtcttaattcccaccttcattatctttcacctggacagcaaagcagcctcttaacacagcctccaaaacctcacctttcacatctcagctccacagagcccctgggtgatccattcaaacaaaatatgatcttgtcacatccctgctgaaaacctcttaatggttctttattagctttgatcagtaaatctgcttctcagaaggtgtgcttccagcctcagattcttgtagcctccttaagctcattttcataatatggaaagtttgtcatcctgagctactctggacggcccgtagcaaagggcatctgcagatatgtggatttcttgccatgctaaggtgatttctaaaaaaccttaacatgaaaagaagaagcaacattttgtatttatttttttcagggactaggtttactttttttgcagtgatagatttttgttcctttttactttttttaaaaaataactttagtagagtactattcacatacaataaatagacatatttaaagcatgtagtttgacaagttctgatgtgtatacccatgaagccatcacaataatcaagataatgaacatttttctcactgtaagttttcccctgccccttatatttagtttttgaaaaaataagaatataatcataactcactgagaaaaacgtaacctacaatcttagtagagcttgtgaaacttatttatatatgcattattcagtctcttagtgaaggaccattttattttattttattttatttcctttttgagacagagtctcactctgtagctcaggctggagtgcagtggcgcaatctcagctcccctgcaacctctgcctcccaggttcaagcaagtctcgtgcctcagcctcccaagtagctgggaccacaggcatataccaccacacccaactgatttttgtacttttagtagagatggggtttcgccgtgttggccaggctgatcttgaactcctgacctcaggtgatccacctgcctcggcctcccaaagtgctgggattacaaacgtgagccaccacgcccaaccatatttacttttattttagacagttctaagaagctgcgctatttattttgccagtgcttagcacatacagaagagaaaaaatatatatgctctagaagaaaaaagcataggcaaaaatgtgaaaaccacagcagtgtggccctactttgtaagcagacaaatcatcccgtctgtggtgctgtacaagaatgatgtgtgcaagatcctccagctcttggcatggctcataggccattaccctctgacctcagccccctcgagtttctgctcctgccaaagggaattattgacaattcccaaactgtcactcctgaacacccttctgactttgcgcatgctgtttcctctgcctgatatcttcttccccgccttttcttcctgtctgatccttactggttcttcgagattcatggagggtttacttcctccatgaagcctttcctggcacctttctccatttgaactaaaaaatcctttttcctttttcttcttcctcaattcctagcatatggtaagggtcattaaatatttgccaagtaaataattgaatgagtctttataataatcataatttggggctagtccacaaacctaaaataaacatagctcattttacttatatttattaattgtttgattattcatttctttgatttttcattgtcctcggcttaaatttaaatcaagttggttctccccgatattgaacacatctgattcacttccctttaattttggttggcgtatgctctgagaatacaaaataatttaacacaagcctaagcaaaatatagctagaaagttaatcactggaaaaagaaacatactaaattccaaaatcaagcattgaacaagttttcgataagccactagttttgattccattatacccttgttactttctttcagtacatgaattcggtgctcggaactagcattgtctagtcacagcaaaccccaaatcaagagccaacatttgtcctggtttctgttctgcaatgtgttaccttgtaataaccccttctgcttcattttttcttttaaagaaaaataacagttattttgagataaagataaattgaaaatgctcaggtatttagattaaaagtactattttaatatcaagccttactattatcttaagatactggactgtaaactccttgacgtcagagaccatattattcatctttatgtcctctgcagcaaccagcagggtgtcttgcatagattaggtatgccatggatgtttattatagaatataatcagaagagggtataaatgaattttacctcaggaaaataaaaatgagtaaataaatacaagaaataacagaaaccacattatgtttagatccccttcagttcagtggaatgaggtgctggtagtaacactagtcaagatgccttattttaaaataattttttggatttttttaggtgcaccaaaacagcagttagcaaggaactagaaagcagtctggctgggcactgtcatggctcatacctgtaatctcagcactttgggaggccgaggcggaaggatcgcttgagtggtcttgagttcaagaccagcctgggcaacatagtgagatcccatctctacaaaaaatgaaaattagccgggcatggtggcacacacctataatcccactgaggggctgaggcaggagaattgcttgagtttaggaggtcgaagctgcagtgagctgtgattgtgccactgcactccagcctgggcaacagtgagaccctgtctcaaaacaaaacaaaaaaaaagaagaaaagaaaagaaaaagaagtggcctgtgcatgtggagcaagtacccagtttaatcggctttaatatctgacctccacttttttcctggcccagaagacaggaactattaggtacccactaaaaggcaactatgtccagaaaaaaaaaaaaagttcctctagaatctagaatgggaaaaataatatgagggtgattcttggcctataagaagtttcatgaatatccaaaactttggcctcagctggggcaaatatggctcactgcagcctctgcctcccaggttcaagcaattatcatcgtgcctcagcctcctgagtagctgggattacagaggcataccaccacacttgactttttttttttttttagagacaaggtcttgctatgttgcccaggctaatctcgaactctggggctcaagcaatcctgccacctcaacctgccgagtagctgggactacaggcaggcaccatgacgcctggctaactttttgtattattaatagagacgggttttcaccatgttggccaggctggtctcgaactccttagttcaagcaatcctcctgcctcagcctgccagagtgctgggattacaggcgtgagccacctcgcccagccaggagtgcttcttttcccccagctaaccctgaagtgaacctaggtgttttgctttaagcagtagacctgagattaaaaccccaaaaccctatcaaactgcaatttaacattaaatttgggaaaagagaaattaaaacaatttggaggtgcatgacttttacccaatagaaccagttattatctaagaaacttggatatttatgtcactttgatgcatgcactgcagttccctaacttttgtatccccttcagtagtcagttgctattaggtgtccaatacatagttaataaattttgttaaagaaaagccttctcaaatcaatactaaggtacatagaggcagaattcctgcaatatattgcaaatggaaagacagccttactagcaaaaggtatctgaaataaatggtgttgctgttgccaacacttaaacgcattaacttaacaggaagccctggtgcccagtttgtgggtacagcaaatgataaatgggacagatgctattagtaaataaggctaggtctgaagaggccttcacagggaaaaatttaatttttctttcattcccaaaaagcttgagtacagtccagcctcctccacccctttggctctccttgggccaaaatgttgggttagattgtttttccacctctgttgaaacaatcaagtcttatgtgctatctgccctactttcagctgtgtttcagatgactcggtaaagcagtacacatcccgggatcacctagcaaagcacttccaggtccctgtcttcaagtttgtgggcaaagaccacaaggtgagttgaacatctttaatttataacccctgaacctgagcctttttttttttttttttggtgtcccagtgtgttgacattccaagagcccactggtgggatctgcatgggctcaagagaaaaacagagaaactggccatcgagaagcttaaccctttcatgcatgtcacacccgccctgcctgccaaaataactgtgctgttcccctcataccacctgccaaaataactgtgctgttcaaagaaaatactataggatcataatttaatttaaaatctttgtgggcagttatggttgaaaagccagtgtggtgattggtcaaatggcaagggatatggacaggaaattcacagaaaagrcaaatagtgaaatgttcactgaaaatagtacttaagtgctgatgaaaacaattataagacaccattttatacatattaaatttatgaaaattataaaatacaacacttacaaggttatagggagaagtatacagtgacagtgtaaattagtacatttgctggaacattgtctgataatctgtaataataatcataaaatcgtcatattcttttatctaaaaattccaattctgacagtttcttaaaaacaaaacaaaacagaggcaggagaattgcctgargccaggagtttgagaccagcctgggcaacatagcaagacctctactctacaaaaaattttaaaattagctgggcatagtggcacacacctgtagtcctagcttacttaggcagctgaggcaggtcacttgagcccagagttcaaggttacagtgagctatgatcaggccactgcactccagcatgggtgagagagtgagaccctgtctctaaaaacaaacaaaacaaatttttaagccaaaacagacaaggtgtattggaagtgtttgtagagcattgttacaagggggtaaaagaaaaagccccaaacaagcagggctaagggccacagtatatcaatttaatgcaatattaagagttattaaaatgataaatatgggaaaagcagacataaaaactgttgtcataacaatttacaggcatattaaatatattacatttaatgtagtgagataagctggaagattttttatcattgttgttagagtgtacttgttgaaacatttaaacaaaaggaagttgaagaggccaacattcttttccacactgcttgtaagtatatgcatgtccatcccagctataccatggttacagaacaactgctaacaatgatggctgatcctgattgccctcaatcaggcaggaagctcaggcagttacctacagaaaggtgcttgcagaaaacactggttatttgacagcacaagtgcatgggagccaatgctatccccagaccttggtgtgaagaaggaagatgctcaagttagtagatgttgcttcacaaaggtctcttctgttccagctccatgcaggagttatgaatgtgggtttttttaatcactcatgtgacttaaatgcaaactttgccacattttttattaaatgtgtacatttgggcaagttccttaacctctctgtttccttatctgtaaaatggggatgataaactctacttgtggatgtccttgttaagattacatgacttaatgtttaggaacatttagtattgtgtcttgtaagtgccccacaagtggcagcagttattgtttttattaacagtcgtgatcatctcttcaggaagtgtttctgcactgccgggttcttgtctgtggagtgttggacgagcgttcccgctgtgcccagggttgccaccggcgaatgcgtcgtggggcaggaggagaggactcagccggtctacagggccagacgctaacaggcggcccgatccgcatcgactgggaggactagttcgtagccatacctcgagtccctgcattggacggctctgctctttggagcttctccccccaccgccctctaagaacatctgccaacagctgggttcagacttcacactgtgagttcagactcccagcaccaactcactctgattctggtccattcagtgggcacaggtcacagcactgctgaacaatgtggcctgggtggggtttcatctttctagggttgaaaactaaactgtccacccagaaagacactcaccccatttccctcatttctttcctacacttaaatacctcgtgtatggtgcaatcagaccacaaaatcagaagctgggtataatatttcaagttacaaaccctagaaaaattaaacagttactgaaattatgacttaaatacccaatgactccttaaatatgtaaattatagttataccttgaaatttcaattcaaatgcagactaattatagggaatttggaagtgtatcaataaaacagtatataattttaaaagtagtatttggtttttctgttgcatactattttcttttttttctttttctctttttttttttctgagatggcgtctcgctctgtcgcccaggctgaagtgcagtggcgcaatctcagctcactgtaacctctgcctcctgggttcaagcaattcttctgcctcagccttttgagtagctgggactacaggcatgcaccaccacacccagcgaatttttgtgtttttagtagagacagggtttctccatgttggccagactggctcgaactcttggtctcaggtgatccacccgcttcagcctcccaaagtgctgggattacaggcgtgagccactgcacccggccatcttttgatacttctaatatattgccttaagtgaaatattttcacctaacaaatattaataaattcatcaacatgtatttaagtgcttcaatgagctgtaacagaattaaagtttggtaccatgttccctgtgatttggtattctgtgccctcaggctgataagacaatagaaaaaagtatataattctgccatattctgttttgtaggtacttaataataagaagttttattgaaataaatataaaccacaaagataaatattatctgcagttaactccaatttctttatatgccaattaattttatggcctttacataagatcagaaaagtttttctgcttttagtttttaaaagttgctatagtctggacttggtggctcatgcccgaaatcccagcacttcagaggccaaggtgggagaatcccttgagcccaggagctcaagactagcctaggcaacatagtgagacctcatctctacaaaaaaattgttttaaattagccgggcatggtggtgtgccactgtggttccagctactcagggagctgaggtgggaggattgcttgagttcaggaggtcgaggctgcagtgagccatgatagtgctccagccagggtgacagagtgagaccttgtttcaaaaaaccccccaaatcccaaaaaattaaaaaaaattgctacaattaatagttcttagtagaatcagtaaaattaacaaaagtaagggaaaggagaaaaagatttagatagaagtcagcaactttttctgtaacaagccaactggtaaatgtattaggctttctgggccctgcagtgtttgtcgcagctactcaactttgcagctgtagtgcaaggagagccacagagaatatgtaaacaaatgtgagcatggttattccaaaaaaggattcaaaaccaggctttgagccaggtgtggtggctcacacctgtaatcccagcactttgggaggccgaggtggtcagattatttgaggccaggagtttgagaccagcctggccaacatggtgaaaccccgtctctactaaaaaaacaaaaattagccgggcgcggtggtgggcacctgtaatcccagctactcgggaggctgaggcaggagaatcgcttgaacccaggaggcagagggtacagtgagccgagatatggccactgcactccagcctgggcgacagagtgagactctgtctcaaaaaaacaaacaaacaacaacagcaacaacaacaaaacaggctttgggctaggcttggcccacgggactgggccgattcctgctctagattagtggcccccagcccttctgtgcagcagaatcacctggaaaacatttataaaataccagtgcatatttactggtttgttttaaaggatcctcaggtgattctaatccatagttaggcttgagacccgcaagttagggaatggccacttgtctctcactcccgacaggctgcagggacttttcctagctagctccatcagtaactcttagcaagtacatctcagatcttagcatgactctaacaccatttagtaactgggaataccaatggggtaggtcaccggagggaaaaatgaatcctcagagacctaattccatctgaccttcccctccgttggccttaatcaggtaagcctctgagcctgcccacctgtttttctctgtttagcatcagtgggaataactgtggtcattggtggaacttaccaggttcagttttggtctcttctaagtgaaatggaagcacattggtgataatggaattcattcatctctttccaaatgttctaaaaagtacactttattaaatgtgagaagcttactggcaactgaaacatgggccagcagaaagtcattgcctcccaaatggctggactccccacaatttcactcatgaatataactatcaggtccaggaattgcagggtttgcttgcattttagtctttaagctaagaactgaatttccaggcaaatgtgtcttggttggggagagcagtcttaaatgaagagtagctttcaaaccactccatgtcttttttcaaatttcctcaaaggataggactcactttccagctgtagaaaaatgttccctttctcctgctttgtggtgtccaaactgttggaagaaygaatgagtcacgctgactcgaagacttgacatcttgaaggctgacagctgtggtgtcactcaaaaccaggaaggaatcacttcttcctcataactcttccttctcctcctctgcacagatgcaagctgcccgctgactattcataaaggggcggcagcccaaggtccacacggtgttgaacacagtgtcaaccagggaatcacaggctgcttgaaaaagatgaagagggacagaaaggttaaccctgagtaattttgaagagtatttccaggcatgacatgatacccagaggaaagtagagacagtaatccaaatacagaattcaaaggaagagcatccatttcagagaatgttctcagaaaagctcccatccaatccagtaaagcagaagacacctggaggtgccctcgcatgtgggcccttggtcaaaacaatggtgagcaaccagaaccccccacaccaccatgctcactccatggagaatattttttgcagaagactccctcacatgaacaactatgtttcccatagctttcccatctatggccataccacccagaacacaccgaatctcgcctatagctttcactgttcaagtattggatgaacaaccattcattgatggaaaaacatttgcatggcttggatatgttggttagccactgtcttaggagccaaagatacagagacaaaaggcatcctcaacttaagtactccacagtttggataaagaggtggacaggtaaacagatagctacactacctcatgatgaaaataacctcaaggtggtatggaagcccacagaaagggtctctatccctttgcagcaagggttattaggagaggtatcttagagtaagtaagatatctaagtttaaacttcaagaatggtcaggaaaatgaagtactgatgcataccaaaacatggatgaatcttgaaaacattatgctaagcacaagaagccagacacaaaaggccacatattgtatgattccattcatatgaaatttccagaataggcaatccatacagagagtaaaatagtggttgtctagggctggggtggggtaggggaggtaatgagtagtgactgctaatggctacagggtttcttttgggactaatgaaaatgttctggaattagattgtggtgatggttgtacaactctgaatatacaaaaaccactgaagtgtatacttttaaagggtaaattttacggtatgtgaatgatatatcaatttttttaaattggttcattgaaaagataaaaaatgttaacaaacttttagctagactaaccaagaaaaaaagagaggactcaaattaccaaattaaggaatgagagagaaatgtcactaacaatcttatagaaataaaaaggattagggccgggcacggtggcttacgcctgtaatcccagcactttgggaggccgaagcaggcagatcacgaggtcaggagacctcctggctaacaagaccatcctggctaacacggtgaaaccttgtctctactaaaaatacaaaaaattagccaggcgtggtggcgggcgcctgtagtcccagctactcaggaggctgaggcaggagaatggcgtgaacccggaggcagagcttgcagtgagccgagatcacaccactgcactccagcctgggcgacagagcgagactccatctcaaaaaaataaaaataaaaaggattataagggaatactatgaatacctacatgccaaaaaatgttgataacttggatggaatggacaaattcgtagaaagacgtgaactgctgaaactgactcaagaagaatagaaaatatgaatagattactagtgtatataaatacaattactaacccaagctcgtgatttagtaattaaaaacttccccaaagaaatccaattctacttggcttcactggggaattttaccaaacatttaaagaattaatatcaatcctttctaagctttttaaaaaattaggagagaagggatcactgcccaattcattttatgaggtcaatattactctcataccaaaaccaaagacatcacaaaaataacaatctatagactagtatctcttatgaatatggatgcaaaatcctcaacaaaatagtagtaaactgaatccagtaacatataaaaaggtttacatcatgactaagtgggatttagcctaagaatgctaaatcatactaaaatcaattaatatgatacactacatcaataggatatagaacaaataccacatgatcatctcaatagatgcagaaaaagcatttgaaaacatccaacactttttcacgataaaaacacttggccaggtgtggtggctcacgcctgtaatcctagcactttgggaggctgaggcaggagttccagaccagcctgacaacatggcgaaaccccgtctctactaaaaatacaaaaattagctgggcatggtggtgggcacctgtaatcccagctactcaggaggccaaggcaggagaatcgcttgaaccyggggtgtggaggttgcagtgagccaagatcacaccacttcactccagcctgggtgtaagagtgaaactccatctcagaaaaaaaaaaaaaaagaaagaaagaaagaaagaaaaattaaaagaaaacattcaaccaactgggaaaagaggagaactcccacaacctaataaaggtcgtctaatgacagtcatagctaacaatcattctcaatggtgaaagatgaaatgcttttactctaagatcaggaacaagacaaaaatgtccactcgcaatacttctattcaatgttgtgttggaagctctagccagggcaattaggcaagagaaaaaatttaaaaaatccaaattggaaaggaagatgatatgcagatggcattatcttatatacaaaaaagcctatggaatccatgaaaaaaaatattagaactaaggagttatttcagctgggttgcaggatataagatcaatgtacaaaaatcaaatgaatttctatacattattaataaataatctgaaaataaaatttaaatacaattacatttcaataacattaaaaagaataaaatacttaggaataaatttaacagaagtccaagatttgtactgtgaaaactataaacacattgttgaaataaattaaagaagacctaaataaatggaaaggacattgatataaatataatcttgttaagatggcaatattctcaaattgatctatagattcaaccataaccctctcaaaattctagctgccattccttggagaaattgacaagcagttcctaaaattcatatggaaatgtgagggatccagaatatccaaaatagtcttgacagaaaagtacacagtttaagaacacatcttgatttcaaaatttactgcataacgacagtaacaggcagcatggtcctgacatagatcagtggaatagaattgcgcatctagaaataaatcctaacctttatggtcaattgatttttgacaatgtccagaataggcagttctagaggtagaaagtagattcatggtttcctcaagctgggcagggggagtttggggagagaccgttaatggccctggggctccttttcagggtgatgaatatgttctaaaattgactgtgggattgactgcataactctgtgaacatatttaaaagcatttaagtgggtgaattgtatcatgtgtgaattgtagcttaataaatctgtttcaacaacaacaaaaatgaatgattagggcgtttcacacaggggcagaaaggaatgggccatcaacccaaggagtttgattcaccaggttggaaacactttgtgtagaatctacgaagggacatttctgagcctactgaggcccataaggaaaaatcaaatattctgtgataaaaatgagaaataagcgatctttgaaaatgctttttgaggattcacctcacagaatggaacctgtgttttgattcaccgggttggaaacactctttttgtagaatctacaaagggacgtttctgagcccattgaggcctataagaaaaacatctaatatcccgtgataaaaactagaaacaagctatctgaaaatgctttgtgatgtgtggattcatctcacagaaaggaacctgtgttttgattcaccaggttggaaacactctttttgtagaatctacgaagggacagttctgagcccactgaagcaggagtcaagagacagaccagaaatgcccaagataatggtggagaggaaggctagggctgaatcagaaagggccatgtatggcatactgaggagtttggatttcatccgtaaggaggaggaatctattgaatgatttacacagggggttgagatgatcacattcatgtggcatatctggtcccaatggtgactatcaattagatgggacacagagactgggttaatttgcagtaaccaggcaagtgggatatgaaagagatatttgggagaatgaatcaacaggacattgcttgcaggaagtaacttgacctgaccctagattagcagcaggtactttttcagcctctgyagaaacagaatagaatgatactccctttcatagggcacactgaattattcacatttctaagccctcacaccttcacctccagactgcactctagacattgatctatgaaaagatccaaaattctctctactgcagacactctctgtggtgtggagccagctctttatcagcctacatttcaactcttaccatctaaaaatagaaaatgctaattcatacctggatacaatatcctggcttcagaaactgagacagtaaaaacttttcctaagtaaattaggaaaaagaaattatagagtcggtgctagaatctaggtagcaaagcagttgtttaaaataactatccttgctgggcgcggtggctcacacctataatcccagcactttgggaggctgaggcgggcaacatgggcaaccccatctctactaaaaatacaaaaatcagctgggcatggcggcgggtgcctgtaatcccagctacgtgggaggctgaggcacaggaatcgcttgaacccggaaagcagaggttgtagtgagctgagatcccaccactacactccagcctgggcaacagagtgagattctgtctcaaaaaaaattttttttaatttaaataaaataattatcctcaagtatatagagacctttatgcagaaaaggttttttgaactcctaccctgactgaaaacaaaattacaaaaaaaaaaaacttaagccaaaccaagtggtcctataaggaataattcctgatatggaaaattatttaacagtggaatggataatccaagccagttgggcaattccttctccagccttaaatgatagatttttatttttctgggaagactttggtgtagtcttttaccttcaggagtggtgccagcagctcgcgggcaggacagcaagaacttgagtgaaggagtgcccagaatctttccttcaccatttcttgctcagccacagtgttccataaagaatattcagtgagctctgatgatctcttcgagtcaaggggttctggctatatctcggtgtgaaaacaggaacaaacctccctgtgcactgtacgtgccattgagacacctaccttccactttggagacaaagcccagactccgcttaaggtcagagcagatcgagtggagacaccatcggaattttgcatcacagcgatatttgttggcaccgcaagtgtcataacagacatccagctggttgcagcactttgtcattgctggaatgcccaagtccatctggggaaaagtgaaggaagggaaaagaaggggaagaaatgccacgtttagactaaggaccttaggcaaccttgcccaccttgttattaactagctggttctcacatttctgttgcatatcccgatcaattcagaaacaccaatgactcagtagaataccaacagtcacaggattacaagtgttcattgttacttagttattagttcagtaagtgattctggccatttttcaccttttgttttttcagatgttagtaattttaaaattcagaggcagcttacagtaatgaaaatagagaccagaagggtagtcaagagagcagaaccatagggcttctaaatttaattaacacttaacagtcccatatgagattttgtgtgagcaaaggattctacggctaagaagtataaaaaaaaattcagcctccgttcatcaaaagatcaccagcatcccagacagcactattttaagggtgtgcgtgtgtgtgtgtgtgtgtgggtgtgtgtgttggaaagtagagtgggtatagaacacacagctcctgatcacaagaggactgtggtcaaaccacaacatctcacacacacccatcattactaagcatcctataaacaactgtaaatgtagtggcataaactgtgtcactaagttcataaaatgccacgtgtctgggtacggtggctcacgactgtaatcccagcactttgggaggccaaggtgggtggatcacttgaggtcaggagttcgagaccactctggccaacatggtgaaaccccatttctactaaaaatacaaaaattagcagggcgtcgggtgtgtgtgtgtgtgtgtgtgtgtgtgtgtgtgtgtgtgcagatttctatgatgtcagctctccaaacatagccaatttggcactactaacatgaagtcagctgcttgcaaaagtcatgacaatatgtaacaatcagctctcactggccagcaccagctggctctagcacatcactggaatggttcactaatttcaataagtcaaacctgtcagatctatctcaaattaagttatgtcatgatgccctaagcctcagctgacattttcagtggtgatttcaaagttctgatccactaccaagggcttatctgagggacagctgtccctgagaaaaggaaatcagatatcttctttaaaaattctctccctcatatccaatttaaaatacttaattgtattcttcaacttttttccagaaataatcacttccatcaaggataactctaggattgctctcagtcaaaaccaaccaaccaagaaggtaatgctggcagtacatacactttctggtaccttgagacccaggaaataggagccgcagccattgggctcttggggcttgtagccaggtctgggcattggtgcctttccttgcaggaggaagaaaggaaagaagcaagaagaaatatttagaaatcaagcatttgggaacattcatcaaatgaaaattttctaaaagcatatttcactttttctttaaaagtcactgttcctcacatccaaatcaggtgatgatgatgatgatgatgtcacagaagaataatgactttcaaaccactttgactttttcccctaatctcaaaaaatttcatgagcactttttttttttttttgagacagggtccctctctgttgcccaggctggagtgcagtggtgtgatcttggctcactgcaacctccacctcctgggttcaagcaattctcctgcctcagcctcccgagtagctgggattacaggcatgtgtcaccacgcccagctaatttttgtatttttagtagagacagggtttcaccatgttggctaggttggtctcgaactcctgacctcaagtgatccacccgccttggcctcccaaagtgctgggattacaggcgtgagccaccacacccaataagcacttatttactgacatttctaatgttttttaagtgcataacattgaagataagggccatggcaaaacccaactaaaactcaaggttcctcattccttcactgcaagaccacacaccactcaaagaacaagcagaacacaacttgatcgtacacttaaggaatccgaattgtagcagcaccacaaaagggtttaacttgcaggaaattcaagcaagattccataaacgtagacagagtattattgagtaaagagcaaagaaattaccctgatgtgatatcttaggcatttctttcatagaactaagcagaaatgatctgaacagctttgaatttctgttttttaagatctttcaaatgtgtagagagaagctttatcagttgtatcaatggcagtgctcacaggtaaagataaccttgacctgagatgacctcaggacagccatctgcagtgggtattttatcccattatccagataagaaactcgggctaagaggtcgcatgacttgcctaccatcatagagaaagtgggggaaataggatataaagtcagatttcctgtttgtctccaaagcctatgctccttcaccacatatctgcctctttttaggagatacaagaccctagtgtaagactggggaaatgtgctaagaataattaatccttagagtaaggcatatgacagtttctttctttcttttctttctttctttttctttcttcctttctttctttttctttcttccttccttcctttcttcctttcttccttccttcccaccttctttccttccttcctccttttcttcttctgcttttcttctttctttctttctccttccttccttcttctcctaccaggtatttatttttaattattttatatcatgaaatatttcaaaactgttgaaaagtcagagaaacaaacagccatgtaccaaatgcacaaacataataaatgttaacatttgccaaacttgctataaattttttttaattaaatgtgacagttcaagtacaggttcaggtgcagttgaagcctctttgcactcatcattctgttttaatttttagatactaagtttatgttttaaagccctcacttcgtatcattctgcaaaattgtcttgattattcttggacctttactctcacaaagaattttgcaatttttttgaatttgtagaatcaacttagtaaattctacaagaaaaatggccaagaatttgattgaaaaatccattgaatgtatagatttggagacaactgcctttcttaggatactcagtcttcccaaatatggacacggtatagttctctatttacttaggtctttctgtatgtcattcaacagagcactgcaattttctccatattgtatattatactttctatatacctatattattcagatccttaaacaagatagaatatctcataaaaatccagagctaagactcatgcctctggtatagtaaatctgcactttcctggaacccaggctgcttctagctttctgctctaccagccctggagtgtagccctggctctcatggtctaagatggcatttcagccaacacatccatattacctgtagcaggatggcaggagttggaagggtccagcccctctcttcagtaaacacactccagaatgttatacacgtcacttcctcatacttccctctggccagaccttaatcaaatggcaaaatctggttgccaaggtgggctaggaaatgaagtgggcagccatgagcccagctaaaacgtggaaggaggggctttatactgtagaaaaggggaagaatggatattaggggacactaagcagtttctgccacagtttgggtatttgttgctgtgatacatgtggttataagattgtggtccaagatgacttccaatgatccccacctcctggtattcacctccttgtatatagtcccaggagtggtctgtgtgacccagagaatactgcagaagtggaggtgtgttcctcctaagattaagctataaaagaccatgatttctgtcttgggctctcttactctccctctctctcaccgttcactctaggggaagttatgtcatgaacagtcccatagaaagacccatgcggcaaagaactaaaacctcctgccaatagccacatgaatttaacaagagatcctccagccccagctgaatctccagagatggcagcatcagctgggcagcatgacctcaactttatgagaaactgagccagaatcgcccagcaaagccactccaggatccctgaccctcagcaagtgtgtgatataatctttgctattgtaagctgctgagtttcgaggtacctttttgctcaataatatataactgttgcagttgccattatgatgttttttttttttcagatggaatctcgctctgttgcccaggctggagtgcagtggtgcgatcttggctcaccgcaatctctgcctcccaagttcaagtgattctcctgcatcagcctcctgagtaactggggttacaggcacgcaccaccacacccagctaatctttgtatttttagtagagatggggtttcaccatgttggccaggctggtctcgaactcctggcctcaagtgatccacccaccttggcttcccaaagtgctgggattacaggcgtgagccacctttcctggcctgccattatgattttaatctctttgttatattttttctatgacagctttattgagctataattcatatatcatatacattcactcatttaatgtgtacgattcaatggttttggcatatccacagagttgtccagtcaacaccataatctaattttggaacattataatctcaaaaagaaaccctgtacccattaaccacctctcccatctccctacccccagccctaggcaactccttcatatgaattaaatcatacaatatgtggccttttgtgtctggcttctttctcttagcaaaatgttttctggtttcatacatgttgtagtatgtatcagtacttaagttctttttattgccagaaaaaccttccattgtatagacataccacatttttttacccattcatcggttaatagacatttgggttgttttcaccttttagctatcatgaataatactgctactaatatttgtagacgggtttttgtgtgaacatgtgtttcatttctccataagaataggattgctgggtcatatggtaaccctgttgaacattttaaggaattgccacactgttttccaaagtggctgcaccacattcccagcagcaatgcgtgagggttcccatttctccacatcctcactaacacttgctattgtctgtcttttttattgtagccatcctagtgggagtgaggtggtgtttcacagtagttttgacttgcatttctataatgattatgttgagcatctttttatgtggttatttaccattcatataaattcttttggaaaatgtctacttaaatcctctacccactctataactgagttatttatctttttactgttgagttgtaagtgttctttatatattttggaagccttgtcaattctgcaaatattttgtgccattctgtgggttgtcttttcacgtttttgatggtgtaactatttatttgttttcatcttcttttttttttttaagagatggggtctcactctgtcacccaggttggagtgcagtgcagtggcacaatcatagctcactgcagcttcaaactcccaggttcaagtgatcctcctatctcagctgtccaactagctatgactgcaggtgcatgccatcatgcatggctaacttgtaaattttttgatagagatggggtcttgctatgttgcccaggctggtcttaaactcctaggctcaagcagctctccaacctcagcttaatgagctgctagaattacaggcatgagccactgtgccctgcttcttttcattttcttattttattttattttttgagacagggtctctcactctgtcacccaggcaggaatgcagtgttgtgatcttggcacactgtagcctcgatctccaggcccaagcaagcctcccacctcagcctccctagtagctgggactacaagtgctgtcactgcacctgactaatttttgtatttttttgtggagatggggtttggctatgttgcccaagctagtcttgaattcccagactgaagctatccatccatctcggcctcccaaagggctgagattataggcatgagccacagcacccagccttctttttcttattgaggtgaaattcagataacataaaattaaccaccttaaagtatgcaattaaatacattcacaatgttgtacaaccatcacttttatctagctcaaaaacattttcatcacccccaaggtagaccttgtgcccattcagcagtcattccctgtctcaggcagtttggatgctataacaaaaataacatagactggatggcttacacggcagaaatttattcctcacggtgctgaaggctgggaattccaagatcagggtgccagtgcattctgtgtctggtgagggccttcttcctggcttgcagacggccttgtcttctcttctttctctttctcttcttacgaggacactagtctcatcatggtagccccacactcaagatagcgtttcagctcactacaacctccgcctcctgtgttcaagccattctcctgcctcagcctcctgagtagctggtattacaggcgcctgccaccacgcccggctaattttttgtgtttttagtagagacggggtttcaccatgttgttcaggctggtctcaaacgcctgacctcaagtgagctgccctccttggcctcccaaagtgctggggttacaggtgtgagccaccttgcccagccagagagtgaaacatctttttaataattttgctgaaaagggcatttgccacagacttggctcggtttcttgggttaccctctgcctttttgcccttgataactcacagaagataaaactctgctattctagtttgaaagataccggaatggaattcctatccggcctgcagctgatgatggttatttttattttatttaatgttttatgttaactgcagaaattctatttagaaacgaagctgaaaatataagttctaagacaaaaggtaatggtttcagtctaggcagaaacagaaatcattcaaggataccatatcctcaaattattgtttcagtagcttatggttgatgttttaagtctaggcattaataatgtatcatatccacacatgttttattttctggctggagctgtttataggagtgagaggc

SEQ ID NO: 96878 - DNA, 16599 bp, Homo sapiens
tgaccactttctgatgccagggctctgacaccttgcccagcattacctattatgggagagactgtgggccaatggtgcttttattgtgtaattacatttcctttccagctacagagatattcaattactattttattctttgtaatttggtaagaaagagaacctcaagcagcaaatactttgttatttaatttttgttgctgcataaccttggatatcttacaagaaataatgtcataaccttggttaacttactttgctcaaaacaatgttaaaactttattaacaccttctattttgttaaaaaggaaaaattgttgtaaagcaaggccaggagattcagcgtcatgtgaagattctgccaggatctcctaaagcaacttatctttctttcttttatttcactactttttaaaaaaaacaaacaaacaggtctttataatgaattctttaccattagtgccactagttaataaataaaggtaacaactctgagtgaggagtcaatctgtcataatctttcccttatgagactgtagatgcgtttgtatgataaaagccacagcaaagtcataaattgctcccaggtttagaaagcttggaaaaagccaggagcagtggctcacacctataatctcagcactttgggaggcccaggagggtggatcacgtgaggtcaggggttcgagaccagcctagccaatatggtaaaacaccatctctactaaaaatacaaaaattagctgggcgtggtggtgcatgcctgtaattccagctactctggtgtctgaggcaggagaattgcttgaacctgaaaggtggagattgcagtgagcccagatcaggccactgcactccagcctgggtgacagagatagactctgtcaaaaaaaaaaaaaaaaaaaaaaaaaaagacagagagagagagaaaggaaaagaaagcttgtaaaaagatttgttaaatgttaaatccttagcacaacacagtctctgctttttcactttatcttctattaaattcttcaataatcagagcaaataagctactatttgaaagcaaccattcttaggtatacagccattatattctgaataatgtaaaataagtcaaaaatgtcagtatatggagttatagaacagtcgagtggcttttattcaacatggtattggaagtcctagccagggcaattagacaagagaaagaaataaagggcatccacactgcaaaggaagaagtcaaattgttattgtttgctgatgacatgatctcatatttagaaaaacctaaagactcttccaaaaaaaaaaaaaaggttagaattgataaattcagcaaagttgtaggatactaaatcaacgtacaaaaatcagtagcatttctatatgccaacaatgaacaatctaaaaaagatatcaagaaggcaatcccatctataatagctacgataaacaaatacctaggaatacacttaaccaaaaaagtgaaggatctctacaatgaaaactataaaatactaatgaaataaaatgaaaaaaaacacacaaaaaggaaagatattgcatgttcatgaattagaaaaataatattgttaaattgttcatattacccaaaatgatctacagatttaatgcactctctattaaaataccaatgacattcttcacagaaaaataaatcctaaaattcatatagaattacaaaagactccaaatagccaaagttatcctaagtaaaaagaacaaagcaaaaagaacacatggaagcatcacattacctgacttcaaaagatactaaaaagctatagtaacaaaaagtgcatagtactggcataaaaacagacacatagaccaatagaactgaatagagtacacagaaaaagtttttatatttacagacaacttattttcaacaaaggtgccaagaatatacactgtggaaaggacggtcacttcaacaaatggtgttggaaaaactggataaccacatgcagaataatgaaactagacccctatctctcactgtgtgtgaaaatccaattaaaatgaatcatagacttatatataagacctgaaactatgaaactactaccagaaaacattggtgaaatacttcaggacattggtttgatacagattttttagtaagacctcaaatgcacaggcaaccaaagcaaaaatggacaaataggactatatcaagttgaaaacctcttcacaacaacaacaacaacaaaaaaaacaaacaaaaaaatactaaacaaagcggagagaaaacctacagaatggaagaaaatatttggaagctatccatccagcaagggaagacgtaagagattcaaatgattgaatagcaaaaaacaaacaaacaaacaaacaaacaaaaaacaaattatctgattgaaaattagcaaagatctgaatagacatttctcaaagaagagataagaatggacaacaggcatatgaaaaatactcaacaccactaattattagggaaatacaaaccaaaaccacaatgagatatcacctcatcccagttaaaatggctattatcaaaaagacagtaagaatgttgataaaggggcaatgcttatacactgttgttgggaatgtagatcagccactatggaaaacagtatggagattcctcaaaaaacttaaaatagaactaccatatgatgcaataatcccattgcagtgtatatatccaaaagaaagaaaatcagtatatcaaagagttatctgtgcttccatgtttattacagcactagttacaatagacaagatttggaatcaacctgtgttcatcaatggatgaatggataaagaaaatgtggtatgtatacataatgaaatattattcagccataaaaaaggaaggaaatcttatcatttgccacaacatggatggagctggaggatattaaatgaaataagccatgcagagaaagagaaatatcactttttaactcatacgtgggagccaaaaaaaatcaatctcatgaaagtagtgaatagaatggtggttacaagaggctgggaagtgtagtcaggaacatgggatgaagagggaatggttaatgggtagaaaaacacagttaggtggaatgaataaattctagcctttgataccacaacaggtttactatagttaacaataattcatagcatttttcaaaatagctagaaaagaatatttagaatgttcccaacaaaaaggaatgaccaatgaggtgataaatatcataattacccagattcaatcattactcatgtaatgtttgcatccaaatatcgtatgtacctgataaatatgcacaactattatgtatccatacatgattaattaaaaaatagtcacttgactttttctaaaatttctggtacagatatctgtatggcaacatgtattcttttctgcctattacaagattaatatgcaaccaaaaaaacctgcctctaaattgtggggctttcatgtttttgataaggtttaaaggaatcagaattaatggaatatatgctctacgaataaatatgtcaccatctcatattctttatctagagagtggaagaaataaatgggtatgcacaaatatttcagcacttgtgatctataaagggctaagatgaagatatctaatacatggttcctgctctcaacaattttatgttcttagaatacaaaaggaaaatgatttattatattttagaaaaatacttacacatcctaccactttaaacgtgttttattagatgaaacatatagcaataatttgtaacaaaacaactgtttgagaacatttactagagaaatagtttgcctagatgaaacagtcatcggaattttagctgtaaactggaaataaaatcctaagcacccccacatactgagcagacccccttttggccaagggatgcccgcctcaaaaaaacccttaaaacctgaattcctggccataaaaggaagggaagtcggacatacttctgactttttggagtttagacacaactgacaggcattcatgttaaaatagagattataaaactgacaaaacagactctttgtgtcaataagacaccaaactataaacaagatctaaggtaatgcaaggcaagaattaggccattcatcttgccacagagcatccttttgttaatataaaacatttatgtccagcctgggcaacatggcaagaccttgactctactaaaagtacaaaaaaatagccaggcataatggtacatgtctgttgtcccaactactcagagggctgatgtgggaggatcacttgagtcgtggaggttgcagtgggctgagatcgcgccactgcactccagcctgggtgagagagcaagaccctttctccaaaaataaataaataaataaataaataaatataatttttttatgtgcactccaagttttagacagagccttattcctttaaccaagtgcaaattaaagaatctctgaattcatctataagctgtaagccctcagcttcaagatatcccagctttttgagctgaaccaatgtatgccttccatgtattgatttacgtttttgactgtacttcttggctccctaaaatgtataaaaccaaactgtaatctgaccaccttgggaccactttcccaaggcttcttgggtttgtgttttccctgggcctcagttgctcatattggttcagagtaaacttctgtaaaacattttacagagtttggtttttctgttagcaaagcaaaagagataggccttgacattaagtttgattttagtggtaaagtattagaaatgattcagaggtttctggcttgtacagttgggtgcatggtggtatcagtcacaaataaagtgaaaattggaagaaaagcagttgtgaaggaagactacagtttttgttaaacaagcgcacttgagacaccgaagaagaatcatgtagccgccacctagcgtaggaggccttctgagccttctctgttggatctggtgtggattgggtagaaatgtgctgggctgcagtttaattgggaggggagagagaagggcagggaatatcaagtcggattctcctgctctgtccccaggagaggcaggtaagctgctttcattgctggtcagcactagtaagtcaggaaggaatctctttgggtgaaggggaatttcagagacttcctttaaatactctacttagaaccctcaaggtatttgccattcttggggaaccctgagccagggcaaactgaaaccaaagcccttctgattcctaccgctcctccagttcctgcccttccccatcactaactcccaacaaatgtacacagattgtatttgtgtagatgtggcctcaggaaatcaaaaggtcctagaatgcaggtaatttaaagtcttactaaataatcttctgtccagtttttccacatgggttctataatctattcaaggaggtcggggggaaaagcattcttttatttatttttgtacctcattagtaagtcctaaccatactcttccttaggtcccttttccaactcagtctcgttctcacatttttagaaaggacaacgggatctttaaattctctcggtttgtgttgggaaaggacccaaattagtgtgcttcctcattgacagtcagagtagccttcaagcagtatatccagggaaggcatttacacctcctccccgccctctttttcagtttggcctactctagcctgcatttcgctctccctgtaactatgagagaaaataacacacactattcactctcctttgtctgcaaagtctggcatttcagtggttttctttaaggggggtcctcatttgtgaccagctttgtcattaacggaaatcaatctgaatgccccattgtgcatcttttttctttccttgcagtctgagattgcctttgccaagttttttctcaccgaacctgaaagcccttctctcattttcccgttccctgcctccagccccattgaatccctgccgagctttctcaggcataagggctgtagtgtgaggattgggaggaactcgacctactccgctaacccagtggcctgagccaatcacaaagaggattggagcctcactcgagcgctccttcccttctcctctctctgtgacagcctcttggaaagagggacactggaggggtgtgtttgcaatttaaatcactggatttttgcccaccctctttccaaataagaaggcaggagctgcttgctgaggtgtaaagggtcttctgagctgcagtggcaattagaccagaagatccccgctcctgtctctaaagaggggaaagggcaaggatggtggaggctttctgtgctacctggaagctgaccaacagtcagaactttgatgagtacatgaaggctctaggtaggtaacaataagaccggctgttctcttctcaacgtgcagctttagatatttgcagattccatttttcactcatcaggtcagcaagaggcaaagacagatcacattgccctgatcagatgctaggctatgcattttccactgaatggatttttaatgtggcacttgcttgccttcttacccagggccaataaaaacagaacatttgctattccgtggagaatatgaagcttctctgacttttttggttttcttctgcatccacttattatcacagtagtgttttacatgattaatgggctaatcatgttctaatgaaacttacactttagaacstggattccagaatcagaaagcagaktcttgctttgtgagttattttggaagtcgctgcagactgtactgttccctttgctattttaggcgtgggctttgccactaggcaggtgggaaatgtgaccaaaccaacggtaattatcagtcaagaaggagacaaagtggtcatcaggactctcagcacattcaagaacayggagattagtttccagctgggagaagagtttgatgaaaccactgcagatgatagaaactgtaaggtgagaaactgcttcttcttcagagtggggatggggagrggggaataaagataaagatttccaatgcatgttttttttaagatgttggaaagtgtagaatattttcagtatttcaatccaaggagaaatacaccaaagttagtttaatgtgcatatgttatattttgaacaatgggtacttgctatagcataaatctcagttgtatttgtctcttaccatatactgttcacattttatatcaaacttgtatttcagaaaatatttaataaggtttgtttgaaagagagattgcattttgtttaattccccaggttgcctcagattgactaaatagacagtttgcctcattctaaggctttctttagagggacgactagctgcaaagcactggtttaggatttttgtttttaatatattaaatttttgtatttagatgtatactttttaatcaaattatgaattcaaatttacataatagaaaatctagaagtaatagaaataacamtaggataattaactgatcatgatttattcaattatacaactctttcaaaaatcacatcgtcttccgtatcagaaatctgaattgtatttattgctatgttctgcattttgttgttggtctcagtctgttgttagcctggatggagacaaacttgttcacatacaraaatgggatggcaaagaaacaaattttgtaagagaaattaaggatggcaaaatggttatggtaagyaatgacaattctccattcttccttgtttttttctcctctccgcacacctctcacctccttccttcttcttccctcctccttccattcttcctccttccttccttctttaataatacatcactggcaaggttctttaactatatgtaaaacaggggaaacaaaaagatcccagttaattttcttcttcagctcaacttctttgattgtagaaaaagagaaaaattcatgtgtagttaaaaaaataaaagttgccattgatttgcctaaaactgtgtcaaaagattttttgtaggataactatggatgtctctcaaataaaatttaatataaagcccataatcactgaaatatataaagataattgctattataagagaatctcagacagatgactttatagctcctgtaataagagatctttaaacagtttatattttaatttataaagttacacaagttctgggcagataatttagaatataacagaaaagtataacaaaaaaattaaaatcccctctgatttctcatcagtgataacccttttttttttttttttttgagataaagtcttgctgtgtcacccagactggagtgcagggggtgcattcttggctcactgcaacctctgcttcatgggctcaagcgattctacaacctcagcctcctaagtagctgggaccacaggtgcaagccaccaacgccgggctaatttttttgtatttttgtagagatgggatttcgccatgttgcccaggctggcctacagctcttgagctcaaagtgatgctcccgcctgctgcctcggcctcccagagtgctgggattacaggcctgagccaaggctcccagcccccaaagagaaccattttgatgttacttctttccagtttttttctcgaatgcataatatgccttttaaacatatatattcaatactaggtagacatgaaaaatatttttttcaatcagcctcttcttacttactaggaattatctgtaaaagaggatttattagtgtcctaaggctgccacaacaaagtaccacaaacttggtggcttaaaacaacagaaatgaattttctcagttctgaaagctggacgcctgagatcaaggcgaccctagtgttgccrtccttctgygggccccctcccttgcttcttcctacttcccggatggctcctggcaatcattgaggttgttgggcttacagttgttattactctgatccatttctgactccatctttacaagactttttcctctgtttttgtcctaaattgatcaaatataaaataattaacaaataatttatctaatgatggagtagtatcacaaactaggagaaatattatgccttcaccaagccttcctcagacactttttgtgtgacctgcaatggtatattgatgatactgacataggtgggtaggctcattcaattttggaggagggtgtgagaatgctttacrtagtccttgtacgatgacagcagagaaagttttgttgtttaagaatggggactcatgtttccttctccccttgactactgcartcagcactgttctgcattgagatattcatgtttctgtggagatggaggtggggagcagagggacagttttcctttcatgttaaaggatatttgctcacatttttttggcaacaatcaataaaagaaaggactcatttctaaaagattcgctctgaagttctcctttatgcttttacctccattttttyccagaacrcagaaaagtagatagctcaaccgtggcatgcatgactatgatcaggcaagattgagttcaaaaaggaagactaaagcaatagactacaaggatatactatactcctgaacrtcacatcaatacatgaaaaccatgagcaccaaaaccccctaagttctgtaaagtggttttataataactcttcaagttagatttgacattagagtaatagakctgatgttccgcatcctatccacctacctacctgcgttcacataggctaaaccatgacaaccaaaacaaggagaatatttgtacctttacatgttcctcttgattttggaacaagtcattccaaataccatcagctcaaatgactggattttctaatggctattcaaaatttatctaggttaagaattgaaaactgttatgtaaacctattataaaactcattcacttttaaagcagatagctgagaaaacaacgtagacactccatttctcacacctgatctgctcaattaccctgataatttaaggctaaagaaattcttttgacttgaatctaaagtgctaatcccagtgtttgcttcattctcatttcagagacataaactgtatatcaatgtagggtctcttttcaagatgtgaaatgcttatgcagcatttaatgtttgtaaatgtcattcttttgcataatacttagatcacatatatgatgatctttaaaattcggtgactgaagttcctgtataaaaagatttgattatcttttgaaccttgcagacccttacttttggtgatgtggttgctgttcgccactatgagaaggcataaaaatgttcctggtcggggcttggaagagctcttcagtttttctgtttcctcaagtctcagtgctatcctattacaacatggctgatcattaattagaaggttatccttggtgtggaggtggaaaatggtgatttaaaaacttgttactccaagcaacttgcccaattttaatctgaaaatttatcatgttttataatttgaattaaagttttgtcccccccccctttttttwwtaaacaagtgaatacattttataatttcttttggaatgtaaatcaaatttgaataaaaatcttacacgtgaaattttgttgttgtttctaatatcattaatctggctaagaattctatattagacaattttaagtaaaatagtcactcttatagcataaagtaaggctgaaaaaattagcactttgtttaaaatactaatttaaaaaataagcaaaagccttagaaaatacagaaatgccacagttttggttgagccttccatgaagaatctgtgatggtaaaattcatttggccaggacccagagaagccttgtatagtgggttgggctacggaagtggtgtcgttttttcctttttttgagacaaagtttcagtcttgttgcccaggctggagtgcagtcatgcgaactctgtctcccgggttcaagcaattctcctgcctcagcctcctgagtagctgggattacaggtgcccaccaccatgcctggctaatttttgtattttttagagatggggtttcaccgtgttgaccaggctggtcttgaacttctgacttcaggtgatccacccgcctcggcctcccaaagtgctgggattacaggcatgagccactgcgcccggtggaagtagtgtctttagaagaaacggtttgaagaaacaaaatgatgtatatcaaaatgtcttattaaaaggtaaatataatcaaaatatcatgtaatcaaaatttcttattgaaaggcaatagagaaagggagtgaattttatcctggattataaaaaatgtttctccagacaactaaactgagttggataaagtcaatgagagtgcaaatggagtgctgtgcataaagacactcaaaatttcggggtggtggagcggggcggggagaagaaagggaaggtgattgagttgaccaaaccaaattaaatacttgtttgtatctggctggggtctgaatttgtgaaatacaaacaaacaaatattttacatatttcatcatttacaaaatgctttttatacattttctcaaccatacaatgtttagcaagaaggcaggtattatttatttttactttaccaataaggaaattgaaggttagatttgcatgtccaagttctcatgtgtagtaaataatattgagagctggaaatcttgcaatatttctctttatttcctctccaaaattaatatttcagctaacttttcttctgaaacaaaaacacaagattttattctccccgatcattccttttctttgttagcctcttgggaggctagggaggtaaatatatttcagcacttatatgtaatactgtattcatttttaatcagccctgtgttttagtaagtttttataaattaattcaaagttcaattaactggccaggcacagcagctcacacctgtaatcccagcaccagcactttgggaagctgaggcaggtggatcacgtgaggccaagagttcaagaccagcctgaccaacatggcaaaaccctgtctctactaaaaatacaaaaattagccaggtgtgatggtgcatttctgtaatcccggctactcaggaggctgagttagaagaattgcttgagccgggaggtggaggttaaagtgaggcaagactgtgtcattgcactacagcctgggtgacagagagagactctgtctcaaaagaaaaaaaaatgttcaattaacttacagctataagtatgagaaaattttcttttttttttttttcctaagagatggggtcttgcttagctgcccaatctagtctcaaactcctgtgctcaagcaatcctcctacttcagcctcctgaatagctgggactactggcacataccactgcactcagtttacccgtctttaaaagcatgaaacacaacatgaacaggttgttggctccaactgttctgacagccaccatctctgcttctggtggagggctgtttaacaactggatttcagcctacactctaccagaagcccagattctggcctctctcttattaaagatacaaagccaaagatagagatttatctttagctcattaaaatgaagccaaataacactggcaccagtttccataacaactgtctcccagagtgaagaatgaaaaggtttttgggtggcctaaatgggaaacaaagatgcaatggtctgaaagatcaagggttgcagtggtagaacaaatgattttaagagggaagataattaacatgtttgcttcctaagtttttctgggtagtcgcaaatcatttttcttcaaaccaaattctatttcacactgtcaatctgtcaatgcactaacttttctggtttgccgtctttgttttgtttcttaacatagttaagaaacataattaaaggaaaggaaaaatgaccaagaccaaaggcaatttgaccaacaggccctggaagaacatttctgaaatgatacgaaggtctcaatgatacaaactaagctaaggctgttttgtgaagcttctgctcttctttcatgtgatttccctcacccagatatacacactcacgatgacatatttgtacacgtggcacatggagacctacaaatatatgcccatggttgagatatgcctgtagagatgttggggcactgtagttttttgttttttagtgagtattaagaaaaaaaaaaagaaagtggagtgagtagaaagaaggatggtgtttcctaccctactaatttataatatagtgtactttttaggatttcacacattttttgagtttcaaaatgtgtacgccttgttttatgcttagtgaaaaaatattttgcccccagttttctccagtagagtatattgaaattggaaaaaaaaaaaaaaggagtgaaaagagctatttttataatttctccttctcagagctttaaatgtgtggactaaaaactcatgagttgttgtgttactcctcacagtcgttttctctcaccagctcaccagttttttctggctccattttctcccatattatagaggttgtgaactgagaaactccagggaccatcttgtcctccactggaatgcactttggttcttgcaagcttttgaatcatccaaaagctgaagcaggacttcggctgccctggcaggacttgaaactgtaacacaaaagtacctgagacaggtctcaatcaatttaggaagtttattttgccaaggttaaggatgggccagtgacacagcctcaggaggtcttgacatgtgcccaaggtggtcaggatacagcttgcttttatacattttagggagacatgatacagcaatcaatacatgtaagatttttacattggttcgatctagacgggcaggacaacttgaagctgggcggggggtgggtgtttccagatcacaggaagatttaaacatgtcctgattggcaattggttgattgaaaaagttattatcaatagaaaggatgtctgggttatgataaggggttgttagacccagattttgtcacacagacgaagcctccacgtagcaggctttagagaaaacagatcttaaatgtttcttatcagacttaaggtctgtgttgatgttaattacgcatgtccaacccccccatcccctttttcatggcctgaaccagtctttcaggttaaattttagagtgccctgactggggaaagagtccatacagatggtcgtccattcagatggttgtggggggccttcaaattttatttttggtttacaaaacagaaaatggaagcaccttgcttcccacttcaaagcccgtttcatgacacacactcccattaaattacatgggatacaaaacaaagctttctatgctgggaaagaaatacactctacaacatcttttttgaggttagtaattatggaaagcattttcttctgcaaaggaattccacgccctataaatttaaattattagcttgtcatctccaagagatcagcatcctcataaacggtgagagaaggaacacagaatacaggatccagcacagtttcgggattctggcttctttgccagacttatctttgcttacttctttgtatagacttacttctttgccagacttatctttgcttacttctttgtatagacttacttctttgccagaagtatattcaaaaaagttccgtggaagcatcaaatcaaccacctctacttatgatttccatgcatctctggaatgcataaagcatgatttcagaacatgttctaattctaagacccttctcttcccggcagtttaaaaaaaacaaaaaacaaaacgtcgtatctttgagcattggttttcaaacatcacaatcactttaacatgacctgaaatgcttgtgaaaacacaaactgctgggctccagcaggtttctgactcaacaggtctagggtggtgcctgggaatttgcatttctaactagagttcccaggtggtgctaatgttcccagtccagagacttcaattcgagatccactgcagtatccataacttttgctgatttccttcagatcatgatacttcagggctctctgcatcacctctactgaggagccctacccattaaagctggggtaggttggcccaagaatggaaccgggatcgttgagatttcagcaccccagcattttttagtgactgaaataatgaaaattctgatcaggctcctgcttgcttgcacattttaaccactcgctttttgcccaatattctccttgtttccacaatataattataaactgctgaggtactgcttcctcgtcaagaacaaagaggttaacttcagggtcacaaaaatgtttgcagaagggatgaatacctccaagggctttgcaaccagctgcggatgcctggacgtctaattgctcaaaggtgttatctgagactgaagaaacagacttttcccctggattctttgaaaatccccctctcttattctctagcagaataaaaactccctgctttttcctttttacacacggatttgagagatcttgttctccctccttctggcttttactaaattgaatgtctttctctatccccaagcaccagtatgtcagtgtttgacatcaactgcaccactgatacacgagtcggaatttgagcttctacaagtacattccttcctaggccaaacactgacgctaagaaatacgagaacagatcatcgctaaacagcagctgaaggtcaggcgaactgactcgctgcggaatctgcctttgcacgtgatcagtcggacgtctacacccgcagccgtcttctgtctccgcctcaccctcaggcctgacggtccgagtggagctgcgggacagcccgaacctccaggtcagccccgcggccctccatggcgctggtgcgcgcactcgtctgctgcctgctgactgcctggcactgccgctccggcctcgggctgcccgtggcgcccgcaggcggcaggaatcctcctccggcgataggtgagttgtccgcgacccttctcttcccagccggcaaagagcgcggagcggcggcgcctgcgcacagcaggagaaagtgcgtgggggcagctgcccccggcagaggctcgggctagcggggcccctgacgcgtccggcgttgaccacggctggtgggcgcggggagggcgaccaagggactacagcgttagggcgtccagccgggaggccggggctgggcgggggaaatgccctcgccggtgggggcgctccaagggcgcgtcggccggatttcgccagcctggcttttgtttacatcctgcatctcagttgttttgttccttggggaaggaaggaaaagctgcgggactcaagggaagaggaagctgggagtccgatgtccagcacagcaagaggcccctaatcggtcctgaatggagggggactgcagtttccccaccagctcagggaagtaaatttcagcgtgactcacactatcttctgtcttgctcgaccgagatcagtggctttttctgccactcacccagccagagcgcgaaagcaccctcgggtagactcaccccttagtctaccgtggaactcacggggacttcatttcacctggatgtccac

SEQ ID NO: 96879 - DNA, 173437 bp, Homo sapiens
gggattctcctcgtccccctagtagtttctctacaatcaatccatttcagagatttctgatttaaaatacgcattaactcaaatgcatatatttattaaacatattcccctttatactgaaatctgtcttatttcagtatttcctagaataacactcatggtcttcctagggtctccctgtactgttgaatctctactttatttctttgtatctgtttctattattacttgtcctcatattaggaatctaactgctctagcatctttggcacattttgggaagtttattacttttatcctctttcttttgcttcttgggactatgatttagtctttagaatcctgagcccacttctaaccaacttttctacaacaaaaaggctaaatgtaatatggcatctaatggcagtttgtggttagggctgttcaatgagttgcacatcattggattttggaattggaaaccactttagaaagttatctcagtatgccagaagataaagcacaagaatatatttgcttgagtgagggccactttcttttgaatgaagaaaatgaagttcagttcatgtactttgtgttattctgattgctcaaaggtccttttgttttttttttttgagacggagttttgctcgttgcccaggctggagtgcagtggcgcaatcttggctcactgcaacctccacctcccgggttcaagtgattcccctgcctcagcctcccgaatagcagggattacaggttcttgccaccacgcccagctaattttttgaatttttagtagagatggggtttcactatgttggccaggctggtctcaaaactcctgacctcaggcgatccacccgcctcagcctcccaaagtgttggaattgcaggtgttagctactgtgcccggcctgatcctttttttctaagtctgggccagagacttagaaatcttcaatttaaatatgcatcttgtatgattctgatacagctgcttgagaatgttaggggaactggaaataggttgcttacatggtatcacaccacatcacaactaagggggtgtgggctactgttatttattgtaacagtgaggatgtgttcctttttttttttttttttttttttgagacggagtctcactctgtcgcccaggctggagtgcagtggcacgatctcggctcactgcaacctctgcctcctgggctcaagcaattctcctgactcagccttctgagtagctgggactacaggtgcccaccaccacgcccagctaatttttgtattttagtagagacggggtttcaccagtgttcctcgatttctaaatcagccctagtaacttcataatgttaagtaataaaagtcatcttctatagcccagtcacctgatactatgatctgatcattgatactctcaggggtaaggcaattctagtactgtaacttcttgctggcattaaatttaaaaatgtaaaatatacttaggagcagaatctgacttttgtggatttatattataaattaatccaccaaagacaagacttttgcacatatttcagtaaataaacacactgattcatatacatgcagccaagcaaatccaaagatcctgagtaaataccaacaacgtgccacaaaagtaaaatttccaaaatcttgcactatgtgtttattacagcactattcacaatagtaaagatatggaatcaacctaagtgtccatcagcagatgactgaataaagaaaatgtggtatatatacaacgaatgattactcagccattaaaacaaaatgaaatcatgtcatttgcagcaaaatggatggatagcccttaccttaagtgtaacaagtcagacataaaagacaaatagtacatcttctcaattataaatgggagctagataatgtgtatacatggacatggagtgtggaatgatagacaatggagattccaaagggtgagaaggtgggaaggaggtggatgatgaaagattacttaatgggtacaacgtgattacatgggtgatggacaccctaaaagtcctgacttcactacaatgcaatctatgcatgtgataaaactacacttgcaccccataaatttatacaagtaagaataaacaaataaaaaaccctccaaaccaaaatctaattattagtgctagcattccacttttccagcacaattacgagtgtagaagtgctgagactacccaatttggtgacaatcaggtatttaatgttcctgttttgtagcagtcaatgaatacaagggtaaaatggtttgaaccacattgtctctgtcatgcagttgtttttctgctgtgaaatgagacgtataatatggcaacaggagaaaagaataaaacttctacatatgtatgcactgttaggcagttggtaagcacatgataatgggtggctgaaataataacacacacatataaccatcaactgtgcaagtgctttgatgcttccccatactgtaaaccatctcatgggtcacagaaaccttttgagaatatgatgaaagctacgaatcttctaaaaaaaaaaaaaaaagcccggtgtatgtgttaataagttgcaacacaaatgtatacactgccacaaagacttacaacatacaaattctcagagatcatatagtccctgaatgtttacacgtacctcagattaagattcccagctatggaatatctttaccctttaatgccaagcagacaaatattcgtgtttgtgttataacaagctaagacataaattccactagcttaactctttattgaaggcagattacaaatgaaaattaaagcacaaaactagtgtatagttcaggttactcttcaggattgaaaggcatatttttttgtagtctgttcttatctatatgaaacaatcataaaaaagatcagcactccaccaaaagaaatcattttaacaacatgaattcaaagagaaacatcccatatggaaaatttctacatccatcttgactaacaattaataccaaagacgtcgcaaggaaaaaaaggctcataaagaatcaagtaagcgaaataatcaacatacctattaggcaaaaacctatttagttaggtaacctattatgcaaatacctatttaggtaacctattacctatactatttgatctctgacacgtgaccttattatcagggattgaagtaagaaaagaagatgcaaaacaggaagaataatggcttagctaaaagattattatcgaacatcattaaaagtagaattaaaaaagcatctcatatacttctctatttaaatgttagtatctatcttttctcaactacaagttgggagcaagaatcacgtttgtatattttctcacagcctccaaaacacatttgaccgaacttaaaaatcaatgagatgcactttcagaattcccttttgtgtcaggacctgtaacaggtgtaccctgttgcacagaaatcagagctaatctttgtttcaattcgtagagctttgtggttgatgttatttttcaacttaaaacactaattatgctttaaaaaatatttcctttcctcacttagagatgtttaagaatactcacttaagtcaatttcctgtcccagaggatatttacatacaagcattttcagtggtatgaaaacataagaacttcaatttttccaggtatcgacaaccaacttgccttgtgtcttttttctgaaacagcgtctcactctgtcgcccaggctggagtgcagtggcgtgatctcgtctcactgcaaactccgcctcccgggttcacgccattctcctgcctcagcctcccgagtagctgggactacaggcgcccgccaccttgcccggctaatttttttgtatttttagtagagacgggctttcaccgtgttagccaggatggtctcgatctcctgacctcgtgatccgcccgcctcggcctcccaaagtgctgggattacaagcgtgagccaccacgcccagccgccttgtgtcttcttaagagtctaaaggattctacacaccgtggcatatactctcaccctcacccgcctttgtttttcttttaaatcaaaggatttcccaatttatcacagctggaaatttcagctatcacatactaaagttaaatgtaaagaggcattagtgtgtgttacatgaactctactagtttccttttagagtgaaaaaactacagaatacctcagtgagagtctgaaacttctcactttcaaaactaaaaagctgccagaaatttgttcaaagagtgaatccataatcattaatacaaacgctccattcttttcaccatgtgaactactacggcaatagcctcctcgtcgggttccctgcatttgcctctttaactcttctttttttcgcttcctctactcttcagccagggatgacattccaatcggagccatctctcccttttgattgagattccttggaagatatcccattgctattaggagaaaaccaaaactcctttacaaagcctaaaaggttcgacactccccctcatcccctctctccaggctcagttcttcatattggaaaagctcccttccgccacagggctttctgacaagttagtctttttgtctggaatgtcttttccttttctctttccttagttaactcctgctagcccttcagctctcagctcgatcctcacttgctcagaaacccttcctttccctccctaaagaagccaaattccctcattctcctatcaccgtggaactctcctctggggcactgccactgcggtaatttcacatcgttttgttcagcatctgtccgtctcaccaggcgcaggtctacgaaggcagaggccaccccagtggtcggcgctcaacacccatgaagaaatgaaagcgccttctaacgcgttagacgatgaaaccagggcacacaaccttgcgtctaagaagtgaacatcccatgcaaacgacttttcaaagggaagggcctggtttgagaatggccagagacatacaaatgtgaagcgcatactgaatccttccattcatactccgggagaaagacgatggatctgaaagaagccgcctgatataaacagggaatttcaatcacttcgaggccgattttccacagcggctgggcagagaactgcaaacgtatacagtgctagcacagagtccggaggggaagaaacggtgaggtttctgcttcctcctcgctcagatgctcccttccgccccacttggccaacccttcctctccctcctcgcttaaagctaggggatggaaaattcatacacaatccggttcagcatccgggtcctcactctcctttctttctttcctctgccccgcctcccagcctcccccgcccttcttcccatccgggttccccccagccgccgccactgccgctcacagttcaacgatgatatcacgactttcacgccgccggtccgggagtaactgtaccccgcatcaacttcctattttataatgtggacttaggctcttcccgatgcctacatgaatccttcccactatttcaccacagaactctccgccctcctcagccgccagcgacaccgcattagttggtgcaagaaaatgcgccatcccggtcacactgcgcaggcgtcgttgccgcctccctactgctttgttgccccgcccctttcacctcccccccgcccccgcaccggtccacgcaggcgcagggcattgcgggccttgcagttctcgcggacgaggatttgcgcgttggccccagagtatggactttatttcccagaaagccttgaggcgtaactttctgtttccatagaactggtgggaaaatggcgtcgttgtttgtatccagggaccaataggaacagtgtataggcgggttctaaagaactttaaccaatccaaggtcgtctaagaggccatccgggaaagaggtaggggagggggggaaaaaaaatctaggggaggggagaaagggggggaacctagagtcggtgggggggaagcgatgtttgcccgtcagtcgagtccggagtgaggagctcggtcgccgaagcggagggagactcttgagcttcatcttgccgccgccacggccaccgcctggacctttgcccggagggagctgcagagggtccatcgccgccgtcctctggagggcagcgcgattgggggcccggacctccagtccgggggggatttttcgtcgtccccctccccccaaccagggagcccgagcggccgccaaacaaaggtaccagtcgccgccgcgggaggaggaggagccggagcctctgcctcagcagccgctggacccgccgcccttcttccccatctctcccccgggcctgctggttttgggggggagaaggagagaggggactctggacgtgccagggtcagatctcgcctccgaggaaggtagggatattttctggggctttcgtggtctcctaagggggttcttttgggagtcgctgggcccggccaaggagcagaggaagatcgcggtggtggtccctgcggcgcccgaattcggggcctcggcctcccgggaacccccaccccccgcagccgctgtgtccgagccgccccctggctgggcggccgcacactcagcggtttagcggccgcggtcgggggcccgggcagggtgggggccgttccgcctccggggccctcggccctcacgttgtccccgcggcggggccagatgttgatctcgctcccacttgtcgggtctgagcccggaacgggacgtgggcaggggctctgtggcgggccggtcctgcccgcggcccacaggccctcctggcccctcggtggcccccggccggcctctcgctcggacgcggcgcgtgggggcgcggattcgctcggccgggcgccgaggccctaggggagagcggccggccctgcgccggacgccgggcttgttgtgagtttcttctctgacagaaatggcgtcattgtcgtagacgggaaactccgtcgggtctcgacaatggggacgggaagctgccgagctgtgtaggtggttgggtttgcggggatggcggggccggagggagccccgagtcggcgtgtgatggttcgggggctggcgcctggtgcggctctttcttcggggttcggacgtcgctcgcttctttccctccgcctccgccagtgcagaggggctcctgtggtgktgactgggtgtcttttgtttcccctccaggtgcagctgaacctggtgttttagaggataccttggtcccagagtcatcatgaaggtaagattgcctgcggaaaacgaatctctggggttatcgaattcaggaagtaggaggtttcgacgaggtcgkcgtgtggggcttccgagttttgcagaggaaggtgtgtttggtgacttggtgaccgagcccttccccagagagaccggggtcagctggcgggctttgctgtggagttggaggcagttataggatgtctcaactgaagatgattctcccatattgaacatctctttttgtagggaatgagaggaataacggcatgaattaaagtgttttaaaaggtaaaataaaaagcaagtcaggtaatctgaccctagaaactgaactgtattgtggttctatcagttacactgatgaaagagaatcttatttattrtgtgaacagtactgtaaaattttagcagaaaactctttgactcgtcacaaaaataatttaattgaaagatttaaaaagagaatttttgtgattttttacacaattcagagataccagttgtttcttgtatttccagtgacttggggttatatggtttatttttctttattgatctggttggtctgtaaataagtcagaggctctgttgcattatgatgtgtggaaaactgatggccaggttcctcttagatgtcaatatgttaactgagtggagaatagggtcaaaaaatttgcttaattgttggaagaaatgataacgataaaaatacaggtatttttgttacttgagagaatatgtatatgaatgctgtcttttttttttttaaacacatgctagaataaaaccttagatttttgaaaagtctggattcaactggtggaacttagacactagcttgtattttttcatccattacaaattcagaagtgcttgaaaagggtagagtgttcacaagtgtagaaatgcaacagatagcatgttagaatatcaacgttgtctacttttgacagttcctttgaactatttaaaaaaatatttcacttgtcctcagaatcaagactgctttgacaattttgcatccaaattaaaatttgtaatacttgtgtttgtagaaggtaaaagctgtggctacttaaatcttggtctactatacagagtaattaagtttagtctaatttttttaaggttttctctttgagtttgggatgctgtaaactacctgaaacagtttattcctatctcatttcatgaagcatagacatgtttcaggaatgaatcccttttgttagtcacaaatcctagctataactctcatcacctgtgtaaaacagtggtgaaagtgcatttattaggtaactcgtatatgtaccttgatgttgggtgagaatttcttaagaaaagttttggtttgagtaagaaataataagttcagaagccgaataaataaaaggtttagtttggagtaaatgtaatgtgtcacatttcccagtgttgtagtgcttgtcacttcttaggtgctctataaatgtttggttaaaagaaatgtagttaagttgaaagtctgagattaaaatgttttttttcttcctttcgtttcctttttttttttaagtagtctgtttaaaaaaatgaaagtatgttggaaactttagccttaaaagtttcttggtaatactagccaaatgcaaattttttggtatctttttagaaatactaattttaagtgctcagcattacattctactgcattttttaaaaaggtgcttttaacgttaaaaggaaaaagttactaaaataaatttctaacttcatacaagtacttcctgttattataagtatagcaaatctcagagaatttgctagtaattattagtactaaaaacttagcttatttcttacaactttatttcttatgtgataaaagatgagaagcttcttgtaatttgtattttgctttagcaaaaattgcaattcagaatctatttaatgttgagtgtattaggcctaaattttgtttctttttctgtgtgttcccaatttctttcgttcttttttatttttctttttgatatagagtctcactatttcaccctggctggcacgatctgtaactgctgcctcctgggctcaaataatcctcccacctcagcctcctgagtagctgggactacaggcacacctggctaatttttgtagtttttgtagagatgaggttttgccgtgttgcccaggctggtstcgaacttctgggctcaggtgactctcccgccttagcctcccaaagtgctgggattacaggcgagagtcaccgtgcctggtgtaatttctgtattacgatgatcattgagctacagaaggttttatgccatttattggatcttaccaaacatatttgtacttgggagcaagcttttaagtttgaattgtctgttgtattaacgacaacaaatctttaaattttattaagtgacagtttattgaggtgattgaaagttagattatgtagtaatactttttaggtgttgttttaaagttgaagtgttgtatgttttagcagttttcccatgtactacctttaagaatttatgtaaacaaatacattcccattactgtctaatatatgctatgttacttttttcacagtatgtttttgaggaatatgattcgtaatacataaggaatttgtgctgtaacatagatcgtgatgttggtgttatgttgaatttatttttcatgctcttgatagacttttaaaaatcagtggtgccggctgggcatggtggctcacgcctgtaatcacagcactttgggaggccgaggtaggaggatcacctgaggtcaagggagtttgagaccagcctggccagcgtagtaaaaccctgtctcttctaaaaatacaaaattagctgggcatggtggcacacacctgtaatcccagctattcggaaggctgaggcaggagaactgcttgaacccaggaggcggaggttgcagtgagctgaggttgcgccactgaactccagcctcggcgaaaaaagtgaaactctctctctcaaaaaaaaaaaaactaaataaaataaaataaaaatcagcagtaccacattataaggaggtggtagattattaaagtttgtaaataattccaagacttatttttattatgtcaggttgatttttactttttttttttaagacagacttttgctcttgttgcccaggccggagtgcagtggtgcgatctcggctcactgcaacctctgcctcccaggttcaagcagttctcctgcctcagcctcctgagtaactggaattataggcatgcaccatcatgccgggctaattttgtgcttttagtagagacaaggtttctccatattggtcaggctggtctcgaactcctgacctcaggtgatctgcccgcctcggcctcccaaagtgctgggattacaggcgtgagccactgcgcccggccgatttttactttttttaaactcaaacttttttttcctgtatctatattgtacatgttattaacgtcttttattacgtagcagtaaattttcaattaaaatgggctggttgggctggatataccagaatctttagaggaggaatgatttagatgattatactttggcgggcatggtggctcatgcttgtaatcccagtactttgggaggctgaggtgggtggattacttgaggttgggagttcaagaccagcctggccaaagtgatgaaaaccccgtctctactaaaagtataaaaaaattagctgggcatggtggcgcatgcctgtattcccagctactcaggagactgaggtaggatcgcttgaacctaggaggtggaggttgcagtgagtcgagatggcaccactgcactccagcttgggtgacagggagaccccatttcaggaaaaaaaaaaaaaaaaaggtggttatatttagaatccacgtagattgaattttccagatgtacttttctttcttcaacaatgattggcttaggccacatgaaaaaataatggattgattacaaattcccttttttaatgccctgtgtgtgtgtacatgttctctctctctctccccctacctctacctttgtttgtctccctatccactctgtcagttcgttcccccctctctgttcttttccttccccctcttccttctgtctcacccctttcataagtcattcatttaacaacaacccgtttcatatatcaggtaatatagaatgaaggtgggtgaggcatctgacctgctttcagggagcccacagtgtagcagaagatgcagataaataaagcaaaactcctagcatatctatttatgagtattccaacataaaataattgtaggaaatgctatgagaggacagaagaggacagctaaatcagagagctatggaaagttttctggtggagttgacrtctaagctgagtgcgaaggcttttgctaggcaaagaagggaagaaaagtttttcagatagaggataacgtactggaaaatgaacaaaacaaggtgaagtatctggaaactgtaagtaatttggtgtgactgaattaacttaaagcatgatatgtttgggtaggaataraagggcagtggtggragatgaagctgagtgagggagtcgaaaattttcttggccaggcatggtggctcacacctgtaatcccagcactttgggaggttgaggcaggtggatcacctgagttctataccagcctggccaacatggtgaaaccctgtttctactaaaaatacaaaattagcagggcatggtggtgtgagcctgtaatgccagctattagggaggctgaggcagaagaatagcttgaacacgggaggtggaggttacagtgagccgagatcatgccattgcactccagcctgggtgacaagagcaatactctgtctcaaaaaaaaaaaawwtttttcttgaaaactacatggaaccattgaaagttgttgagaattgcttgaacccaggagctggaggttgcggtgagctgagatcaggccactgcaaaaacaaggggagagctgaatgtaaggatggaaattccaggtaagaagtccaagtggaaaatgaataagggcctgaactaatgcattggaagtggagcagagaggatagatctgagcctttttgaagtagaattcagggccgggcacagtggctcacacctgtaatcccagcactttgggaggctgaggtgggtggatcatgaggtcaggagattgagaccatcctggctaacacagtgaaaccccgtctctactaaaaaaatacaaaaaatagaaattagccaggcttggtagcgggcgcctgtaggacgctgaggcaggagaatggtgygaacctgggaggcggagcttgcagtgagcygagatcacgccactgcactccagcctgggcgacagagcaagagtctgtcttaaaagaagtagaattcaggacctagtaactcatcctggggtaggaagaagatggaggtttttttcttaggaaattagatagatgttactgtcatttgaagcatgctgtcattggacctgctagttaagatgtaagagtaagtaggtaggatgaagtcagaggcttggttaatctggtgtgaatgttaacctcatatctatgatatttgaagggatttaagatccataacwtggcaaattttgtgctataaatttgtggtcctttagatgaataggtaatcttgtaaaatactaacatgttttctgtccaaattgctaaatctttgtttattgtaattaaaaaaaatactaggtgagtacctatgtcactgaagaatgtttttgccaagtcagccagtgaattcagtcattgaacacattgtgtactttccttgtaccggacattgttctgggttttgaggatgcagcagtgaatagaacaagagttcttaccctcgtggagtttactttctactatggtggacacacgttaagaaaaaaaataatgctaagtgctttgaagagaaatgatacggaatcagaataagaggttagagtgacagagggtgggttactttagattaggtgataatggagggccttttcgagatgacatttaagtgtgctgtgaaacaagtgatagagtgagccattcaggtttctgggggaggagcattccctgcagaaaacaagtgcaaataccctgagatggagtgtgcttggcatgtttgagtgtgatacatttaaggaacattaaggccatcagggctggagtggtaggagaggaggtcagagagggtcacaaagggccagtacaattgtagggccttatmggacatggtaaggacttgagtaaaatctgaatgtgttaggaaccctttgaagggtgttgagtgaagtgatgtgataaacattttcaaaaatgtttgactgctgggtagtgaacacatcatgggttcgaacagatcatgggaacacaagagtggaagtagggagatcagtcagaaggctgtcaagctagtcctggggagagatggtggtgaggagaaatagtagtattgggaatatatttgaagatggggatgattggatttcaatggattgggtgtgaagggaaaattctacttactgcaacttgcacatgtatgtcctcccacaagtgccctccctccttttcttttgagacggagcctctctctgttgcctaggctggagtgcagtgatgtgatctcggctcactgcagcctctgtctcccgagtttaagtaattctcttgccccagactcccctgtagctgggattacaggcacctgccaccacgcctggctaattttttttgtattttttgtttttttttttttagacggagtttcgctcgttacccaggttggagtgcaatggcacgatctcggctcactgcaacctctgcctcccaggttcaagcgattctcctgcctcagcctcccaagtagctgggactacaggcatgtgccaccatgcctggctaatttttgtatttttagtagagacggggtttcaccatgttggccaggctggtctcaaactcctgaccttgttatccacctgcctcggcctcccagagtgctgggattacaggtgtgagtcacctcgcccggcctttttttttgtgtttttagtagcaatggggtttcaccatgttggccaggatggttctgaactcctgaccttaagtgatccgcccgccttggcctcccaaagtgtgagccactgcacctggccgtcctccctttttttaaaaaagtctttttgctgtgattagttggtagatgggattcttggaactgagtatgaccatgaaggcattgtcaaatcttagccttctcagtgagcagtgaacattgagttgagcaatcctttcacttgtttttttaattaaaaaaaatgagatataattcacataccataaaattcacccttttattttattttttttgagacatggccacagtctgttgcccaggcaggagtgtagtggcgcaatcacagctcactgcagccttgatcttcagtgggctcatgygatcctgcttcaacctcccaggtagctgggaccagaggtgcacggcaccatgcccagctaacttttaaattttctgtggaggtctcactgtgttgcccaggctggtcttgaactcctgggctcaaatgatcctcccatcttggcctaccaaagtgttgggattacaggcatgagccaccgcgcctcaccaaattcacctttttaaagtgttcataaatttctagtattttcacaagtttgtgcatccatcactactatcttttgaaaacttttttattaatttcttttgtttgtttttttagagatgaggtcttgctgtgttacctaggctggccttgaactcttgtggtcaagtgatctttccccctcaacttcctgagtagctgagacttcaggcacgttacttatccctagctatctgtcactgctatttaactccagaacatttccaaattcccaacaagaagcttcttatccattagcagtcattcactgttctccctttcttttatccctccagtaactaatctacattttttttttgagaagagttttgattctgtcacccaggctggagtgcagtggctcgaccatggctcactgcagcatcgacctcctgggttcaagcgatcttcctgcctccagctcccaagtagatgggattacaggtgtgcgccaccatgcccagcaaattttggaattttttgtagtagtgaagtctcactatgttccctagcctggtctggaactcctgagctcaagtgatcctcttgcattggcccccaaagtgctgggattacaagattcagacactgagcttagcatttactttctgtctataaggatttgcgtattctgggcattttctgttaacggaatcctgtaatacatatgtggcctttttgtgtctgatttcttttacttcccataagtgaaagaagtagcaagtgttgaccaggcgcgatggctcacgcctgtaatcccagcactttgggaagccgatgtgggtggatcacgatgtcaggagttcaagaccagcctggccaagatggtgaaaccccatctgtactaaataaaaaaattagccgggtgtggtggtgggcgcctgtaatcccagctactcaggaggctgaggcagagaattgcttgaacctgggaggcaaaggttgcagtgagctgcgatggcgccactgcactccagcctaggtgtcagatcaagactccgtctcaaaaaaaaaaaaaaaaaaaaaaaaaaggagtagcaagtgttaatactatgctcttttttattgctgaataatagtccatcttatgaagatacgacattttgtcagtctacttatttggaggacatgtgggttatttctgcttttttgcttattgtgagtaatgctgctatgagcatttgtatgtaagtttctgtgcgaacatgtatttttaattctcttgggtcctgggagtggacctttcagttcttagggtactaatattacctgtgtgataacctggggagtgctgagtatttaacttcatgtattttgtgttgtggcaagtggccaccaaggagttggacatttaaaaaattaattcaatatttattgaatacttattatgtattggtctctgttctagtcagttggaatatgtcagggaacaaaacaggtagaaattcctggctctttggatctcttaggagtacaggaaactctggtattcaaggtttccgtagaaaataatgtgcttttagaaatcataattttcgttctaaaattggagacagcattcagatttggggaagaaaaaaatgagtttatggaagtatataaacagtttactagaaaataaaaagcaggtctactaaggtcagcatagacaaactatcttcatgttcaccttaccatagtggctgttattttaagctggttaatagaagcaagggacataatgaaagagtcaaaaagggaaaagttttaaaacaatacttggcttactctgagcatagtttcccctttccttaattaacgcttgctcatatattactcagaaagtccaagtgtaggcttcagaggagaggagccatagatagctttcatcagattcttgatgaaacccacagtacaaatgttaagaaacacagctctgtggtatcatctgttgactgatctgctgctaatctatttaataggaagagttgtttctatatccttctacttttaccattaaagaaaaagtaatcaactagtcactgttcattttattttcaaatttatttttgcttaaatcattgcagaatcagaaaaaaatttttattatattgtttctgaaatgttaacatttaggtgaaatgcttaatcaggttgagtatcacttacctgaaatgcttgggaccagaaatatttgggattttttcagattttggaatatttgcatttatatgcttagtatttgaacatcccaaatctgaaaatccaaaatgttccagtgagcatttccctttggtgtaacatgaacactgaaaaagtttcagtttttgtagcatttctgattttttgtgttttacgtatgtatatgtatatctgtatcttgtttttttgtttggttgtttgagacagaatcttgctctgtcacccaggctggagtgcagtggtgcgatctcagctcactgcaacatccggctcccggattcaaacgattcttctccctcagcctcccaagtagctgggattacaggcgcctgccaccacacctggctaatttttgtatttttagtacagacgaggtttcgccatgttggccaggctggtctctcgaactccagacctcaggtgatcctcctgcctcagcctcccaaagtgctggaattataggcatcagccaccgtgcccagccttatataaatatattattatttttttgagacgaagtcttgctgtgtcrcccaggctggagtgcrgtagtgcgatcttggcttactgcagcctctggctcctgggttcaagtgattctcctgcctcagcttccagagtagttgggattacaggcgtgtgccacaacacctggctaattttttgtatttttagtggagacgaggcttcaccatgttggccaggctggtctcgaactcctgacctcaagtgatccgcccgcctcagccttccaaagtgctggaattacaggtgtgagccactgcaccccacttatttttgagttagggatactcaatgtgaattgcttgaaatgtttacctcgttgaattcctaagaagaatttgaattttttaaatttataactagcctttgatccatggaaacattttataaaataatttccaaaataatttcctggaaatctggaattgtagtctgtagcaaattgggattatttattaatttaatttaatttaatttatgagatcagagtcttggtatgttgcgttggctggtctcgaactcctaggcttgagtgatccttctgcctcagcctctctagtggctggaactgtaagtgcacaccaccatggcayattggatattatttatgaaactatttattacaaatgttagtatatgcttactcttaccttttgcatattcaattatttactctaatcgggttatctaaggcaagaatagtatctaactgtgaataaccagatatgcttagctttaggatacagttagacgtaagtatagaattcaacatccctgtaactaatgtctttccagattaatgttagtgttgatagtaaggtggtagaacgggctaattctctgggccattattactgatttataaggtagaaaatagggtgtatcactttaaagttacaaatttacatttataaggaagaaaatagggtatatcacttttaagttacaaatttacctgtcatcaattaagagaataataattaggcagtaggtttatacctttaaaatgtgtgagattacttacactatatcttggacagtgggacagataatttatttttttggagacatagccttgttctgcggcccaggttggagtgcggtggcgcaatcatagctcactgcagcctccagctcctgggctcaagtgatcttcctacctcagtcacccaagtagctgagactacaaataatgcacaccaccatgcctcgctaaatttttttgtatttttggtagagacggggtctccttatcttgcccaggctagtcttgaactcttgagctcaggtgatcctcccaccttggcctcccaaaatgttgggattacagatgtgagccaccaagcctggcctggacaatgggacagatactttatatgtagacttttctcatttaagccatttttctctagtttatagataaatttttggcaatgtgacaactagaatatctgaaatcctatataaaagttctattaatgctatctgctaattgataaccttttgatttcagggtataattgcttatgagaacatagtcattgataactttagtaagtttcattgaacatcatattttaacaatgcacttcaatagcaaatgaagattataaactaaaacctttgagcaagtggtatttaaagaaaggatttactttatattgatagccaaaataatgtatataccgaaatatatataaatacgtatttataaacatattttactgatagtaaaatgttatatatattgttatatatcatttaagataatttatatgtaaattaaatataaaccagatttctttattccaggaaccttgctgttgtttctaacctttcttttcctgctacttagtgatgcagaagcttttcttggtaaatctacttgtcccctctcttaatttactgcttgaatatgactgtgaaaactgtctttgtttaaagtgcccagtaaacattgtagcttcatgattaagagcatatggcttggaaagtcagtggtgttatttccagtcctttttatgtcctttacttggctgctgaggtttgggtaaagttactgtttttgaaatgaaagtaaacatcagtttcaatttttgtaaaatgagaataataacagctaccttgtaaagttgtgtaaatatgaaatgaaataccatatttaaaatgctttacactgtgcttggcatagttctgagcagttagtacgtggcagttgtattattagaggaagcctgtcttgtttttttttaaataagctgatagagtgaggattcttttaatcaagactgtttgggattgaattgccactcctgcttaccagagtgtaggcagtttttcttaaactttccaagaagactggtgtcctcatctaaaatacgaaatgcttacagtaattgcctcatggggttgtttggggtgactaaatgtagtaggatttactacatagtaagttctcaatacattgtagctattattattagttcggtagaaagaatgtgcagattcttatgagtttaagtaggctttcggggagatagattgactctggtcttttaaaagttaattttgaagttgcagttttgtgattaagccttaaatctgttattctttccttctgaaatccttaaaaacagaatgtttagtagaaggtgataaccagatttctttattccaagaactctttgctctcatgtctaacctttattttcctggtacttactgatgcagaagcttctcttagtaaatataatacatctcctctctcctaatttgctcccgtctttccttgtaagggaaaagtaaattttacttccaagcctagagggttatttatggattaggtgaactactgaagatacttattttctggataagcatccatctgtatagccttttatgtatggcaaaaattgttttcatttcttgatcagaatactgttctgatgtggtgtagtcagccacctgaagctgatctagcatgggcagcctaggcaggtagggcgaatgactgtaggagccctgctaaacccgagtctctactccagagaggagttaaaaaaagctgaacaagcctgaacacggaggagccactattgctgtcaaagttaagtgaagcagcttggcttatgtctatttcagaataaaaaaaaaaaattcaacttaggcatgcacggtgggtcatgcccgtaatcctagcactttgggcgtttgaggctggcagattacttgaggtcaggagtttgagaccagcctggccaacatggtgaaaccttgtctctactgaaaatataaaaattagccaggcatggtggtatgcctgtttgggaggctgatgcaggagaatctcttgaacccgggaagtggaaattgcagtaagctgagatcgcaccactgcactccagcctaggtgatagaatgagactgcatctcaaaaattcaacttttcacattttcagttttatcttgataaggatacctcatcaaagaacccttttcttttcttttcttttctttttcttgaagcagaatcttgctgtgcatcccaggctggagtgcagtggtgcaatcttggctcagtgcaacctccgcctcctaggttcaaacgattcttgtgcctcagcctcctgagtagctaggactacaggcatgcgccaccatgctcggctaattttttgtattttagtagagatggggttttgtaatgttacctagggtggtctcaaactcccgagctcaggtgatcgcctgccttggcttctcaaagtgctaggattacaggtgggagccaccacgcccagccccatttctgttttttttaatctgaatattctttgctaaagtgttgttgttttttttaaaggcaagccagagagcttttggcatttagtaagtcacctattcgtgctttgctctaacttggagaaatatttttctaaactagttcttctagcaaaattaaagaaatttttattatgaaagcaataaagattttctgtaaacattaaaaattacatagtagtattcagtggacagtagaagtcttacttcctggtaacttgattcaacagtttttgggtgtattcttccacacctttttctttgcacatatgaatcaaacatgagtatttattttgttatgtttgactgtattgaaatgggcttatgctatgcatattgttcgtaattttcttttcttttcttttctttgagacggactgtcgctctgtcaccagactagagtgtggtggcacgatcttggctaactgcaacctctgcctcccgggttcaagcagttctcctgcctcagcctcctgagtagctggaactacaggtgcgcgccaccacgcccagctwatttttgtatttttagtagacagggtttcaccatgttggccaggctggtcttgatctcttgagctcgtgatttgcctgcctcggcctcccaaagtgctgggattacagacgtgagccaccatgcctggcccataattttcttttacattcttctatatcagtacatattacacaagtctgtgtcattcttcttgatggctttagtaagattttatttgcattcaacatgttattttttctacaaccaaataatttatatagggcaccggtatgtttctttaagttttgcaggtatgtagcagtgcttagtattcagtaggtactgtttttgtttgtttgtttgtttgttttgttttttgtttttgagacagggtcttgctctgttgcccaggctggagtgcagtggcacagtcttggctcactgcaacctctgcctcccgggttcaagagattctcatgtttctgcctcccaagtagctgggactacagtcccgtgccatcacacccagctaatttttgtatttttattagagacagggttttgccacgttggccaggctggtctcaaactcctgacctcaagtgatctgcctgcctcgacctcccaaagtacaggtgtgagccactgtgcctggccttcagtaagtattgttaacttatttggatgcctagtactagtaggtggcaaatagtcccagtacctattatatatacaaagcttcttatagtcctatgaattattattattattattattattattattattattattattattgttttgagacagggtcttgctctgtcacccaggctggagtgcacagtacaatcacggctcactgtagccttgaccttctgggctcaagcgatcctcccacctcagcctctcgagtagttgggactacaggtgtgggtcaccataggttgattttttatattttctagagatggggtctcactatgttgcctaggctggtcttgaactcttgccctgtgaattattgcagccaccaactgttaaatatcattgcatgacattgttactaaaaggtaatctatgaggattagtgagggagcatccctgtgctatatggctggttctaaaaaagcttatgctgttctttgggatccctgttagcattgattagacaggttaattttgggggccgggtgcggtggcttatacctgtaatcccagcagtttggtaggctgatatgggtggattacttgaacccaggagtttgagaccagcatggacaatgtggcaaaaccctgcttctacaaaaaagttttaaaatagccaggagtggtggcctgtgactgtatttccagctactcaggaagttgaggctgggaggattgcttgaacccaggatgtcaagtctgcagtggagctgtgattgcagccactgtactccagcctaggtgacagagcaagaccccgttttaaaaacaaaatcaaaaacacgttaattttggaatggatctctataggaagtgtccccagcatatgctcaaagtcagaatatatagtttataaggaattctttaaccgtacagttatatggcacattacgtttttaaagttccataatcattagttatatctaataacatccctttgaggcaggtcagcaacatttttccctttttatggtcgaagaagcaggtgtaaagatgttgagtgatttgcccacaggcacacattaaactgatcacagagcctgttcttttgttagtaaactgaaccatgctgcctctctactagttattataaataaataataaagttgttgccatttagtgactttttgatggctttattgaatagtaagtgtagtttacaaaccttttgcctacttactttgttgaaaaagttttaaatttagaatttacttgtatcatggtatgaaacatttttatgtaaatttccctgtttctttttttttatttttttttattgatcattcttgggtgtttctcacagagggggatttggcagggtcataggacaatagtggagggaaggtcagcagataaacaagtgaacaaaggtctctggttttcctaggcagaggaccctgyggccttccgcagtgtttgtgtccctgggtacttgagattagggagtggtgatgactcttaaggagcatgctgccttcaagcatctgtttaacaaagcacatcttgcacctcccttaatccatttaaccctgagtggacacagcacatgtttcagagagcacagggttgggggtaagtaaggtcacagatcaacaggatcccaaggccgaagaatttttcttagtacagaacaaaaggaaaagtctcccatgtctacttctttctacacagacacggcaaccatctgatttctcaatcttttccccacctttcccccctttctattccacaaaaccgccattgtcatcatggcccgttctcaatgagctgttgggtacacctcccagacggggtggcggccgggcagaggggctcctcatttcccagtaggggcggccgggcagaggcgcccctcacctcccggacggggcggctggtcaggcggggggctgacccccccacctccctcccagacggggcggctggccgggcagaggggctcctcacttcccagtaggggtggccgggcagaggcgcccctcacctcccggacggggcggctgaccgggcggggggctgacccccccacctccctcccggacggggcggctggccgggcagaggggctcctcactttccagtaggggtggccgggcagaggcgccccttacctcccggacggggyggctggccgggcggggggctgacccccccacctccctcctggacgggtggctgccgggcagagacgctcctcacttcccagacggggtggttgccgggcggaggggctcctcacttctcagatggggcggctgccgggcggaggggctcctcacttctcagatggggcggttgccaggtggagggtctccccacttctcagacggggcggccgggcagagacgctcctcacctcccagacggggtcrcggccrggcagaggcgctcctcacatcccagacggggcggcggggcagaggtgctccccacatctcagacaatgggcggcygggcagagacgctcctcacttcctagatgggatggcggccgggaagaggcgctcctcacttcctagatgggatggcggccgggcagagacgctcgtcactttccagactgggcagccaggcagaggggctcctcacgtcccagacgatgggcggccaggcagagacgctcctcacttcccagatggggtggcagccgggcagaggctgcactctcggcactttgggaggccaaggcaggtggctgggaggtggaggttgtagcgagccgagatcacgccactgcactccagcctgggcaccattgagcactgagtgaaccagactccgtctgcaatcccggcacctcgggaggctgaggctggcggatcactcgcggttaggagctggagaccagcccggccaacacagcgaagccccgtctccaccaaaaaaatacaaaaaccagtcaggcgtggcagcgcgcacctgcaatcgcgggcactcggcaggctgaggcaggagaatcaggcagggaggttgcagtgagctgagatggcagcagtacagtccagcttcggctcggcatcagagggagaccgtggaaagagagggagagggagaccgtggggagagggatagggagagggagggggagggggagggggagcccctgtttcttaaaaattagaaaaaatcaggctgggagcggtggctcatgcctgtaatcccagcactttgggaggccaaggtgggcgaatcacttgaagtcaggaggagttcatgaccagcctggccaacacagcgaaaccctgtctctactaaaaatacaaaaattagctgtgcatggtagcatgtgcttctggtcccagctactcaggcgctgagacaggagaagtgcctgaacctgggaggcggaggttgcagtgagctgagatcaggtcactgcactctagcctgggcgacagagcaagactctgtccccctccaaaaaaaaaaaaaaaaaaaattagaagaaatcatatgaaaaaacataaaaatgaacgacagtggacttagttcttctgggagaactttgctagcttgaaaattagtgtcaagctggacaggtggcttgtgcctgtaattccagctacttgggaggctgagacaggaggagcttgagcccaggagctcaaggctgcagtgagccttgattgcaccactagattccagcctgggcgacagagcgagactctatctctaaaagaaaggaaaattagtattataaattagaaaattagaggctttgtacaaagctttgaagagttaatattttaaagtaggagaaaaatgaatcctctggttatattgccacaagtaattttgcgttgaaacactgtggcccatatagcctgaagagactttgaaaggtcatttgagcccttgagttcagaacctatctcttctgccaagtgatgacacagaatatgatctagctcagaaaagttttacaatctgggtggtttgtctctctttttctctctctctttttctttggctgaagaatctttagaacagtcaaccttctcttaaattgcaagtttcctttggccatttgaaacattttctttttttcttttctttttcctttttctttttttgtaaagagacagggcctagctctgtcacttagactggaatttagcggtgtgatcataattcactgtagctgtgaactcctggattcaagggatcttcccatctcagtctcttgagtagctgggaatacaggcttgcgccaccacattcagctaagttttttatttttttgtagtgctgtggcctcactgtgtttcccaggttggtcttgaactcctggcctcaagtgaccttcccttgttggcctcccaaagcactgggattacagacatcagccactgcacccagccagacattttctatttacttgtatggacttaattctgtctatcccattcccccttcccccattataattttttttctctgtaatttgtaggtacaagttctttctctcactgaaaagctttccaattgtagtttttctgcattgatggaggtagtgaaggggaggttcaggtaatttacaactattgtaaacagtttttatttggcatggtacagtgtctaatgcctgtaatcccagcactttgggaggctgaggcggggaaaattgcaagtttactttgagtttgagactagcccggccaacatcgcgaaaccctgtctctaccaaaaatacaaaaaaattagccgggtgtggtggtgcacacctgaaatcccagctgttctggaagctgaggcgtgagaatcgcttgaatccgggaggtgaaagttgtagtgagctgaggtcacaccactgcactccagcctgggcgacagagggagagactctgtcttaaaaaaagagattttatttaagggatcatacagagccctaaaattatatattcacatttggaatgttaagcagatgctttgacatgatatattataaatctgtaataataaatagtagttaatcctcatatactttagtaattagcacagtccaatttttttttttttttgagatggagtctcactctgttgcccaggctggagtgcagtggtatgatctcggctcactgcagcctctgccttccatgttcaagtgattctcctggctcagcctcccgagtaactgggactacaggtgtgtgccaccacgcctggctaattttttgtatttttagtagagacggggtttcactgtcttagccaggatggtctcgatcttctgaccttgtgatctgcctgtctcagcctcccaaagtgagccaccgtgcccagccagcacaatcttattttttagtaggcatgtaatttctaaatttgtctttattgctaaagtaacatcccatttatctcaaactaactgtcatcagtcttgtcttgttctgaaatagcattaaaatatttatcacaccagcctctttcctggtcatcatgttctttatgctgtaattattattgkttttgttattatcatatgataattttgccactgcttattcagtgcttaatatatgtcagtcttttcttacattatatgtagttttttcttatttgaagacagagtttcttgctctgttgcctgggcaggaatatagtagcgtgatcatggctgactgtaaccttgacctcttgggcccaggtgatcctcccaccttagcctcctgagtagctgggagtacaggtgtccaccaccatgcctggcgaatttttaacttttttcatagagacagggtctcactatgttgcctaggctgatcttgaactccccggttcaagtgatccccctgcctctgcctccyaaagtgctgggattataggcgtgagtccccgtgcctggcccatttaaaattttaattctcaaaataccctgagaggtacatagatatattcttattttacagatgaaaaactcaaggccgagagagattatataatttacctaactaaggtyatgccactagtaagtggcatagtgaggatttaaacctaaactacttcaaaccagagctcctactaatattaatgctgtttctgcctctttaatatatatctttacttggatatctagttttcttagtacacagaacatttagaagtgccaaatactgtgtgagttgttagttgtaagtgtatgtgtgtttttatgtgtgtatcgagagggaggagttttgaacaaatccggaagtcagaggtctgacgtgggtctcactgggcatttcttcttcaggctctaggggagaattggtttccttgcctcttttccagcttctagaggctgtatttcctcctttgcctctggtctctcctattttcaaagccagcagcctggtgtcttcaaatctgtctctgacactatctctcctgcctccctctttcacttataagtatccttgtgtttatattaaatagggctcacccagataatacaagctaatctccccctttcaaggtcaactaattagcaactctgattccatgtcagctttaaatttccccktgatagataacattttcacatgttttgsagattcggatgtggtcattttgtggggagggggagtgcattctgcctaccagagtttccttagtgtggcaaaatgatttagcttcttaggcctcgctataaaatgagattagtatttactatttaccacaaaggaattttatgaagatggaaattacgtactaatacagacaggccatkcatagaatacacttaattagcagatgctttctgcttgatcttatctgctaggtatatgcttgtggtgatgggtagtctccaaggtaaccactgggtttgataaactccaatttgagtgcctgactcttctaaaggcagatgtttgttttagaattcagcctttccagacctttgcatgatgaggatagtgatgrtttatagcacaatggtggaaaaacagatgagtgccccttaactcttaatttgttttatgatttgaatctgtcttaatctctaagatacagttcactttttaagtaggcagcttttctgtttaacatgattttctaaaggattgctatagaagataatgaaaagggaccttgagtaattgcacttttaaatcacacaagattgttttgtatgtgctcagatggtattttttgaagttaatgttgtcatttcttttctttttttttattttcgggacagggtcttcctctgttgcccaggctggagtgctgtggtgtgatcttggctcactgcagcctccacctcctgggctcaagtgatccacccacctcagcctcccaagtagctgagactacaggtgtatgccaccacgcctggcaagttttttgtagaggcagggtttcaccatgttgccacgctggtctcaaactcctggactcaagatatctgtccaccgcagccttccaaagtgctgtgataataggcgtgagccaccgtgcctggcctaggcaatttacttctttgagttttattttcagtatatgagaaatgtggctaataacatttacttcattgcttgctttgttattaaatatgatgatgcatgtaaaatactcatgtttggtttatatgtgccaaaaaaataatacctgtaatatattgtagagttagggatgaaccactttactaaatgtctccaaataaccaatttctaataatttagaatatgtagtatagctagtgtgcattgcattatgataaaagagtgcttattacctgtgcacctaatttttggaagtcagattcatatagctttggttaatctttgttctttttacattttattgtattttagacagggtctcgctgtgttctgcaggctgcagtgcaatggcatgatcatagctcactgcagccttgaacccctgggctcaagtgatcctcccactttagtgtcccaagtattaaatagctggcattacagacatgtgccaccatgcctggctgtttctcgttttttttagagatgggatctcactatgttgccaaggctggtctcgaacttctggcctcaaatgatcttcttgccttggcccctcaaagtgctggattacaggagtgagctactgtgtccagcctaatcttcgttcttggagtcaagttgtgtaggctttgttttttgctttgcttttttttttttcccccaccyctagtttttaatttaaaaaaggactggcttttagaaccactggaaaatatttgttttgggggcagtgtctttagataacataaaattcaggaatacaaattttgggtggaagatagtacagcstcattggttaagaatataaactctctggccgggtgtggtggctcaggcctgtaatcctagcactctgggaggccgaggcaggcggatcacaaggtcaggagattgagaccatcgtggctaacacggtgaaaccctgtctctactaaaaatacaaaaaattagccgggtgtggtggcgggcgcctgtagtcccagctagtcgagaggctgaggcaggagaatggcgtgaacccgggaggcggagcttgcattgagccgatcgcgccactgcactccagcctaggcgacagagtgagactccgtctcaaaaaaaaaaaaaagaaaaaaagaagaatataaactctcaaactgaattctaatcctggcactattacttactgccttgtgatgttaggcaagtaatgtaaccttctgtgatgcttaaattttaatcttgtctgaaatgaggacaatgataaaatgtacctcctactttggaaggattgaatgaggtaatccatgtaaagcatttagcatggcctctactaagtgacccacagcagttattagtaatgacaaataagagaaaggagaagcagtgggcaggtgttcaagtgctaacgtgtattgtttagagcagtgttatcaataggagtataatgcaagccatgtgtaattttaacttttataatagctgtattaagtaaataaaaagaaacaggtgttgaaattcattatgataatgtttaatttaacccagcatatccaaaacattgttatttcaacatgtaatgatatcaaaattattgagatattttacattttttaatactatatctttgaaatctggtgtatatttatacctatggcatgtctcaatttggatactaaattctttctgtctttctgtccccactcctttccctcccctcccctcccctcctttcccctccttctcttccacttccctttccctttttccttccttccttccttcctcccctccctccctttacacttccccctccccatctctttccccttcccctttcccttccccttcccttccttttccttgtttctttgtttttttttgctgttttttttttttttttttttttttttccgttttttgagacagagtcagccaggcacagtggcttatgcttgtaataccagcactttgggaagccgaggtgggtggatcacttgagcctaggagtttgaraccaggttgggcaacatggcgaaaccccgtttccactaaaaatataaaagagttagttggctgggcgcggtggcccatgcctgtaatcctagcactttgggaggccgaggtgggcggatcacctgaggtcaggagttttgaaaccccctctctactaaaaatacaaaaattagctgggtgtggtagcaggcacctgtaatcccagttacttgggaggctgaggcaggagaatcacttgaacttgggaggcagaggttgcagtgagctgagatcaggccactgcactccagcctgggtgataagagcgagactgcatctcacaaaaaaaaaagaattagttaggcaaggtggtgggcacctgtggtcccagctactccggtagctgaggtgggaggattgcttgagcctgggaggtggagggaggttgcagtgagctgagattgcaccactgcaccctagcctgggccagggcaaggccaccctgtctcaaaaggagaaaaaaaaaaaaaaaaaaaagaaatagggtctcactctcaccggctggagtacagtggtgtgatcacagctcactgcaaccttgactttctaggctctagcgatcctcccacctcagtctcccaagtaattaggactacaagtgtgtgccagcacgcttggctaattttttgtattttttgtaaagacaaggtttcaccatgttgcccaggctggtctcaaactcctgggctcaagcgattctcccgccttggcctcccaaagtgttcagataacaggcgtgagccaccacactgggcactaaattttcagcagagatgcttgttctgtatttagatttaataaaatttacagtagaaaaagtagattcgcctgggtgtggtggctcacgcctataatcccaacactttgggaggctgaggcaggaagattgtttgagcccaggaattcaaaaccagcctgggaaacatagtgagaccctgtctgtatattaaaaaaaaaaaaaaaaaaaaaaaaagaatacttaaaaaaatgtattgttggctgggcgtagtggctcacgcctataatcccagcactctgggaggmcgaggcaggcagatcatgaggtcaagagattgagaccatcctggccaatatagtgaaaccccgcctctactaaaaatatacacacacaaaattagctggacgtggtggcatgcacctgtagtcccagctactcgggaggctgaggcaggagaatcgcttgaacctgggaggtggaggttgcagtgagctgagatcgtgccactgcacttcagcctggctacagagcgagactctgtctcacaaaaaataaaaaaaaaagtattcttgtagttccttttttctccttgcaaggcatctttaatgtagaataagctaaatatagtaataataataataattaaaaatgatgaagtttattgagtactgctttgtatgtgttatgttgtcttctaagymcagatatctcatttaatcttcatgatagcactatgagaatactttaattttccctgtttacagatagggaaaatggggaccagagaaagttatagagcatagagttgaactcaattttgacctccagagtctgtttttctttttttttttttatgagacggagtctcattctgtcgcccaggctggagtgcagtggcatgatctcggctcactacaacctccacctcctgggttcaagtgattcttgtgcctcagcctcccaagtagctgggattgcaggcacccgccaccccacctggctaaattttgtattttttggtagagatggggttttgccatgttggccagggtgttctcggactcctgacctcaagcggtttgcccgcctcagcctcccaaagtgctgggattacaggtatgagccactgtgcctggcccagagcctgtttttctgacagtcacaccgcttattggttgctggatagaatgaaaaagcaaatggaagtacctctccccaccagtagtttttctgggtttcttttatgggggagcgagggtagagtaacatgtgggtagagggacagtgtttcaggaacccatttggatatttaagaacaggactaaatacttaaattacttctgtgacaataaaaagatacccaggaagctacactcttttttagttctatattttttgcatcatacgtttaaacattggttgctcctaaatgaagctttagaatcctttgcaagatagtactactgcttcaagcagctaaccaccaatgaacaagaattatgagttcaaactctggcatagaccaaccccctaacttggatctcctaactcataatccagagttcttttccagagaactgctccgcttttaaaaaccagtgccaggattcagatctcaaatgataccattaaacactgataggcaagaagcatttgtttctatgagtaaataactctctgatgtattagaggctggtgttaatttttgactaggctgaactctgagcgtttattatttcttcaggtattaaaccttcagataatttcaaaaacacagtttaggccaggcacagtggctcacgcctttaatctgagtactatgggaggcagaggtgggtggataacaaggtcaggagttcaagaaaccccgtctctactaaaaatacaaaaaatagctgggcgtggtggtgggctcctgtaatcccagctactcgggcggctgaggcaggagaatcgtttgaaccctggaggcggaggttgcagtgagccaagatcacgccattgcactccagcctgggtgacagggcaagactctgtctcaataaaaaacaaaaccaaaccacagtttatcccttaggaaaacaccaaaaagcttcttatgtacatgaacttgtattagggtcacactttaaggtggctctagaaagtataatgagagacttacagtaagactgctttttttttgacgtggcatctcactttgttgtctaggctggcttggaactcctgggttcaagccatcctcttgcctctgcctcccgagtagctttacaggaggattacaggtgtatgccactgtgctgggctgagactgcagtttttaatgaatgaaatgccactgtgctgggctgagactgcagtttttaatgaatgaaatgcctctgtgcatggattgaagccagcttttatggcaaacattaacagtatggtttggttccccatctctgtgccccttgagttataacttaaattgttctgattgtagtattaactgtgattaggtgttgatgaaagagatatggagttctaattaagtaaaatgaagatctcaaataaaattgaagtagaatgaaacgctatatgtaaatacaattctgctaaacaaatatttaactgtggataggcacagtgactttataatgcagatagtcattttcatatatatggatatatataaatatacattatattcatatatatggatatatataaatatacattgtattcatatatatggatatatataaatataygttatattcatatatatggatatatataaatatacgttatattcatatatatggatatatataatgtaatacggtaattgatttttagactaaatatataagttgaaacataacattttctaatttttggaaaattagtggtgttaattctggagactagtaaaartaaatgattagagacgaatacacttcatggtaacaaacatgctggtgatacagctttaaaactttatggaaatttacaacatacaaaaataaagttcactgatgttttacatattcatggcctagcatcaccagttgccaatattttgccatcttggtattatctgtttcactctgctgcccctcttctctcctttctccctcaccatgtagcattttaaagcaaattccagatatcatttcacccatatgtatttcggtatgtatctctgacacacttgaactttcctttcatagtacaactrtcataccattgtcacaatgaataacattaacattaattccttaatggcatctggtagcaagaacatgttcagattagcctgtctctaaaatgtctttgcaatttgttcgtttacattaggacccaaataaagtcttcatattgcagttggaagatacggttctaaatggtctcttaaatctccacccttttcatgccctttatttgatgaagaaactgttatttaacctgtagaatttcccacattctgtttggctgattacatctttgtggtttggtttaacccctgtaatttcctgtaaactgaacattcgttctagagggtatttttttttggtgagcattgtttataagaggtgctgtattctttctattagttaccatcatgaggttggttcactttcagtattgctgggattggtcagtggttttagattatgttggcttgatctatcctttataaagttcttatcaactttcacacaaaggttttcgcarcatctgaggattgttgactagatccattatataaggattgcaaaacggtgattttggaattatatcactcctacatttattagttgaaattcttttgtaaagaaaacttttatttcatgtatttactgkctttaaaatctagaagtgcaggctataaaaatttaattcctctcccacctcgttttgccagtttttataataatgagttggtgtcctaggaacccactaaaacgaccagtaaatttttcttctttcttttattatttttagtgttagggatttttatgtatgtgatgtgttttaatccattgtagttgctgtttttcatgtttcaattgtctcatctttggccagttggaaccccttcagatgggttcctgtgttcttttgaatattgtcccatcggttttcaataacttactctctttctggcacaagggatatcaggttcactttgtacatttcctgctccgcatctggaatcagctatttctttaaggaaccctggttgctgagacattaatgacatcaaatatatatataaaaagaaaagaacaagtagccctggttttctcaagtgggaaatggtttttagagatcacaatcagrgtgttaagggtgctcattgctgctgggttggtcatgacttctatggttttttagtatttagatacaggaagtactctctcccttccttccctccctcctctccctccctccctccctctttctctcccttcctcccttcctcccttccttccttccttccttccttccttccttccttccttccttcctccttttttttttttttaattagagtaaattatggctgggtgaggtggctcactcctgtaacctaagcactctgggaggctgaggtgggcggatcacttgagcccaggagttcgagactagcctgggcaacatggcaaaaccctgtctctacaaaaagctcaaaaaaattagccaggcatggtggtgtgtgcctatagtcccaactacttgggaagatcacccgagcctggaggtcaaggctgcagtgagttgagattgtgccactgcaccctagcctgggtgatagagtgagaccctgtctcaaaaaaaaagagaagaataaattttcaattcatactgatatttccagttttcatgaaaaattacagaggttttgtttaacttattttatgatttatttatttattttatggtgaaaaatatgtctatttagtgttagccagctgggctcactttagatgatcccaattttgttggcaacgtcatcatagtcaggaaccggtagaacatgggccttctttccatcaggcctgatcagggtgttgatattggccatgtcagtgccacagagctttttcttagcctgtttgatctggtrtttgttggccttgacatccacagtgaacacaagaatgttgttgactttctgttcttttcatggctgactcagtggtcaggggaaacttgatagcatagtggtcaagctggtttctcctggactggaccagtcttccaaggatatttgggctgcctccagaacagcagcagtgttttgggctgtccttaggtgggtgacgtgaagatcttctcttttttgtgtggctgtggatacggatacctttcagcactgctgttttggcctttagagcctttggtttggctttgacgttgggagagcaggggcttccctctttgcctgtgatgccttcttgatgagtacagccatgtaacttcttttatagttgtgtctttttttttttttgggacgtagtctcgctctgttgtccaggctggagtgcagtggcgtgatcttggctcaccgcaacctccacctcccaggttcaagcgattcccctgcctcagcctcccgagtagctgggattataggcaccctccaccatgcctggctaatttttgtatttttagtagagtcagggtttcactatattggccaggctgatctcgaactcctgacctccggatccgcctgccttggcctcccaaagtgctgggattacaggcgtgagcctccgtgcctggccttttttttttttaaattgagatggagtcttgctttgtccccccgcaggctagagtgcagtggcatgatctcggctcactacaacctctgcctcccaggttcaagcaattctcctgccttagcatcccaagtagctgggattacaggcacgtgccaccatgcctggctaatttttgtattattattagagaccaggttttgccatgttggccaggccggtctcgaactctggacctcaagtgatctacctgccttagcctcccaaagtggtgggattacaggcgtgagccactatgcccggcctatatcattttttatcttatgctaaaaatgttggttcctaacaacattaacattatattatacatataacacatattagctttgagataacaataccataatgtagtttgagattcctttgtctgtctatttacatccttaggctgtattccagtagggatgtaagctcagaatactttttaaatgaaaataaaattttataaattttaataaaaaataatattttaaataaatattaatatttaagatacttgaaataataattctctgtgtatttatgtcagcagttgaaaatagaacatttacttcagtttggttttggtttctaaggagtgctgttttttccttttcaatttttttgatgtaaaatatttacatggtttcaaaatgttgagcatatttttaaaaagatatggctgggcacggtggcttgcgcctgtaaccccagcaatttgggaggctgaggcgggcggataacttgaggtcaggagttcaagaccagcctggccaacatggtgaaaccccgtctctactaaaaatacaaaaaatcagccgggtgtggtagcaagcgcctgtaatcccagctgctcaggaggcttgaacccctgggttcaagcgggagaattgcttgaacccctgggttcaagcgggagaattgcttgaacccctgggttcaagcgggagaattgcttgaacccctgggttcaagcgggagaattgcttgaacccctgggttcaagcgggagaattgcttgaacccctgggttcaagcgggagaattgcttgaacccctgggttcaagcgggagaattgcttgaacccgggaggcggaggttgcagtgagccgagatcacacctctgcactccagcctgggtgacagagtaagactctgtctcaaaaaaaaaaaaaaaaaaaatgctrctggtttgcatatcattattctgcccatatcctatcagtaaygaaagaggtattattttactgtatgtttttacttaaaatttaatttatgcttacattaatttttaaaggttcagatttgaaagtccagtgtcaattttccaggtggccaggtggtactagatgtcagtaaatagttcttgtttatatattgcgttttataattttaaatattttactgggttttggacatattgtatgtcaatagaaggcaactggaactctaattttagaaactaagattatgatatttgtagatgatcagttttactccttgtagtccaccccctccaattacttaataactattttaagatgttttacagtctaatatactgaaatttctgacataaagtcagacttccagattacattgcttaaatttgccaaactaggcatttttctggtggaggagaaaggaatcttttcctaaaagtctggtatatatatwttttttgcttaatgcctagttaccatggaaatagatgttagaatcagctcttaagtaggtaggtagtgacaaactggctgtattgctgaattgagttgctagactgtatttggccctttcctgctttcatctttccaccttctctttcatcattttttttttggtttatgtgctttttagaatattctatatagttaaatccaaacttgacttaacctaggtttgagcaacaatttgcttttgcttacaatttatactatctataggtagacattttacctcatatttacatatgtatagtataagtagataattgtactgacttggcacatcagctgttaatgcttttaagaaaaggtctggaaagacctgtaacaagttaatagtgatggtctctagctggtgacagtatagaaaatgtttaatgtctactttgtgaagttacaatgtttggtttttaaaatgagcatgtactacttcattatataaaatttttttacttgtagaagtttgtgttaatgatcagtatttaaaatatagtaaaaaataagagaggaaaagtggaaatcctctagtagcatatatttttttggccttaactttgacgtttgtgtgatgttgatctttagttactgcgcttcggtactgaggatagcagcacctatgtcatagtgttgctgagatgaaatgagattactaaagcataatgcttggcacaaggggagcagttaataaaataggagctctggtttttgtggatcttagatttgctgccctgtaggttttgggaaggagtagtctggctctacaggaatgaggaatgtattgtggagtcttagaagagctatctacgtattcatttgaatccacaaccttccctcggagctttcttcttgactatgtagttctactttagcttttctcttctgtcagtatatttctagtcatttccagttttctgctcagcagagactttggggtccatgttgtacctgttctgttactgttacataaaagtagatctataaatttatcttgttagtaatcaaaaaagttaaagttcaagttttatgcatattctggatgagttttaccttacccaacctttaatttggtcatgtgattgaaaaaaagattttttaggggttccttttcctatcactgtagatggaaaatttggaatttttttttttttttttgagacacagtctcaccctgtccctcaggctggagtgcagtggcatgatctcaactcactgcagcctctgcctcccgggttcaagcgttcctcctgcctcagcctcccaagtagctgggattacaggcatgagccaccacaactggctacttttgttgtatttttagtagagatggggtttcaccatgttggacaggctgttcttgaacacctgacctcaaatgatccacctgccttggcctcccaaagtgctgggattacaggcgtgagccactgcacccagccaaaacttggaatttctaagagcctttattaatttgtaaatcagtaacattggaattgaatatttgaaactggaactgtccccagaatattgaggatgcaaagtttctgtaggcacaattcttcacaaaggcagactcttggggacaatcaggatgattgcaaaatcatatgaaatataatatgtaacgaaatgaagaagcaaacaacttacattataagttgtatctgtattattaaagtccaaatatcctagtttaattttttgaatattcaaacatatggctgaaaagttttaaaaaatacttataaaagaatatagtaaaaaccctttcrtcctaccttttacctccaattgttaaatttcccttctttctgtacagtcattgtttttgtgtattgtttccacacgtagaaaggcaaacacaagtttgccgtcttacttccctatctctcctaccctttactttcagcttgtaaattacacacactgttctgcacttttaaattttgtcacttaacacatctgggagatgtttgtgttattattacatagagatcccctcatttgtgggtgtttttttgtttgttttgtttttgtttttttaagacagtcttgctatgtcacccgggctattttttagtattttttgtattttttagtagagacggggtttggccacgttggccaggcyagtctcaaattcctggcctcaagtgatctgcccacctcggcctcccaaagtgctggaattaacaggtatgagccaccacgcctagccttgtgtgttcttattaacaacttttattgaggtataacttgcacaccaaaaaaattaaaccattctaagtgtaaaaatcaaggaattttagattcatttttaattaaaaatttattttatttatttatttatttattatttttttgagacagagtcttgctctgttgcccaggctggagtgcagtggtgcgatctcagctcaccgcaacctctgcctcccaagttcacgccattctcctgcctcatccttccgaggtagctgggactacaggcacccgccaccatgcccagctaatttatttttaattttttttatttttagtagagacggggtttcaacgtgttagccagggtggtcttgatctcctgacctggtgatctgcccacctccgcatcccaaagtgctggaattataggcgtgagccaccacgcctggcctattttcttcttttagaaacaaattgttactctgtcacacaggcaggagtgcagtagcactatcatagttcagtgttaacctcaaactcctgggctcaagcaatcttccaacctcagcctcctgaacaggtgggactgcaggtgtgtgctaccatgcccagctaattaaaacaaatttgtttgtacagacacrgtagcactatgttgcctaggctgttcttgaacacctcctctcaagagatactgccacttggcctcctgaagctctgggattacaggcgtaagcctccacacctggctgttatggaatttttgtaaatgtctagggttgttcacccatcaccacagtccagtttaagaatatttttgtaatccttaaaaagttgtctccccgtctctggtctttcatgcccatgtccagctgcaaacaaccagtttcctcaattgtttttgcagttctgtataggacagatgtataagatttacgatgtaacataatttatttagccacacccctatttttggacatttaggttgtttttgaccttttgcttttacaaacaggtctgagatgaggtaactttgtacatatattatttcatacatctgtaagagtatctgtaggattaattcctaagagtagggttactgattaaagcacatgtgcttttttttttttttggtgatggaatctcattctgtcgtccaggttggcgtcatcttggctcactgcaacctctgcctccctggttcaagcagttctcctgcctcagcctctggagtagctgggattacaggcatgcaccaccatgccccgctaagttttgtatttttagtggagacaggtgtcaccatgttggccaagttggtcttgaactcctgacctcaagtgatctgcccggcctgcattttttatttctataatcgtttcccgttcaggttatacagatttacattctcagcagcaatatgaaggctaacattttcccataacttacctgccgtgtacattactagacttctgaatttctgaatttttgccaatctgatagtgaaaaatggtgtgggttttttttttttagagatagagtctcactatatcgtccaggctggagggagtgtagtggcatgataggggcacactgcaacctctgtctcccaggttcaagcagttcttctgcctcagcctcccaagtagttgaaactatggatgcgtgcgaaaaattgtgttttgaattgtttttatttagtaggttttacatcgaatttatgaatgagtatgagcatcttttcaagtgttgagtccattgtaattctttttatatgaaatatccttttatgtcatatgcccatttttctgttgaatggttggcttttttttttttttttgaggcagaatctccttcctgtcccccaggctggagtgcagtggtccaataacggcttactgcagccttgaacctcccaggctcaagtgatcctcccacctcaacctcctgagtacctggggctacaggcacatgctaccatgctggctaatttttaaattttttaatagagataaggcctcactatgttgtccaggctggtctcgaactcctgggctcaagcacctcacctacctcggcctcccagtgttgggactataggagtgaaccactttgcctggcctgaatggttggtctytaaaaaaaattactgattttagatgttctttatgtatgagagtcaagctctttagtgatgtgaattataaataactttttgtagagtttgtcatttatattttgatatatttgctttgtgtatttttttgccattgagcaattttttaatggttaaatttatcaatattttatagctcccaaactttgagttaatttactgtttgaagtaagtcatacattgaattcccttccaggatcataatttattatgtcactttgaatttagctggacttttggccagacctactgacttgcatctgtgatgaataactttgaatatatgttatctcacacatgtgcaagtatagctattggatgaatttggccatttattcctggggccagggttgtgtgtttttaattttggtaattattgttgaataaatggatctttcaagactgttaagatattgcattgctaataactggtgcagaaattaatggtgatttctgttcaagatgccagattgttaaactcctctaggattagaaaagttttggttgaaaatagaacacttaactgtaactaagagtyttcttttttcattatgtgttggcctttaaggcaccagaattatacttcagaaattccttgggagaatttgggttatgtcttaaaataaaaaatgttcatgttctttgtgctcccttttgatacctacccagaagcagcccatgtacaggtgcacaaggaagctggcatgaatatgtttgtggctgccctctttaatagggaaaaacagaaaaccacttaatatcaccagtagaggacaagctaaataaccatggcaaattcctacaatggttatagcacaaaattaattcgacagtttgtgtttactgatgtagaaagatctctaaaacattttttgaatgaaagaaaagttgaaagacagtatattaaatgtagtaccagttatgtaaaaatagattcacagaaatgttattaaatatggatacatgtacgtgtatgtaagtgaaggtctggaaaaaacctggaagaacatatgccaaaatgagaatagtgattattaatgggaattgagtgtagtaatttaggacttacttttttttttttgaaatggagtctcactctgtttttcaggctggagtgcagtggtgcaatctcagcttactgcaatctccgtctcctgagttcaagcagttctgcctcagcctcctgagtagctgtgactacaggtgcccaccaccacgcctggctaatttttatatttctttaatagagaaggggtttcgccatgttggccagcctggtcttgagaaattcctgacttcaggtgatccacccgccttggcctcccaaagtgctgggattacaggcatgagccactgcgcccagccacattaatgttttattatttttacaaggataatatgctcatagactgtacaactaaaggccaatttaaaatttatttggaaaaaatacattgttttgtacataggtccctgtaaaggcagagtaagactggaaaaataccctaaataaggagacagtagttatgtccmcgagggatgtgggaacagagaagataaaaggagacatttgctttttgtatacttctgtatttttatagttttataaagcaaatgaattcatgcattaatttgtatgctgaagaaaggactaaattctttaggaccaggaattcatgtaagagtatctcattttgtcaagcttatttaacagtacttagtgaaaatagtagctgccggttgaattactgggtagagaataaaggtgtcaacagaaatagtttactaatttgctgataattaggcattaatttgcttgatgtgatgcatgtttattactttagggcaagtagaaaaataaaaataagtagattctttctcatataccatcatgaacactggtagtttctggtacattcaagacagaacacacaatgagactgttcttgccctgtagcctcacctggaatttccttttgtcttctgctttgttactacaacctcccctgcagtttgggtgtctctctagttctcttttctttgtttagtagtctgggatcagatctgctcttctgaaatagaagtcagcagtgaggagaaaaaaggtaaaaaaaaaaaatttattttttctgagacagagtcttactctgtcgtccaggctggagtgcagtggcacgatcttggctcactccagcctccgcctcttgggttcaagcaattctcctccctcagcctcctgagtgtctgggactacaggcacctgccaccacgcccggctaattttgcatttttagtagagacagggtttcaccgtgttagccaggctggtctctaactcctgacctcaaatgattcacccacctcaccctcccaaagtgctgggattacaggcgtgagccacagtgcctggccaaaaggtaaaatttttaatccctttattcagttagtcactaaatgtgagaatgtctttacccagttcttctctctccatcccagcattagtgcaagccattgtatctcattctagattatggtagcagattcctaactgatctgtctgattcagccttgtatttgtacattggtatctgtttttcacattgcagccacagtgatctaagacatcagataatgtaactcttgctcataaaactttgtagtagttcttctcctgttgctatcaggccttgcttctccagaactctggctatggtcattaataattgcagctttctatattgtctactttcctcatgcactatagctcttctccagaatctatattgtttctcatttcaacccatcagaattcttttactagattaccagtcatccttcaggtatccttctctgagatcctaagatagatttacgtccttcttcgtgctcctcttgtgcagaatctgaccatagtagttaacttcatatggtaacttaactgtttaacwgattcctccactacactccatgaaaacaaagactgagttttaaatcaagtctctggttcctaaccagcacctgatacattataggctttagtttaaatgtatgaataagsctgggtgcgatggctcatgcctgtaatcccagcactttgggaggccaaggtgggaggatcacttgagtccaggagtttgagaccagcctgggtaacatagtgagaccctgtctctacaaattatcaaaaattagctgggcattgtggtacatgcctgtagttctagctacttgggaggctgaaacaggctaattgcttgagcccaggaagtcaaggctgcagtgagccacagagctcagcttgaataacagagggagaccctatctcaaaacaaaacaaaacaaaacccaaaagccagaaacaaatgtgtgaatgagcgttaactcagtcattttttctctcatatcatttttttctcttgttctttccctacctagtaattaataggttgtggctcagtttgaaaaacacttgtgtaaggaatcctgatttactagttagaactctcagaatgagaactctctgccagatctctaaatatttagtaattttttattctgttgttaatggtattttaaaaattcaatttctgattgttgctaatgtataggaatcctattgacttctctatattgtgtatcctgtgatcttgctaaaaccacctattggttacagcaggatttttgtagattcctttggatttccttggtagcggatcatgttgtcagtaaaggcagctactattcttcatgtccaattcaaatatcttttctttcttgattgcattggctctccaaaacaatgcagaatagaagtggtgaggtggatatccctgtcttgttcttaattgtagggaaaagcattcagtctttcaccgttaagtataatgttagttgcagatttttcatggatgccttttgtccgattgaggaagtttcattctgttcctagtttgctgagagattacatcaggagtggcttatggattttgtattaataaaatgcattttctggatatattgaggtaatctgtttttaaagtttgttgatacgttaattacactcattgacttctgaattttagaacaatcctccatttctacaataaatgcacttggtcatgatatattaccttttagaacatattgttggattctacatgctagaattttatttagaatttttgggctgggcgtgatggctcacacctctaatcccagcactttgggttggcttaagtccaggagtctaagactagcctaggcaacatgacaaaaccctgtctctgcagaaaataaattttaaaaaaagtcagctgggtttggtggtctgcacctgtaggtcccagctacttgggaggcttgggaggctgaggtgggaggatcacttgacttcaggagttggaggttgcagtgagccaagatggcaccactgaactgcagcctgggtgatagaacaagaccctgtctccaaaaaaaaatatatatatatattgtttgcatttttgctcatgagggatattggtctgtagagatgtggttttgctatgttgcccaggctggtcttgagctcctggcctcaagcagtcctctcctctcagcctcccaaagtgwtgggattataggcatgagccaccatgtccagcctctagttttattttctcataatgtcattatatatcagaataatgctggctttgtagaatgagttgggaataattccaaattttaattttagagatggtatcttgttatgttgcataggctgttctggaactcatgggcccaagggatcctctcacgttagctttccaagtagctgggattatagccatgagccactgtgcccagcaatttttatttgaaatactaggtcataatcacattatggttttaaagatcacttgtaatagaaaaagctagtgaagtatatgtaattaaatttctctgatcaattcatcacattgcatcatcaattttataggatacttggagagcagataatttaggccttgaagaattttttttcccccagagacggagtctcgctctgtcgctgaggctggagtgcagtggcataatcttggctcactgcagcatctgcctcccaggttcaagcgattcttctgcctcagcctcccgaatagctgagattacaggtgcctgccaccacgtccagctaatttttgtatgtttagtagagatggggtttcacatgttggccaggctggtgtcgaactccgaccttcagtgatctgcctgtctaggccttccaaagtggtgggattacaggcgtgagccactgtgccggcctggccttgaagaattaatgttgatttgttttaaatgtagaatgaggctgggcgtggtggttcagacctgtaatcctaacactttgggaggccgaggcaggcggatcacttgaggccgggagtttgagaccagtctggccaacatatcgaaaccccgtctctactaaaataaaaaaaaaattagcagggtgtggtggcgcatgtctgtaatcccagctrctcgggaggctgaggcatgagaatcgcttgaactgggaggcggaggttgcagtgagccgcgattgcaccattgcactccagctggagcaagactgtcttggagagcgagactgtctcaataaataagtaaataaaggattggtttcattttctttagggtctaagttaactttttcttaaaagtatcagcaagaaatcttaaaattgactgtcttaagtaaatgttaaataatagtacttaatattaataattttataatttaataatgaacataaagcattttatttgattttaacattttctggttattaaaaaactcatggtagaaagtatggaaaatccagaaaatcaggtaggaaaaagrtcactcgtaattcagacgttacagaggtaactactattaacattttagtatatactttcaaatctttacctgtgtatttcttaaaacatagtttgtaatcatcttttttcaacattttaaacattagcttctgaattagtaggtaagtttatgttggttacagataggtttttttaagagggtgttaagttgttactacctgataaggcagttatggtatgacatctggatttaagctctttttcctgcctctagtgaattatgtccttaaaatcacttaaagctccacctctctttgctcttttataccagtgggtaataatacttttttatttatctacataattgtttttgtgatgaaaatgaatgtgttttaaaagatacataaaacttcttattttgttataaaatgaagtagtatcggccaggtgcggtggctyacgcctgtaatcccagcactttgggaggccaaggcaggtggatcacaataggagtcgagaccatcctggctaacacggtgaaaccccgtctctactaaaaatacaaaaaattagccaggtgtggtggcaggcgcctgtagtcccaactactcgggaggctgaggcaggagaatggcgtgaacccggtaggcggaggttgcagtgagccgagatcgtgccactgcactccagcctgggtgacagagactccgtctcaaaaaaataaataaataaataaataaaattaaatagtatgtaatgtaaatatttccatgtctggttaaatttggttgtctttaagtattcctgttttctctttctctaatttttctgaaaattcagggtacaataggagttcttaaacttttttgggtctgtcgaaagtacaggctttattgtgtagatatatcatctctgaaaattcttgtagggtcttcagaaatccacagaaacagtgttatggtttccaggttaaaattttccatatttataatagttttcacccattgtccatggcaccttggtttacctacttgtgcttccaaaagtttgacacactcatacaactaattttcgcattcactaaatttgcattgactgttatcccaaagcctaccaaaaagaaggttgctttgcgttgattatatcctgtgaagtagccttgagcagcaaatattactttttgtaagttagagacagcgctgaggaataaaatcaatgcatttctcaagtagatcttgggtttctgagaccatgtaaaaactttgaatcctgaggatataattaaacaaaactgtaaacagttttcataagtatcacagggctaagggatgagcaagtgatactaggttaaccaggactccctgaagacattgttagattatatgctttaggagtgattgtgtttttgatgattttcaattccttcaaatatgccactatattctagtatttcactgtttttatttcatagcagagtccccttctgaatcatggtgtatattcatgatgtatgttcctaggctagtattttacccaaaataggaaagttttagagatcattttgtatctgaaaagtattcccttatttataatgttgatatctaatataagtaatgtgataatttcttttaatttttgtatttctgattttttcagcatttcttattggtcttctgaattgtataaagaacaggtttttaaaaatacattcaccagcctccctaagaattgcatgagagtacctcttaccactgttaaataaataactcctgctccctttgttttttgtttttgtttttgtttttctgaggcaggctgttggtctgtcactcaggctggagtgcagaggcatgataacaactcactgcaggcttgatctcctgggctcaaatgatccttctacctcagcctccaccacgagtagctggggccacaggcatgggctaccacgctcagctgtttttttgagacggaatgtcgctctgttgcccaggctggagtgcagtggcatgatcttggctcactgcaacctctgcctcttgggttcaatcgattcttgtgcctcagcctcccgtgtagctgggactacaagcatgcaccaccacgcccagctgatttttgcatttttagtagagacagggtttcaccacgttggccaggctagtcttgaactccttacctcaggtgagccacccgcctcagcctcccaaagtgctgagattacaggtatgagccactgtgcccggcctttatttttgtttttaacagaggcagtttccctatgttgcccaggctggttttgaactgggctcaagtgatccacccgccttggcctcccaaagtgctgagattataggctgagccatcgcacccaaccctcctgctcactttaaagcatgctgtatagagttgtcctggtgagaagccaccttgatggcaagcttgtaagctgtagagttggtgagtgtttacttaggactcacatttgaaaccgcttttttttttctgttatcttttaatatgtaaaataataatcagaagttactcaggactctttttttttcgtttttatacatatgatttaatttttgaactgagaattagcgctcacccaatattaagaatttctttcaaaaaacgtgctcgggtcaacacaaggcctctctgtacattatccttccgaaaccatggtttctttgcttgcacctttatccccactgccttgccagtccttcccgccagcaggactggaagcctggcgactccctaggtcacagggtctcccttgccataaccaagtgggctctgcrcgtggctgatggcagccccaccctgcgcccctgctgttaggcaccgagcaaggaggggcccctggctgttcttcgcctgggcactggtgtgctttcggcgatcctggccacctgcccacctgaagctgccatcttgggttctggcaggagccgtttgcgtggcgaggagcggagaggcaggaacccagtgagctgctcaggacctgagttgtgggagatcatgactatttctttgcgatgcttccccaatattctttaagtcaattttgtttgtcaaatagcctgattttagtgatcgtctcttgttagagcctgcccagtatgtattccaccttgtttgttaacaacataccaatttcccttggattgtcagtgaaggtgtcctgttctttactgtacaagaactaagcatgtgattcaaataaggttactggatatgttaaaaagaataagacaatggaaataaaataatattaaaatgttttattttattaatgggtggagtaagagtaatacaaatgttttagacttgaagttactgtcagtgtttttatcattatatgactgtcaaagagctcataatagaattaagagaatgtgttggatatttccagcaccagtgttagatttggtaattcacaaggtgcgctcacaggactcagtgtattgtattagtcatgtttacrgctgcgatttattacaagaggataggaagcattatcagcaaaaggaaaagatacattgggtaaagtctggaggaaaccaggtgcaaatttctcccggtagagttacacaagacacacataattcccctaaccaagaattgtgacaacatgaaatgttacaacccgggaagctccttaaaactcagcatccagggtttttagtgggagctgttcacataggtactgcatgtctggcatatatcaaattctagactctgataatgaaagcttaagccatattgttttagacacaaccacccactcttaccagttggtggtaggaaccctccctaaatccaggttcctgtgagttcttagccaagggccagctttgcaagcagccctttctaaggaaagccatctcaggtctgctgttaacttttttctgcatagaagattagctttttatttactaattctttagttgtttgcgttgattattttatctcaattgctgatttctttgctagagtcctctcaatttttaaataatgtattattttaaattggtctgcctttaaggccgtattttattttgtgtgtatgttacattgttttcattatcactatcctgatatctttcaggtctttaatgacttctgaaatttccaaaatggctttcagattttgattcctaccagaatacctcatactacgtggttcaggaaaccaaatggagattctgttagtttctgagcatatctattacaaatatctacttaagacctagaggaataacctctgggtcagtgtttctcagtcttgccgggggtggggggtgcatcagagtgtcctggagggcttgttaagacacaaaatgctgtttccctcccggagagtttctaattcggaatgtctggagcggtgcctgggaatttgcatttctaacaaatttccaggtgttggcttggcgctgtatgcactttgctgtaatcccagcactttgggaggctgaggtgggtggaccacttcagcctgggaggtggaggctgcagtgagttaggatttccagcctgggtgacagagtgagtgagaccctgtctcaaaaaaacaaattttcagatgttgctgatggtgttggtcctgggagcatactttgggaaccacttttctagtttataatacaatccacaaacttatgtaaacaagaaaaatgtaatctgtaaaattcccatgtacaggaataccaaatacagtgtgccaaaagtggtaggacaattgaagacttcattgtcaaccctgctgtgttgtgcagctgccacttttccctcagaatgtgtgtgttcacaaggtgtgttgcttttgtagatcaacataagaaatacttactagtaaagtttatttcttatctgtttttaagataagtaaattaacagttcactattttttgtgtgtgctcagttaatcttcctcatatcacctggaatttatcatctcccttgggtaatcacagtctagtagattctctcttcaccattttcttagggaaaatggattggcaagggaaatgctagactattttaagggatttattggcttttctgtcccactgggaatgcttataggaggggatgccatgaaatgtttttcatgatctcagtggggatcagaaaattccagcagaacggaggctaggtgggcatggttaacacatttaggtaggagggcatgtttgataatgaaattctgaaaatgtttgcatgtgcattgagatccctaggtagataagtaacctagtaacttatttgattggtatagttttttaaaactccaggtctgatgataatctaatataaactattctattgaatgctttgaaattgagtctgtttagttctgagaggccattgaaagaaggcaagaccgagtatcctggaaggcctgttacatacccctgtatgtagcatggccctttctacttgcctttgctaatgatactttgtgtgtgtacatttacttaaatagctgtgcagtgggataggggaataatactcaggttttaaaatctgattttggctctgacttaaccattaattactggtgactcaaaagaataccactgtgacctaccagtaagagtaggtgcatatggagagtcaggaaatagcattttgatagagttttgacttaaatatgtttccttacactcatcttgaaattgtttcttatggtcctaagtgaatagttggaatagatatcctcagcaactaatagaatctccatttagtgtgaggtagtatggaaggaatggccaagaaaagccatttagtgccaccattaaaatcctgaaagatgctgggcaaggtcatcaggagaaaaatgtaaaacaaaacaaaaccaatgamacacacacacacacacacacacacacacacacacacaatataaggcattaaaaatggtctcatttacattattattattattttttttttttttttgagacggagtctcgctgtcgcccaggctggagtgcagtggcgggatctcggctcactgcaagctccgcctcccgggttcacgccattctcctgcctcagcctcccgagtagctgggattacaggcgtgcgccaccatgccaggctaattttgtatttttagtagagaccgggtttcactatgttggtcaggctggtcttgaacttctgacctcaggtgatctacccttctcagcctcccatagtgctgggattacactgcacccagcctctaaaatcttttttaaattttagagacagagtctctctctgccacccaaactgaagtgcagtggcacgatcatgtcttgttgcacctttggcctcctgagctcaagtgatcttctcacctcagccccctgaatggttgggaccataggcgtgtgccactgagcccagataaattttttattttttatagagccatgtcttcctttgttgctcagggtttttcttggcaaaagcatattgccagaacatatcttttttttttttttttcggagatggtgttttgctccatcaccyaggcttgattgcagtgcacaatctcgactcactgcaatctccacctcccgggttcaagcgattctcctgcctcagcctcccgagtagctgggattacaggcacccgctaccactcccagctaattttttgtatttttagtagagatgaggtttcaccatgttggccaggctggtctcaaactcctgacttcaggtgatcccccctgcttcggcctcccaaagtgctgggattataggcatgagccaccgcgcctggccaacatctcttttttaagagaaataacttgtaatttctttctttccttttttaaagagacagggtcttgctgtgtctcccagactggagtgcagtggtgtgatcatagctcaatacagccttgaacttctgggctcaagcaatcctactgcctcagcctcacaagtagctaggactacagatgtgcaccaccatgacaattagtattcttgctttattttttctttttatttgataagaagtttataactttgaaaaatatgagtagaaatgtaagggtctgttgaagatgtaaactattgttttttaaaaagtgtaaatatatttttaataagattgtagggccagacgcatctggtaagggcttaaaagctgatttttaaaaattgatagccagaggttatatcttactaatgtttgctaatgctactaattagcgttagtttgctaatgctactaatgttataataatgatctgatgacctcaaatagcttttcaaaaaaaaaatctttttttttttttttttgcttcgtatgttcacatttcattatttcttactggtcaagattttttttctttttttgaaagtctctgtctgtcacctaggctggagtgcaatggtgtgatcacagcttgctgcagcctctactccccaggctcaagtgatccttctgcctcagccccctcactagctaggagccacaggtgcgtgctaccacgcctggctaagtttttgatattttgtagagatgaggttttgccgtgttgtcccggctggtcttgaactcctgggctcaagcagtcctcccaccttggccttccagcgtgttgggattacaggcgtgagccactgtgcccagcccaggatttttgtatattttgacagtttagcttaaaaatgtaaactggaattggtttaatatttgtctagatgtgatctaagttctgaatatcccagggcattgtgggtgctcaattaatgtttgtggaattgtaactgtatttgatattatttctattttgataataggcatctgatgggtttaattaaagctattttggttatgggtaatagaacccatttcaggtgatgaaaagcagaaaagagaatctattataagggtacagagcatctcatggtacccaaagaggggaactccagtttggcttgaggaggcagttggaaagctagcaggaactaaggctagctattctctcagtcactcagagaacccacagtttcttatgtgcactttttccccctctgcatctgttttatttcttacttcctctcagcagactggttttctctacttctccctgtgcatgccagaaaatggctacyataggctgcatcacatcctttctctaccggctaattggttaacctagctttaacttcatagcagagtaaaaccgatcggcccagtttggatcaggtggctagcagtctaatgaattacttgttggcaaagcatattgccagaacatatctctttgttaagagaaataacttgtaattgatacttgtcatgttagtgacttagtctttgtaaagctgtgtgggcttctttgtcgtaaaaatttggtcatctgtaagatagtttgtccttattttacttattaaaatatgatttgttgggtccctcatatgtgcatagtcattgaataggcagagcggtctgcgcgcgtgcacrcacacacacacacacacacacacacaaaattaggcctagtgttggattttcctactcttaccattgtgcctgtttttagtatgcatttgatttagcacatgataatcataattcaaagayaagtctgcarcagacttaacatttatatataragtgtttttaaggcagaaggtattatttaccctctttttagaagtggagaaactgagaatcagggagtaaaaatcagtcaactaataggttgcagatcgtagccatagctgagttgagatattctttacacaaattatggccttattcttctatatccttttacctctatgtgagtgtatatcaaactggacttctccgaaattctctttggcctagtttgcaagttctctgtgtagaataaaaaattacatttttaattgattatttttatcaagtaatacatgcaaatgacactaaattcaaaaggtatatactttattattgttttatcttgagtttcttccatttcatttcatacagagagctaaaaagatttaatataaacattttctgggtcatttgtacatctggatagcagagaactattaggttggtgcaaaagtaattgtggttttgcaattacttttatttttatttatttatttattatttttgagtcggagtctcactgtcacccaggctggagtgcagtggtgtaatctcagctcactgcaacctccacctcccgggctcaagtgattctctctgcctcaacctcccaagtagcctcccaagccaccaccacgcccagctaattttttttttttgtattttagtagcttttttgtatttcaccatgttgcccagagtggtcttgaactcttgagctcaggtgatccacctgccttggcctcccaaagtgctgggattacaggtgtgagccactgtgcctggcatgcaattacttttaatggcaaagaccacaattagttttgcaccaaactagtataatttcagtttctgcaattactttttatgttttacaaccagcgttcatagtgagtagtattacttcgcttgttgcaggtttgattataaaacaacggagatggagttcacagtaagtgatatgttcctacatcatgaggcaacattgatctctccagcaaaggttttgtactagtttacatagggaaaagtggtgggagaattgattcgttacactgtgctcaatattaaaagcatgctagtccaaagtagtctgtgccatatttgtgttttgagtgtgtagttgtagcagaatatcatccatcatattgaattaatgttcttacttgaatttcattgattttgttggtttgtggaatttagtttgcagatttggttttatacttgtacagttccgtaagaataaataattcttagctactatatgactacattttatcaggtacaagtatacattttctacattttracatctctgaaatcaggatgcatttagcagtcaattgatggtatatcgtagtttaattggcagcttttttcttttttagtggtaggtgtggtttacaattagtgacttaaattagatgaaatatggtaactttatgtttgtatgaatttcagtaacataaaaataaaccatcatctctgtaaaggagagataatttactttttttaagtttaagaacagctgtgtaggctgagtgcggtggctcatgcttgtartcctagcactttgggaggccaaggctggcggatcatctgaggtcaggagttcgagaccagcctggccaacatggtgaaaactcgtctctataaaaatacacacacatgaaattagctgggtggggtggtgcacgcctgtagtcccagctacttggaaggctgaggcaggagaatcacttgaacctgggaggcagaggttgcagtgagccaagattgcgccactgcactctagcctgtaaatataactgccaggaacttgagatttcagaaaacatttctccagagtatctggaaaatcacctggcttacccaaacaaaattgccacttgtggatatttgctaccaatgcccctatcattcttctctgtagtcctgtactcataagcttagctgcttagctgctcatacctattcttgaactgcttctgtcactaatttctacgtgatctgattgttaagtacaaaatcttctttaaaaagaatggtaataatamattaatatagacatttatttatattgagtgcttattacatgtgattttatgtgtaataggccacattggtattgtatgtatttaatatgtaatttatatttaattataatatgtaataaatgtataatataaaagtgaacatatgttttattagtatgataaactacactttacaaatgtgaagctatgctcagataagttaaataatttttcccaaggatgatggatctagtaagttatgaacctaaagtttgatctcagatattgattccatagctcatgctttttcacctgtttatataagacgcttctgattataaggtatttttgaaatataaataatattcaacttaagaggaatctcatttagcagggcttaactaatgtctaatcttttttgtgttaacaattatctcatgaatttcttctatatgtaggtgctattctaggaccagggcattcataggtgaataagacactatttctatcttaagtagctcagtctagaggacagataggaatcattaaaatatggtataaaatggtcacttttgcaaaatgttggtatatttgggaaaaggaaagtcagtatatagtgttacatcaatgagtatttagcataagttaccaaagggcttactacagtaatattctgaatctagaatgaattttgtgacttagtgtttaatacatgttgtgtgggtccgtttcttttggtcactagacaagtaattgataggttttcaagtgattaaagattgatgtttcttgttgatgacgtctttcaaaatcatattcttgaggatatgaaacacgattaaaaacttggttggtggggattattattattatwtattattattattwctttttgagatggagtctcgctctgttgcccaggttggagtgcagtggcgtgatctcggctcactgcaacctccacctcctgggtttaagtgattcttgtgactcaacccgtgagtagctggcattacaggtgcctgccaccatggccagctaattttttttatttttattagagacagggtttcactatgttggtcaggctggtctcaaactccttacctcaggtgatctgcccaccttggcctcccaaagtgttgggattacaggtgtgagccaccgtgcctggctggattattattattatttattttattttatttttttgaaacagagtttcacttttgttgcccaggctggagtgcagtggtgcaaactcggctcactgcaatctccgcctcccgagtccaagtgatactcctgcctcagcctcccaagtagctgggattacaggtgcctaccaccatgcctggctaatttttgtatttttagtagagactgggtttcaccatgttggccaggctggactcgaactcctgactgcagatgatccgcctgtctcagcctcccaaagtgttgtgattacaggtgtgagccatggcatccgacctatcatttttttagcttggtcatccaggctggagtgcagtgatatagtcactrcggccacaacctcctgggctcaagcagttctcccacctcagcctccttagtagctgggaccataagygttcaccacctcttctggcttatttttcaaaattatttgtagagatgaagtctcgctatgttgcccaggctcrtctcaaactcctgggctcaagtgatcctcctgccttggtctcccgaagtgctgggattacaggactggcccagtagggattttaaggatttttttttttaaatcaaactcttttaaatgttctccagatgctgtctttagtgacttgttatactaaaaaatgttctacttattgccttctaatccatgccagtagttattactaacatgcccagatacattaaaccataacaatgccagtttctgtttctgtttgtattctgaattttgaactgcctgaatcctccactaggctcctctaatttccagatcatgaaagtttatgttctgagagtgctgttactccaaagaagattcatttgcatttgaatctgattgtgacctcactagcaagatgacaaataacctcttctcaaggcagagtagattggctgtgttacatgagaaagctcctttgcttttttgatacttagaacagtgccttaagtatagttggcttttaataatgtctctcccaatttctctcttgcctgtttgccgaggcagaaaattctagttagaatatttctttggagttacttaaatttccaggaatatgcagatactcttctgttaatatttgtgactatgcagatatccctctggtttatgagatgtggatctaaaatttacttataagtaacttgtggttttgtctcctaaagtagcttaaattttaagaagatacacagtggggccatgtaaaaaaccaaaaataaactttaaaaaattgtaagaagaatattaagaaatatagataacatccaaagattttcgtgttttgggaaggggttgagtttttttgttttgttttgttttttgtttttttgagacggagtctctctctgtcgcccgggctggagtccagtggcatgatctcggctcactgcaagcaccacctcctgggttcacaccattctcctgcctcagcctcctgagtggctgggactacaggcgcctgtcatgacgcccggctaattttttgtatgtttagtagagacggggtttcaccgtgttagccaagatggtctcgatctcctgaccttgtgatctgtccgcctcggcctcccaaaatgcttggattacaggcgtgaggcaccgcgcccggctggcgttgagttttaaaatatgcagtaactcttacaatccagcaaaaaaaacagacaaacaaaaaacaaaaacaaaaatgagcaattcagaaagatgggtaaataatataaatagataattaatagaaaaatatgcaaatgcccaataaatatatattactttacaaaataatttattttcaaataattccaaatttgctgtataaatagttcatgtaatctccttcaccagactggccagttgttaacattcgatgtcatttgctctatatctaatttatctttttctctgtgtgtgtgtatacacagagagagatatatacacagatttgtatgtgtgtgtatatatatgtgtgtatatatacacatatatattgtatacatatatgtgtacatatgtatgtactcattatcattacgttcaaactttttaagagcaagcttaaaacacaatgttctgtcacccattgtactccagtgtgtaattcctgataaatagaacagaataacttcaacttcggtctgtctactttttctcatttccagttacycttggcagatataccacagaaagttgctcttttgatactacagtgcaaaacgttgcacaattacaccactaaaaataattcagtagtattcaaagatgatgtgaatattctgttcatcaaaccacctgtcagcttagcatcttttgatagctctctgaatcagccacctttatgatggttgccaaacgctgattctctgtcagttctgttacagttattaacattttagtataaggaaaagctttatcttttctacattttaaaacattcattcattcattcttgtcaatatggactcacggatttcatttttactgaatgcattgtaatttgttaccaactttttaaagtgagatataattaatttactgtggaatacacagatcttaagttgatcagtttgacatacatatatatccctaaggagataatagcacaaataatatttattttaatgctcaaactttcccccatttgaccagtaagaggaaaaccccttcaagatgcttcctgtgtccgtttgaaatgtccctatcattaatcgcaccatttctttactttctgacacaagatgtttcagattcttcttgtgcttttctctgtccaaccttgaaatcaaccatttttctaaggatcctaattccttataatggagagagttatttagaaatcaagacgtgggccgaggcgggtggatcacgaagtcgggagtttgagaccagcctgaccaacatggtgaaatcccgtctctactaattagctggacatggtggcgagcgcctgtaatcccagctacttgggaggctggggcaggagaattgcttgaacctgggaggcagaggttacagtgagccgatatcacaccattgcactccagcctgggcaacagagcaagactccatctcaattaaaaataaataaataaatcaagatgtaggctattgctgtttgttgttgttgttactgggctgtcttttggttgctcttagtactttctttttggacagagctaggaaaatatagggacacacacgcacacctagaagtacttgtttatttttctgtgtgtgtgtgtgtgtgtatgtatatatacacatatatatatattatacaatcatgaattcaaaccaaatttccaattccagtccaatatttagacttctctgtagtctgctcccttccttccattttaacttctttggagtgaaaaacatggcccccactatattcagtgtatttacttatttgattagtccatttacttatttggtccgggtaatggatcttccagccttgcagcttatctcctctgtccctattcagctctcatccatgtcctccgccacaggactgcacctccatgtggttcccccaggcctcctcttcactgccttgtatattcagcttctgtccttgtgcctattcaacccttaccccttcacaaatccatgtccttagtgccacatgaaaaaggagagaagaaatggccccagagaatattttgaagttatattgcatggttttcttttcttttcttttctttttttttttgagacgtagtctcacgtcactcaggttggagtgcagtgactcgatctcggctcactgcaagctccgcctcccaggttcatgccattctcctgcctcagcctcccgagtagctgggcctacaggtgcccaccaccatgcccggctacttttttgtatttttagtagagacggggtttcaccttgttagcctacaggcacccgccaccacacccggctaattttttatatttttagtagagacggggtttcaccgggttagccaggatggtctccatctcctgacctcgtgatccacccgcctcggcctcccagagtgctgggattacaggcgtgagccaccacacctggccatggttttcttcatttcctcgatgtattcattttttttatattccctcccaccaaattgtgcattttaagcttggtttttaaatggtacactgtttggtatataaatgcaagtatattttgttcattcatcttttggaattatctccattattttaatagttcattgggattgctatatataaaataggctgttttcatagatttattgtcacgtggtttgtgtttaagtacatttattaatgatggttttttgttttgttttgttttgttttttgacagagccttgctctgtcaacccggctggagtgccgtgttgcagtcatggctcactgcagcctccatttcctgagctctagcgatcctcccgcctcagcctccttagtagttgggaccatacstgcatgccactatgcctggctaatttttgtatttctggtagagacggggtttcaccctgttacccaagctggtcttgaactcctgagctcaaacaatctacacacctcgggctcccaaagtgctgggattgtaggtgtgagccattgcacccagcctactgatggtttttatgatcaaatttaatactcttgttttctgattcttctggctacattggcactgtaaccaatttgaatccctcactttttaaaataaactacctcaataaaatgtcatctagcatgttttgctttttaaaaaccatctcgaataattgagtatttcctagtcagtgtctgtgttagccagccatttgaagatttgatttaactattgtctttctaaaacttaatttatgtatttgatgtgctgcagcccagagacacattagagattactgttgattcatttgtgcacttctgtgcttccttggcattttggcatcttgaaggattattatccactaatagctaattttaaaattgcttatgctttttagtgttcccatggaattcagtgktttttaggtgccacttagsacatttcgtagactggctaggaaaataattatttaagcaatgctggaaaactgtgaggtagctgttgccttgacaaccagaaaactgttctgtttgctcaacaaagggatggtaatttagtagtttaatttcctttttggcatggaggtgctacataaaaacatcttattttagcctctgagatgatccatactaytgatcagaattagagaagcagagcaaaaagaaaaggcaagagtttttttttctggctacgtatagatagacatgcatatttatcagggttggtgttggtcaaaagaatcttagttaacctgctgacataatcttttttatgtctctaaattggaccaaagtaaattaacctcaaaatactggtgcaatcttggtacactaaggggtcgtgatacacttttattatggagcatccccacaaagatttaagattctcttgccgctggaattcaacatgattacttcatgtctggattgaataagggagaaaatattttaaaggaacccctcttccccacgtatatacacaattacattggcatctgctctatttatgtgggaattttttttatgacttaacccatttgtatatagacttaaacatttttttttaaaaaacaattgcctcccaggttgtaaagtaaaaataatagcctttatttggcaatgtgtgctgggccctcttctaagcattttgtgtgcaccgtcttactcctcatccttgtgacagaactgttattgtatgctgaggcacttagctaagtggcttagcccaaggtcacctcactactaagggatagatttgaagctaggcatctagtttaggaacatatacccttttttttcttttcttttttttttgagacaaggtctcagtgtcgcccaggttagagtgcggtggcgcgatctctgctcactgcaacctcagtctctcaggctgaagtggtcctcccaccttagcctccctcatagccaggactacaagcaggtgccaccatgcttggctaatttttgtatttttagtagaaacagggttttgccatgttgcccagtctggttttgaactcctgggctcaagcagtccgcccacttaggcttcctaaagtgctgggattacaggtgtgagccactgtgcttggcttgggaacctatactcttaattactgtattatactgacttttttttttttttgaaatggagtctcacagtgtcgcctgggctggagtgcaatggcacaatcttgactcactgcaacctctacctcccaggttcaagtgattctcctgctttagcctcccgagtagctgggattacaggcgcccgccaccacacctggctaatgttttgtatttttagtagagagggggttttcaccatgttggccaggctggtctcgaatgcctgacctcgtgatccacctgcctcagcctcccaaagtgctgggattattataggcatgagccaccgtgcccagccgaaaacttttttttttttttgagacgaagtttcactcttgttgcccaggctggagtgcaacggcatgatctcggctcactgcaacctccgcctcctgagatcaagcgattcttctgcctcagcctcccgtgtagctgggattacaggcgcccgccaccatgcctggctaattttttatattttaagtagagrtggggtttcaccatgttgaccaggcttgtctcgaactcctgaccttcaggtaatccacccgccttggcctcccaaagtgctgggattacaggcatgagccaccttgcccagccaaaatgtggttttgcccctcgaatattaagaagaaataaggaagggaaccaaatctgaattactattgataaaatgacttgtttgtccacatcaagtgtttcataatattaattataacttcctagctgactacctcagacatcacaatggagtgctttctaatattgactctgtttttttgatgtggcagctgaagcttagagaggtgagaggttcagtagcctacaaaaactcatctagttggtgtaaggagtagagcttggattaggaccttgcctctctgctttcaaagcctgtgctattaatcagtctgctctattacctcatgttaaagtaatgatagagtgataccttatgcccagctaaaattacatactcaaatctgaccacctcagttatggatttgatttgggtttctgtgtaaagtctcattcatattttggttggcattgaaaaatagtttgacagtttcattctagatgattatatatgtctcaaaacttgccgttctgaccacctttgtaatgccagtgctttgatataggcttgctaaacaattatgtgtaagattcaaattattgtgctgaatgagaatttaggaacagaaaagtaacttacctgagataatgtataataaatagaggtggcagcagtaagatcagaacacagatcactgctttttctgtgctctttctaacgaattaacactgctctgatgatgtgtttcagttttagcagcttttattagactttggtttccttctgcaagtcttttttttttgagatggagtctcgctctgtcacccaggctggagtgcagtggcacgatcttggctcactgcaagccccgcctcccaggttcatgccattctcctgcctcagcctcctgagtagctaggactacaggtgtgcgccaccacgcccagctatttttttgtattttttttttttagtagagacggggtttcaccgtgttagccaggatggttttgatctcctgacctcgtgatccgcccgcctcagcctcccaaagtggtgggattacaggtgtgagtcccgcgcccagccctccttctgcaagtctttctaaaggcattttctttatatgccttgtaattccttttcctgtgttctagcatgaaggaaagaaaatattgcccttcaaaagaatartttgccccacaataatttgaagtaataaatacccttctcccgtcaacacggatttttatattgttgaagatgtgggatgggcttaatttgggggcggagggagtcccctttctcaaattcagctttaataaatatgcccaataagcaaatctgcagtttgctgtagttgaaatgttgctagtgtctgtgaatgttaatgaaaagaatacgcaaatgggtttctgaatactaatagtctaaagatgttagtattctataccctatttttgttaagaattatctattaaaaatttaaaagtgtatcaattcctaaatttttatatgttcctcagtaggtacaaatatgcaacttttagttgatttattgttctcttctatgtttcataattttagttgcctcatcagttttaatttatttttaactatactgtttgtctctgaaaataaaattttactggctagtatggcagaatgtgttaatagaggaggttgcaaattgtggaaagttatgagcctgtggtcatgaagactgccctgccatttgggtttttatagcagtaatacccagtaccaattgaaccacaaagtgaactgaaatttccttaaattgtttctctctctataaaacatttaaaaaaaatttaattgatgagtaaagcttgaatatattcagtatgtgcaacatgatgaattgatgtacattttatgattaccacagttaaattaacaaacacattcattatcacttgtgctgtacattatattcccatccttatgataaaattttttttttaaataattgagataggatcttgctgtgttgcttgggctgatcttgaactcctgagctcaagcagtcctgcttcggcctcccaaattgctgggattacaggtgtgagccacaatgcgtggccatttttatgattttggagcgaagtggtgtgagtcccttttcatrttattgcttaaataaagccactagtatgcctggaatgtaaccataattttggccagggaaaatgatattttaagagacctaagacaggtaggtaaagtagaaatgcatttattcactaggtacaacagcaatgtaaagttatcaagttgtagttaataatataaaaaaattagaaagtattagtgcagaaatgattatctttctgtaagggtatattcccattatggtataaatgaactgatgaataggcattttcctaagttgattttaaaaattgtataactgatatgttttgagtttactttttatgaaatacatggaatgtgaagcaggtggccattatggaggtctgatataattgtgggcactcctgttatagcactagaatattgtttttttccctttttctttgggaaatagattactctgtatgatagctacaacttttaggggagaatttattttaaaatctaaatgaaattattctttcattatttattactcgtaacagcatttctcactttatattctatgggatttctgtaggatgttaatagatgtcaatagaaaagaaagggttctttggacaaatagattgggaaatgttgagttaaaatgtaatcattttctctattatagggtttctcagatcttttagcttacatttatgaatctccaaagttgaggcagagaagtaattcattcaatatagtgaatttcccccaactcctgcctcctttccttttggtggaacgtcctgggatgttagtactttttataaagcactttggaaaaagcttacttccatgattttcctttggctatggaattactataagcagaagaactccttagaaataaaaatgtagaaatgtacctgaatgtaaaacgtaagagcagctattaaaaactaaatcacaactgaggaaacataaatattagttaaggtagaagagtaaatatccagcgaatccctcctattaaagcatttaagatattttggcttcaaagttttgagactttccagatgactttcttcatatagttttcactagtagtttaaatatactaacttttctcccttgtatgctatactacattcttttttgtttgcttttttgagacagggtcttactctgtggcccaggctagagttcagtggcacgatcacttttcactcgagtctcgacctcttgggctcaagcactcctcccacttcagtctcccaagtagctaggagtacaggcgcatggcaccatagccagccagtttttatttttttattttgtagagttgagttttccctatgttgcttggggtggtctcaaactcctgggctcaagtgatcctccagccttggccttccaaagttctgggattataggcaggaaccaccacaccaggcactacactaaactaccttagacttttctagatagagatataacagagctattctgaatctgggtgactgccaagatacagcctaaatattagaagatttcccccccaccccagaatttgagctttaaagatctgccttctggccaacggacccttttcttgtaagtggtcatagaataaataaatatttgaatgaatgagtgactagagggrtatacttgtgagtgagctaattcatatcatggaccatatgtatttaatggaaataagatacctttatattttatgtgatgtacatttaaatagtctttatgataaacattttacttgttttttaatttatagtattttatagattggtcttgttaacatacatttcatatttataactgttgtagcttaacaagattaggctcactattctgaggtctgattatgggaaagaattagagagtttaaatctaattatatttctttgcatttttaggcccttgatgagcctccctatttgacagtgggcactgatgtgagtgctaaatacagaggagccttttgtgaagccaagatcaagacagcaaaaagacttgtcaaagtcaaggtacagkatttatagatttcataaattgtatgttcagcatttgatatgtaaacttttatttggtgmgtgtatttaagatttttctgcaaaataagtttctaggagtgaaggttgtaaaaatacctcaaaacaaagcattttttgttattttaaaagtattataattggaaagaaattagattatcacagttggtattttgaatgccatttcactatagacgtcttattgtttgtatagtgttttagagctggaaaggaagttagaagtcatctagtttaattgcttcattttattacaagaaaaatgaggctcggagagggttagtgatttctccaaggccattatgccgaattcatggcagaattggaactaccatagttcatcaattttaaggcatcaccccctctatttcagccataaaattagaatgtgacttgtaattgatggtgccttagataacagtgaaataaggtacatctagttgttgactccttatgctctgcctttcttgaaacatctttctaaagtacttgagttttgtcttaatatagaaaaaggagtgtaattgcttccattttaataaattatcagcactgaaaaataccagacaagtgaacttgaatatagacatttattcatttgtcaataatttattgagtgacaaaccttttgcagggaacttttaggtgggaaggaggatggggatattaggatgagattgacctgatctgtcctcaaggaatttataatctagattagcagataccttttaagccattggtttttatttcaccaattacatagactgtagaggtgttgtgcttctgtggagggtatcagtctcttctggagcttttactgttcctatattccttatgcatggatgtgttgaaaaagctacctgggtgattctaatttacactcctggttaggaaccattgtgataagtcctttaaattaactacaaactggtagggggctagtcttggccccaccctaccttcagtttccacatgcttggtggttggtgcttttatagtgtgcatttcctgttctggcttcacacactggtattccccaagcactgttttttgccagtactatcctgtagaggaagagaaagccttttatcaatgtttgtactttttcaggactactggtagcacatgtatcacctttgtgtgaagtagacaaaagccctctctcctggtggaaagccttcttagcagcgcttggcatgcagatagcaagtttgtgccagttggaaaagacattctctttggactggagctgtgtcactccaggacccatgctttggcccacaaagcaaaggctggatttaagccccatcttgcatccttagctgcacatttcctgtgtaatgaatgaactaggaaaatgacatgtagcagtcctgccatttcttgctgtaaatgaaaggaacaaaactcttactggactctactgcctctattgatagcacagagtaccttgtgctttataagtaatgaatatctaaagcttatttttaattttttcggctgccctaaaaatttgtttctgtggaggtgatgtccattaaaacacatacacaaggaaaaagaaagtgtatttcattcagtgattttgtcagtagatatagggatatattttttaacatgtgtaatttctttatgattcaaagttaatatatttttaacaaatttgttgatatgttttcactacctgttttcatttgttgaacatttactatgtgctaagctctatctaaaggtgaamctctagtgttaagacctagtctccatctgtaagtagcttatagtttaagtgaagggcacagatatctaaacatgtgatttaaataaaaagtgtgataatgcttttgtatgacacagaaatgcctgggatgctgtgggtataaggcatctcctttcatagctggtttttgagtgggcctgcctgttacctaaaataattatcacatatacctgataaagaccatgttaatgattcaatccctataagaactcttttcccttgttagagaaaacaattgttttctatactgagtagtggaagctatcttgtttttcaccagctaattaagtatttaaatttgaactcattattttaacttactcttttcacctctggtttcccattctctgatttctgtaatgatatagagcacagtaaagttctggaactagactgcctacatttaaatatcagctccaccatgtctagctctgtaaacttggaccaggtacttacactttctgttttttgttttgttttgttttgcttttgagacggagtcttgccstgtcccccaggctggagtgcagtgacgcaatctcggctcactgcaacctccacctccctggttcaagtgattctcctgcctaagcctccggagtagctgggattaacaggcatgcgccaccatgcctgggtaatttttgtatttttaatagagatggggcttcaccatgttaaccaggctggtcccatctcctgatctcaggtgatccacctgcttcggccttccaaagtgctgggattacagggatgagccaccgcacctggcctgtttctcagttttcttatcaacaaaatgggaacagtcatacctacctaatagggttgttgtgaagattaaatgtttggtactagagactgatgctcagatctcagttaagtgtttgctgctactgtttattattaaggtaggccttcacaaaatgatataatacctaatagcctaaaatccccatatctttctttctcattttttaggaaaagcaattttacaactaaattcataactgatagtattgaaataaaggatgatatgtgggaccaggcgtggtgactcacacctgtaatcccagcactctggtaggtcaaggcgggcggatcacttgaggttgggagtttgagaccagcctggccaatgtgttgaaaccccatctctattagaaatacaaaaattagttggcctggtggtaggtgcctgtaatcctaactacttgaaagactgaggcaggagaatcacttgaaccctgaggtggaggttgcagtgagccaagattgcgctactgcactccaacctgggcgacagagtgagactgtgtatcaaaaaagaaaaaagttaaaaaaaaaaaaaatgacatgtggaacatctagtaatttagatgtgctatcattgattacttttatttttgaaaacagatacggtctgagcagttgtctgtaaataattttttagttaatctacttagggattgggatgttgtataaactaggcagctattattttatatttcttttactacaaatgaataattggtgcattgatgagcttgtgttgcttggtttatttttggtggctaattaaacttataatctctaggtgacatttagacatgattcttcaacagtggaagttcaggatgaccayataaagggcccactaaaggtaattcatgtattcattgttaattctaatggttgtttgggaaaaaataatcatacttggtattaattcattggctcttttgttattgagttgataaattcaatatgtaattttctctaaaaagactaatagaaaaaatagacttaatctcagtgactaaggaggctgaggcaggaggatagcttgaggccaggagttcaaggttgcaataagttatgattgtgtacactgcacttggggacagcatgagatgctgtcttttaaaaaaaagatttaatattaaataatacttgatatggtagtaaaaccagtttattcagaaataaaatgagtatcaaagaagcattgactacatttatttacttaatccaccatatttccattactaaaatgatggattttccaaaattaatagatgatgaactagggattagtgatgtcagttccacgatgatctgaaaagtgagaaagttagaaaaccaaaaaaatcggagctcttacttctttggagccactactggcaaatgaaatcttttaagggtcatcagcctttacactaacagttggagagttttatttctttgcattcatttttcctcattggcaagtgaaataaatgctgctttgctttttgccagtgagcaagctaaaagagaatgtgtgggtaaaccactatgtgctctttggctggtttagggccaaaaggaaaccccagagcaatttttaaattgtccctatccttcctgaggttccttgaaagaagagtggaaatacggggcaaggacagtcagtttcacagatggtggtactcacggtgtagtctactgaccctgggggttcccaggattcttttggcgggggttgtaagggtaaaactttataatagtacttaggtattatttgccttttttactacattaacattttcactgatggtacaaaaatattgatcggtaaaactgctggcactttttttttttttttttgaggcagagtcttgctctgtcacccaggctggagtgcagtggcgcgatctcggctcactgcaacctccacctcccaggctcaagcaattctcctggctcagcctcccgagtagctgggattacaggcgcctgccaccacgcctgcccaatttttgtacttttggtagagacggggtttcaccatgttggccaggctggtctcgaactcctgacctcaagtgatccacctgcctcagcccctcaaagtgctgggattgcaggcgtgagccactgtgctcacgccaactgctggtacttttaaatgaagtcaatagtcattttattcttcaccatcatgcactcagttaaaagaaaacaaacccaggttttggtttgttaatttaccttttaaaagtttttctaacatgtttaaaaatactttaggtaggagctattgtggaagtgaagaatcttgatggtgcatatcaggaagctgttatcaataaactaacagatgcgagttggtacactgtaggtaagaaaataaattttcttttaaaaatgtgtttttagttacacaaagaaaacttaatacaaataaaatgaaatttcctggattcacttcttaataccctagatattattactgttactggattttatctttccacatcttttaaaaatttatttccaaagtatatgtatgtatatgtaacaaaaattgaaattatttaatgtgtatattatgcaattggaattctagctttttttacttcaaagtatatcttaggtaaatttctttttttccccaatcttacctatttttaagtttatagttcagtaatgttaaggatattcatgttgttttataatagaaatgtcttttaactgtgtatatatatatatatagagagagagagagagatatatatctatctatctatctatctatctatctatctatctatctatctatatagctcccagcaggaaacaaagtagtagtgtattttataatagttgatgtgctagtttattttttcttactgatgaggtttccagttttcttactattacaataaatgctggattgaatgtcttttttacctaattaggtacttaattaggatacctactgtatcctagtatttctttagtgtacatactgagaaatagaggttgaagaaaaatatactccaaaaactttagtagttaatgaaaactgccttcctaaaagacactgtctgttttctcaatccttgtcagattttatgtcatttaaaaaaattttttgctaatttggacataaagtagtatctcagttttgtttcagtatgcccttcccatgattactagtgagattgaacrtcttttcatatgtttattgaaaggaacataatttcatttgtgttttctccgttttgagttgctggctcttttattctttccctttttctcttgagatgatttatctttttcttattagttttggtatatgtgttctttatatattttggatattaactgtttactacttcagttataaatatatttctcctgttgctttattcttgtctctgcttttaattttcatgtagtcagtttttgtatggtcaccttttattttgtaattttagttttgaatcttaaagccttccatcagtgttataaatctattttctaatgtattcttcaaattttttatactttttwaatttatttttatttttgttytacaaayagatttttatttcacctacagtagtatgtattttttccaacattctaaaataatgattaaaaagtatttgtcctagattggtagccatttattccagtattatttattaaaggtaacaattcttaccatttaatgacctcagagatgaaagtaaacacctagtaaaatgtctttcgtgatttcagagtttgatagaactttcagatagaataggtgagttttgtttatacttctttggtgtgagaataaaacctggtgaaaatagagggaaaattatttgattttgagacataaggaaatatttgactttatgtaagtgagaagactgtgagcaattctatgtaggaagtctagatggtgattggttgtaatagtctactaaatgtgacacttatgttgtatattttagttacatcatttaaagatgtactgaaaattatttatccagtttcacataatgtaacttgttatgtaacgtataagaatctaattttagttcagccagtaaggaaagggtattggctttcttttaaccattaatcatttctcaataaacgtgagatcctgttgagcatcagaaaaagaaaaggaaagaagagtatctaattttagtaggtaggcagaaaatgtaatttctaaaatagagatctggtaacattatttaaaacagagttactgtcttcccatgatttctaaggaatgtagcatatccctaaattatttatgtatatcacagatttatgcatataatacaaatagtcatacattccatatctgttaacttatggtggttttgctggggtgctttaagtactttatttttattaaaatttttcccctactttattgagatataattgacaaaatcatataaatgtatatgtaacatgatgatttgataggcaaatatattgtgaagtaattactgcagccaagttgcttaacacttccatcaccttttaatagacattttagtattttaagtcgctagttttcaactgggatgaatttacccccagggaacatttggcaatgcctggagctggagacattttaggttgtcacagctgggaagggggtgctactgacatctagtgggtagaggccaggagtgctgctaaatatcctgcagtgcacaggacaagcctgccacaacagagaattttctggtgcagtatgtcactagtgacagtgctaagggtgagaaaccctactttaaataatgaaaatacagttatttttttaaaggggcagtctgattgcatatacttgtaatctttcttaggtaaatctgtcaatatctgtcagtaggaaaacttggcatttctttaccattttgagaagagttaattagcatttaaatgttttcctcttgaaataccaacttcttatttttatttggtatatcctgttttatacaagatgttttcatttcatatatgttgtttctttttcactagaaattggaaaagttactttaataactctatatttgaagttactcactagaaaacataaaatgtgaattgaattccaaatgtagtcttaaatagtagatctgtttgcactcagaaaattgtaatacatgtcatctctttgatctttgaaaaaatccttcagtagcttccatttttaccccctctcatagtttttgatgacggagatgagaagacactgagacgatcttcactgtgcctgaaaggagagaggcattttgctgaaagtgaagtaagtcatcatttaacaaatgaacatgtcttaatattttttattgggaggaataaatttttgctttctcaactcagtaaacctacttcctaatcaggaaagttcattaatacacaatacccttatgatgtaatctgtgaagcctgtttaaggccctgtgtttgagcaccaggttctgtcttcttttttgtctatgtaaagtgtttcagtatttgtccacagagaaaatacaatgggctttaattattatctttaggcagtttttaaacagacttaaaatttgtaaataactagaaaacagatttctgatttgtaatctacttgatccttgtcgtagttaaaggatgtgtagatacaacagtctttaactactgctactgctattagctgatattattatgccctttcctcttgcctgactgcccttcctaaaattgtcccttccattccttatcatcctttcagattgatttaggtcttattccctaacatcaaaatatgagtacataattatttattgtctgccttcctcactagaatgtgtcacacggtcagagactttgtatatcttcttcatggctttgttcctagttgctgtaacagtgcctgatgcagagtatgaacttcataagtgttagttggatgaatagatgaggtgcttataattgccagggattttgctaagtgctttacatacattattgtatttgcaacattatgaggtagttactattattatccccaactttcagattaggaaatggatagctagagctggttttctaaccagcactttctagcaccaaagccatatccttaaattgaaagatgttactaagagcagagggttcacaaagttttgtaactaactcgcttgcaattcagaatttaaaaggtagatgttgctctaaatggtgttacgttctctaatccagtctacagatattcattgatacacagtgtggccgagctatttcttttctctactcactatttggaatagtgtttctttggggatattttaatattactaattaatattacttatttgttattatttattactttaatattactttaatattacttatttagtagtgttattacttaaacactatttggaatagtgtttctttggggatattttaatattacttattaacctattagactttatgtttttgttttgaaaaatttttgcttctcttaatgattgaattcccacttaaatttagaatttggacaggttctctgtattataattccagcctatccctttagtctcatattcaaccacttccctgtacttctgccttattagactgcttggtattttcagactatggtccatactttcctttattgactcctttcctcttgttggaatctcacttatgttgaaggccattataaatgcttcctcctctatgtctttcgtgagctctctacccaaattggtcgttttgcacttctcttgcttattcttgttttaggacctttttttttttttaacttttctcatttttgctgtaagattttaagctgttttaggggaatatcctttctttcctcacttgataggccccccttttcctagcaatttctacacaaaagccttcaataaatatgtgtggaataaactgaaggtttacatacaataaatacagacagctttggggcaagtatagtgataaagtacagaattctccctgagttcgtggaattattttaatttcatttccgtacagtcagtgagtatgaggacttgaagacatggtttttctcctgttaagtgaaggtctgcattttatttttttagtctagagaaatagccaaaatattattttttttaaccaggagaattttcagttggaatggttcataagacagttgtaagttaaatgctgaaggtaatatgaacaagtggctatgtatccttcatatcttcaaggaggttcagttttagtgtgtctgtgcaggtgtgtacttctaatttatgttttgctagaaggaaattagaatactggtgtgtgattcttcaattcccttcccatgtgcccggagctgtgtagtgctaggtaccgggacaaaggttaagccaacccatgtaaacatggaacttatctttgggtacttactccctgttggaggagaaaaagcattaatcaaaccaagccatgtaaacatggaacttatccttggatacttactctccgttggaggagaaaaagcattaatcaaacaatcaaacatattttaaaatttgagtatattaagccctgtgaagatgtggtccagagtgcacccaataggggaatttaatctaccatctgtatgttcttttctctttatttggtatttttcatattgttttaaaagttttaacgtttttgaaagaccattcagagtattagtagtagtagtagtccataacattgtcctttaagaggaaagctgcttcatactgccagtattttgggtcactaatcccatttaataaactactgaaattaatcccatctcataaacactgaaattcaggattttcatggaaagagatcacatttgcacttcagtcagtttatctttttattttattttattattattattattattttttgagacggagtctcgctctgttgcccaggctggagtgcagtggtgcgatctcggctcactgcaagctccgcctcccaggttcacgccattctgctgcctcagcctcccgagtagctggaactacaggcacctgcccccacgcctggctaatttttttttttttttttttgagatggagtctctctctgtcgccaggctggactgcagtggcacgatctcggctcactgcaacctctgcctcccgtgttcaagtgattctcctgcctcagcctcctgagtagctgggactacagtcgtgtgccaccacgcccagctaatttttgtatttttagtagagacggggtttcaccatgttggccaggctgacctcgatctcttgacctcgtgatacgcccgcctcagcctcccaaagtgctgggattacaggtgtgagccaccgtgcccggccacgcccagctaatttttaaatatttgttagtagagacagggttttrctctgttagccagggtggtctcgatctcctgacctcatgatctgcctgccttggcctcccaaagtgctgagattacaggcttgagccaccacgcccagcctcagtcagtttaaattccaacactgaagccactggttttagccataaccagcttaatgagtatgttacctgctgcctaacatctgtaggacagtttaggtatttctaaagaccattcatactttgagtattatacaaaagtagattcatcatctgatatttatttatttatttatttttttgagacagagtcttgctctgtcgcccagactggagtacagcggcatgatcttggcttactgtaacctctgcctcccgggttcaagcgattctcgtgcctcagcctcttgagtatctgggactacaggcgtgcagcaccacgcctgactaatttttgtatttttggtagagatggggtttcgccatgttggccaggctggtcttgaactcctagcctcaagtgatccgcccaccttggcctcccaaagtgctgggattacaggcgtgagccaccgcgcccagccaattatctggtattctttctttgtatttactatgtgcaattgaaaactctagagaagtttaggtaaaatcccagttccatattttctgcagcccattttaggtaacagggccatagacattttccctctaggcctacggagttttctatgtgcctttaatacagctttcaggagcctctggtttttgctctttaggtctaagatgggacaaattctaccctacccccaggtytttttartcccttgaaacaaacatgcccctactttcctggacattgagatagggacagagatattgcttatgtttcttcttgttatgtactagggagagactgtggtctcttatttgaaaattactatgtgtgattcttaaacaactctttagaaattttctttcctgtagcaagtgaaatgactaacagatacttaaaatagaaatcacactgtgtgatataaatctctctctctcttttatttttctgctttaaagagagcaaccttaattttcggtggggagagcatacatttaatccatctgtttgcttgacagaaagtgaatccggattaatttattttccctgtttaccaaataaagtcatttagtaatactctatagtgatacagtattaccaaaataatatttcagattacatagaaattttcaccataggagttaatgacaggcaacgtctagattttccgggtgggtgtggtggctcatgcctgtaatcccagcagtttgggaggccgagttgggcagatggcttgagcccaggagttcgagaccagcctggacaacatggcaaaaccccatctctacaaaaaacaaaaattagctgggtgtgatagtgcacacctgtggtcctagctacttgggaggctgaggttggaggatcacttgagcccaggaggttgaggctgcagtgagcaatgatcatgccgccactgcactccagcctgaatgatagggtgacattctgtctcaataaaaatagtttctgtttggtatatactgagtttaggacagtttttgcctccaaataatttttatttttattttttgagatggaatttcgctcttgttgcacaggctggagtgcaatggtgtaatcttggctcaccgcaacctctgcctgccgggttcaagcgattctcctgcctcagcctcccgagtagctgggattacaggcacccaccaccatgccaggctaattttgtatttttagtagagacggggtttctccatgttggtcaggctggtctccaactcccgatctcaggtattccacctgcctcggcctcccaaagtgctgggattataggcgtgagtcactgcacccggcccaaataatattttttaaatgcctgatttaaggttcattaggacagggttaggttctgtacaaactaaatttgaaagattagattttttgccctatgagagttgtgaaagctatgatttttgtcagtcttttgaaggaatcaatctttagttaatcctttatggctagtaccttttttcttgatcatactgttcgttgttagatacatacatctatgtaccttaaacacatttacatatattctaatgaattatgtaaaaaagtgttaatatggttcatcttttcacagttttgttcattgtagttataacaaaattgtctcaattttaaaaaagttatataacatttctttttacatattacattagtttagatgcctgctctttaattctaagttcatggatactctttcttataccaccctggtttgtatctttaagaagtctctgtcttaaatagttcctcacttttattttcatctgggcagttttcttggaaatctctagttgctctgatgtttgtgaaattatttataacaggaaagattcttcttaggatgaggaaaggaacagaaactgtggaaaatcttaagaaaacgtaggaaaggaaaaaaatcaaatgtagaaattaaatgtaatttaaaaaattaaattaatgttacattttattaaaaaaggtttattgcagaaaatgtttgcagagtagtaatataacttactccgaggctttttgttcgtgcgattgatgctttatcttcataattaattttgtttcttattaataattttattttatggattatgattccccatgtacaaattaatattggagctgcagttggccctaaccttacaaatagatttcttaattctcacatttgtctttccactgagctgtgtttgttttgtattttaatcattcttagatgcctatcaaccttcacataggtaatgaatcatctagagagagcagccaaatttcttttcactttttttttcyagtaatgagctcattcatctttattctaatatctttgaaactagaattttctatctttaggaaagctgtgttttagcttccctggggggagagtttaatmtcaaaatctgagcatattcttaaattgatttggtttaaaacaaagaaggcacttgcaaagtgttaattttttgatgggtttatgttcttacccacagacattagaccagctcccactcaccaaccctgagcattttggcactccagtcataggaaagaaaacaaatagaggaagaagatctaatcatatgtaagtccattttcatgactgttagttgaacctgaattcatttctccttctagtattgtttatagttattttaaaattgtaatttgcaaaatgctaaccagatctaatagtaatttcggatctaatagtaatttcagactcctcagcatgggtgattgaggttctccatgctcagccaaccttacttaacagctgtatytgccttcaatttctccctgcatgttatcttgatgctgtagtcaaaatgaaaccagtcaataattcctgaatacatcgcttgttttctaatatcatgcttttattcatgctattatttttggtctccatgcctcccttcctggtaactgtcttgtccatgccttaattctcaacaaaaatgcttaaacctttatgtgaaccattttgtgtctccccacactttccttgaaaccagagatgtttctctcccctgtaaacccaattctctggcatagtatgaactgtggagccagttggtctgggtttgaatcctggctctgccacttccttgctgtgtgatcttgggatggttacttaatcttttcatacctcacttcctatctataaaatttggataataatattacctatctcttagtgttgttgtgaaaattaagtgaattcatatcctttaagtgtttatagagtaaatgttacataagtactagataatcaacatcatatactgacatgaaaaatttcatgatgaaataccagtatgtaacagtttcatttatatatgaaaatgtgtttacatgtatatataaaaattctgcttcctggtgtttatgtctgacaattaggactggttcttgctgaattattcgaactttaaaaaatttctacgtttttatatatattataggaaaaatagtctcttatttgtcaataagtttttttaatttttagaagattgcatctagtatttagacatatttttacgattttatacacatcatcctaaagtgtaaaaataaatttaaaaatgaatttattgtgcaatatcacgtaatattgacctgcaaatgtgactaaaaattatgatctgttaaaaagtcagttattttttatttcctcttctgtcgttccccaactgttagatgtttcttagttgaggcgtccgttttgtgaatatgagaataaagcacgcatttgttgctgaataagttgatctttgctttctaaagactccagcaaacattctaagttagtggttttcctgttgagaatctctatgtgtaatgagagatttgctgttgagattgtgttatacatgtgtaaagtatgaatgcagacaaaaggttgargattactagtgtaggaatgaagacctgctccatctgtaatcttgttttgcttgctcttccttgcccttctctaccacggttggtcattctcactgccaaggaacctgacaatgttactcttgcttggcgttttaagccttggtgtgtaagcattacaggcaagtactacagtttgaaatgcccatctccttgattacatttcctcaaagttctttctcccctttcttcaaagtgattttctgcaacaaagtcttaaacctagatcttaagggcattcatctgaccttcatttcctcttccattactccattgaaaaaagtctttgctgtgatctcagattgccatttaaaatgtatttttgtacaaagatatgtaaagttatctcttcttaggattcccaggacttcgttgttggagtgatgtatcaccaaatttgttttcttttagcagctgttattccacgtatcagttaatctacccctagttattccaaaattgattacttttaacatcttccattaaattgagtttcagtatattctacctttaatcctagtaagttcaagtattttctttttttaatgattatcatcctctagctaaattttttttaaagcaagttattgattcttttaatcaatgtattactggattgaattttctccttataacttacccattgtttgcagcgattgtgtttaagtcatccagaagaatagaatacctgaaattatggaaatacttgtttgtccctctcctcttgaagttgttttcccataatctggcaaaagtttatgtgcaactgctacaataggaaagcagtctatttgctgttatatttttccccttcagaaaaaagataaagcataaggtttacaatgaatcttgttaacaagggattatttatgagtatggattttacccagtaacagtgctaagatttacccaatacctggtttatacttgctatttaaatacaggcctgcagatctgaacacatttttaaattagtgtataattcatgtatcataaaatttactcatatattttaatctgtagatttgtatccaatacttcacccttttaaagtgtacagtttagtggtttttagtatattcataaaattgtgtaactatcatcactaattccagaagatctttttattttgccgctttattttaatatgagaatttgattcatttcctccttgataaaaattgagaaaaaaattaaaacccttttatagttaagcgtacataggttctgtgtgtttctaagaaggtatgtatacgttgtcagtcttccagatactaatagaacatttcaatttacaaagtttgaaactgagtaaactgatttgcctaaaataaaaaataatcagaattgcatgtcaaaggttgagcctcttgtttctagctcaatttgtatcattatttggtattccttggcccatatcttgtctaaagttcgtctttcttgatttacaactaattagagttaatagtgaagtgtgatcagctttaagtgattggctgttagagtattatggtaaaaatttccgtgtaattagctttctttctagtgacatcatcagattttatttcatagagacagcgcattattttgttgtggctctacaaataccttgccaccaaagaaataacaatgtcagaaatgaataaaaatcaagcaggctctctgcttgctctgtctttgctcctgtaaaatattttggatgctcattaattttagttcattagtttattgagtacctgtgtaaacagttttctggctaagctcctctaaaaggaaaagttaaggagcttcatgtgtaatagtatggtttacactgatgtatacattttgtgattttagaataaaaatcagaaataccataataaaaaaataaatgcatcttttttattttatgaacaagtatttatttagcatctatactgtgccaagcattgttcaggtacttgagatatatcaataaacaaaaaaaaattacttaaaaaatcttcaacttgagagcttacattctctcaggggaggagatagcgaattaaacattggattcacatacttggtgtgaaaaaaaagaataaacataagaaataagtaaattatatagtatgataaaagtgaatgctgtggaaatgaagagcaaaatgaaaagaggtagatgggcagggactgtaaatttgaataaggtggaacaaagtcttgagtaggtgagggggaaggggcatctagtctaaaaatggagatgattttagacaggaaccttgcaattttatatgtaaggtggatagatgtttcagctagctgaacaaaggtgttttgtttttctttttgatatactgtgaaatctgaagtcttaacacttgttaagtcttaagaaaagttacaatttttacaatgatgcagataattttgttagtcaaataaagcccaattttctctatgttgtacagattttgatatgtgttatctctgacattgtagctttctagctgctactgataatagagtgttcataaacccctagctgaatgagtcttctgtggctactttgagaaagcagtaattatgattttaagcttggttgtatcctgtagtcattagacagtaaaaaaagtcactactcttaagctcttgtaaatcaagtagaaatcagacttgtgaggactgtcgttactgtcccaagctgtgtgtctatgtgtagggtcttattctccactaatgtaaaggtrgttgagttttcttattgttacctactttctaagtagagattgaacttctttaagtgccattgaagtacaatacatcttttttttttttttgagacggagtctcactctgtcgcccaggctggagtgcagtggtgcgatatcggctcactgcaacctccgcctcccgggttcaggcaattctcctgcctcagcctccagagtagctgggattacaggcacccgccaccatgcctggctaatttttgtatttttagtagagacgaggtttcaccattttggccaggctggtctcgaactcctgacctcaggtgatccacctgccttcgcctcccaaagtgctgggagtacaatacttccagccaaagtacagtacttctattcaatagcaagctttgaagatttgctttgtttctgccagggaacaatttttaagttatttgactgatcattgaaatcaagggggtggtattccccatgtcactttaaaaagcttaatattattataatagtttttacttttttggccaggtggggtggctcacgcctataatcccagcactttgggaggcgaggtgggcggatcacgaggtcaggagatcgagactatcctggctaacatggtgaaaccccttctctaccaaaaatacaaaaattagctgggcgtggtggcaggcacctgtaatcccagctactcaggaggctgaggcaggagaattgcttgaacccaggaggcggagcttgcagtgagccaaggtggtgccactgcactccagcccggcaacagagctagactccgcctcaaaaaagaaaaaaatagttttcactttgtttacatttatattggaatatataaatataaaggcatgacggttactttgtcatacttttggaaaggcatcaaagacaacttcagagtatactagatagtatactaaataggtaaatcatgtttaaagttttttagtagtttaatctgtcagttttccttttttgggcagtgaaactgatcattgcaaactatctgaaaaacacttttatctttgtaggtattcaataatagccattctaaaaaggacatatgttgttgtccatcaaacatttcctagtctttactcattctgggcattttctttggtgctgattctttattagaatcagattcaaattggaatagctttttgttttgttttcctttttactacactttcctcaaacatcaagttgatggtttcagatacttcctttttcttctgacagttatctttctaatttactagtccaatatttaatgttactgaaaggattttctgtttttcttttaattttgaaagtttttagcatcatacaaaagaggcttattggacattttatgaatacctaattggtgtgtatttgttgttatggatagcagtggtgatctcttttcagattgcctcctcttcccaacctaacctcagttaataaaggtctgctctcctaccttttaaaattaactttgtactggagatatagaattactgtctccagaattcctttaatttgagattgggattgtgtatattttagtgtaatactgggatgtttaatatggggccttcacctttttgaggatttgggaaccagttatttgtcctgatcttcctcctcaattttttacagtagcactaaataaaccagaaatatttttgggaaaatgatgtgctttcctctcatgataaactcttgctgttattttttagaaatttagaaaatgatttaagatttaaattagccattttacaggtcttaggaaatgtaataagagtttgggaatacctatattcatcattggcatgcttattctttgtgaggataaatggaaatattttatttttttctctccctagaccagaggaagagtcttcatcatcctccagtgatgaagatgaggatgataggaaacagattgatgagctactaggcaaagttgtatgtgtagattacattagtttggataaaaagaaagcactgtggtttcctgcattggtgagtagcttcagtatacaagagtttaatttmaaactttataagtttatgaagaaaacaattttcttactaatgtttttcataggtacaaaatgaggaaatgtttttagcattatttagttcacactaagcttactttcaacgttgtctttgaatacaaagaactcttgatgtcattcaggaaaggcaaaatcttgataatcttagaggtttagctatgtggaagttgaattctctctctctcggtagaaaattcatgatgcaaacttttaaagctcctaagtccatgtaggtctagattgcaaaagaacaacagaatctttcttggttgacagggataactagaccttttcctcatacttagtgaatcagggtgtttccatccttgatcttaatcttgccttttaggtactccctatataatcatgactgcaattatacattaccccactcttcaattttctctacagtagattgttaattctacctactttttaatgtttttctctccaaaagattgcaattccttagattccaggttgaatattttgcattttttccttgttttctcacgttgcctttttgtgattctgaggaggtactcaagatttattatcaggagtatcctcatgattgtcccaagttcttgtatttcaaactgttaagacatgacagaaagccttttgagctttttatctctctgtttttcgtaaccactagcttctttagcaagttgaaagggccatgtatagaccattttctttgacttttagaaagggaacatatactaatatctttcacggacataactaggctgcttttcaaataatcttttggtagacaaaataatttgtagctcttaaagcaaatagaggttcaactaataattagctatatatgatactttaatgaagatttaactctgtggcaataagaatgcatttttttctggacagcatataattggataaatcacttaaggttttaaatttcaagtaggagactgaagttaataatcagtatctcttaagaattatcttggctggggtgtggtggctcacacctgtaatcctagcactttgggaggccgaggtgggcaaatcccctgaggtcaggagttcgagaccagcctggccaacagggcaaaaccccgtctctactaaaaatacaaaaaaattagctggctgtggtggcacatgcctgtaatcccagctaggcaggagaatagcttgaacccaggaggcggaggttgcagtgagccaagatcgcgccactgcactccagtgtgggcgacagagcaagattccctctcaaaaaaaaaaaaagaagaaaaaaaaagaattatcttgaactctttaaaattttgatatgtctgaattgtcctatgatgattttayctgaagaccattgagtcatttgcatcaaacagtgagatccactttttttttttttycccggagacagaggcttactccgttacccaggttagagtgyagtggtgtgatcctgactcgctgcagccttgacctcctgggctcaacaattctcccacctcagcctcctgagtagctcacactacaggtggagaccaccacatctggctaatttttaaatactttgtaaatacgaggtctccctatgctgcccaggctagtcttaaactcctggattcaagtgaccttcccaccttggcttcccagagtgctgggattacaggtgggggctactgagcccagcccacatcttttacaaatatgtcctcccctcacttcatatttaataagctataaactgaagatccgctgataaacaaaagacactttgaaagtactattctcacgtttgacaactaatttgttctcaaatatcgagagacagaatgggtcaaaattattctctgtctctgttttgtatgttctcactcccttactaaaaataattagccaaattctcctctaatgcttttttcccttatgttaatgacattcaataaaatttttgtgttctcaagattaacacatatttgttaggtatgcatttatcatataccaagttctgttcaaaatatttaacaaagatagactcatttagtggtgtagaggttttttgttctcatgattaataaactttccttttttcttttcttttcttttcttttttttttttttgagatggagtttcgcccttgttgcccaggctggagtgcaatggtgcgatctcggctcactgcaactccgcctcccaggttcaagtgatcctcctgcctcagcctcccgagtagctgttatgacaagccaccatgcccggctaattttgtatttttagtagagacagcgtttctccatgtcggtcaggctggtctccaactcctgacctcaggtgatctgcccgcctcagcctcccaaaatgttgggattacaggcatgagccagcacacccggtgatgattaataaacttttctctacaatttgtgcttgagaatctgctaactctttattctcattctctcattttcctgctcattgactaacaattgcagagacttagaaatgggattaaaacactgtcctttgtttatatgtatttgtatgaaaacttatgtccataatatatataaactcttttgtatatttgtggtttttgtgctaaactaggtaaccatggtctcaaatgaaaaagaaacaatagaactacctttgtttttactgttttctacttgtgatgtccatttaccctttttagtcaacatgtcttatttctttatctccactgcttagttcagtgttcggcacaaattaaatatgcagtaaatgtcagctcttgtaatgatagtgaaaaatgaggacaattatttgttttaataaatataaatattttataatacctttgtaccttcctgtgtatccaacatttagtggatacctatatgtacaaggagtgtgctaacacctattatgagataggtattattatttatcccgatgtagagataaggaaactgagtattagcagggttaagttagttgccacactttgggttaattattaagctgaaaaaaagcatcagtgtttgcgattctttctttctttctaaagcactaggagtctttgtgagtttcttttgaaagtatgttttaaggccagctgcagtggctcacacctgcagtcccagcactttgggaggccgaggcaggcggatcacctgaggtcaggagttcaagaccagcctggccaacatagtgaaaccccttctgtactaaaaatggaaaaatttgcaggacatggtggtgcgtgcttatagtcccagctactcgggaggctgaggcaggagaatcgcttgaacctgggaggcggaggctgcagtgatctgagatcacaccactgcattccagcctgggtgacagagcaagacttttatctcaaaaaaaaaaaaaaaaaaaaaaaaaatatatatatatatatatatatatacacatatatatawatatatatatatattttataaaaccgttttgtgggccaggcgcggcggctcacacctgtaatcccagcactttgggaggccgaggtgggcagatcacttgaggtcaggagttcaagaccagcctggccaacatggtgaaaccctatctttactaaaatacaaaaattagccgagcatggtggcgggagcctataatcccagctacttgggaggctgaggcaggagaattgcttgaacacgggaggtggaggttgcagtgagctgagaccgtgccacagcactccagcctgagtgacagagcaagaccccatctcaaacacacacacacacacacacacaactgttttgtaagtctttttctcaataggaacattaaattttttaatattagtgttttgagttattaatttaagcttctcacaccataatcactaaaaagtttctttgacgaaaatgaaaaatctaaggatttttaatattgaaaggttagtaatctgtttagtcagccatttcactgttgtttttaaattcttagaattattgatgtatgttatctcctcccaaaattgagatccattggacggtgatggatagtttttggtaactagagtgaaaaattatgttctaaatcgaccaatcttgatataatcgcacaaatagtatttgtgtttctaatttatgttatttttataaatcgagtaaattcaaagtgttttagtaacatcataagaaaacagttaactgggtctgggtggcctgtgcctgtagtcccagctacttgggagactgaggtgggaggatcgattgaaccctgrgaggttgaggctgcattgagtcgtgatcacgccactgcacagagtgagaccttgtctcaaaaaaaaaaaaagaaaaagaaaaaggaaacaactacatagtcccaggaactataaataactaccatgcactgagtatttaccctgactaggactgtgctgagcttattaatataagtagtattgtttaatcctaattgagacttactctcagtctcaattttttattttccaatttcattttaagagggggaaatcttagattccatggctcatgcagttctccttttcagtttttttcaccaggttctcctcttctaatcacsctttcaagctgtaattcaggattcagaatgtatcgctgtattttctttacggtgatctcatctccttttaaagcttcaccttgcagagatagcaaagagataaagtgaccaagaaaataacatacatgggtgaatgggataaaatgcatattgtcgttctgtggcagaactggacagtgagcccacttactcatacrccagtgtcatcactggccaaagctatcacatgtgcagttttcgaaatccttcgctcatcagggaaaagtaatgagtggatttggctcacaagccccaagttttagacccctaatatttaggctgtgggctctcaaatttatatccttgagtccagacctctacgctttgctccagacctgatttttctgttcactgtcttcatttggatgtcttttagccacctaaaacttagtagtcccaaaactcctcttattatcccttccctcatgcacaaacttggcccttttttgttgtttttctttcacagtgaataactctgtcatctgcctatttgtacaaggcagaaaactaagcatcctcttattgttcatctttctacttccctaattatcttggatatttctcattcctttaatttgccattgccaccactttacatccaagccaccacctctcactcaggtgatcacagtagcttagtttctttgaacagttgcctctgcgtggtccattttcttcatagcagccaaagtagatttttaaaaggaaaatctattatgacattctttggtttcagattctttcaacaaagatgttagattttatcctaagaattaatatggcctacaaggctctggaaattctggacccttgtttttttcttagccatgatgtatcccttcagttaaggatctaactctaccttttttctgtttctgactagaacttcgtccacagcttcatcctagtcatagctgtgcttctgctttcaatgccttgcctatgccaaaaattctagattatccagcagctggaaggatgtaggatgccaatttaaaattgcttgtgtgtgctcccacgtgtgtgtgtkcctgtttaccctcaaactaaaattagtttttaaacttcaagcttacactttttaaaagratttaaatggtgggtacttacctatctatgagttcttttagttataatagcttcaccctttttcttaaaaggtggtttgtcctgattgtagtgatgagattgctgtaaaaaaggacaatattcttgttcgatctttcaaagatggaaaattgtaagtataatttacttggtttgaaaaaccagtttataaatatatgctgttattttgaattaggatgttaaatgattaattagttatttccaattaccttaggcttttatttttcatcatacagaatgtttcaaagagtcactgtttttcatattatcttaatgtgttgtagtcttatagtatgtttttccttactaattttggtaatcttttccaaactagacactcagtactgtctaatttgtcaacayttgtccacataatagctggttatttgaggcaaatttgccatatctaatgtatttaatactttattgatttttttgttttttttgagacggagtctcactctgtcacccaggctggagtgcagtggtgcagtttcggctcactgcaacctctgcctcctgggttcaagctattctcctgcctcagcctcctgagtagctgggactataggygcatgccaccgcacccagctaatttttatatttttaatagagacggggattcactgtgttgtccaggctggtctcgaactcctgatctcgtgatctgcccgcctcgaaccccaaagtgctgggattataggcgtgagccatcgcgcccggcctattgatgtatttattgacattatttccttagggtttgttcttgatggtctaattaggaatttccaatacttctactagttatgtctaatggttatagtgatacctgttggataatactcaacttttgcagtagtctgaggattaaaatgggttacttgtatatggatggtaagtgttaagaaaatgatttgttaatttttctttaagaattatatgactagagaagccagatattttatacagaattgtattgggtataaataccttaaaaaggtcatcatgttttaagatttgatgtttgaattttcaagttcgggaaaggtatttttatttttaattattttattttactttatttcatttttttggtgagggtctcactctttcacccaggctggagtgcagtgacatgatcatggctcactgcagccatgaccctttgggctcaggttatcctttcacctcaatttctcttgagtagctgggactacacctggctatttttgtattttttgtagtgataaggtttcaccatgttggccaggctggtctcgaactcctcagctcaagcgatccaaatgccctggcctcccaaaatgctgagattacaggcgtgagcctctgcacccagtctgaaaagttagcttcaaaaacagtatgtaggctgggcgcggtggctcacgcctgtaatcccagcactttgggaggcctaggcaggtgggatcatgaggtcaggagtgcaagaccagcctggctaacatggcaaaactccgtctctactaaaaatacaaaaattagccaggcatggtggtgggcgcctgtaattccagctactagggaggctgaggcaggagaatcgcttgaacctgggagatggagggtgccgtgagcagaaataatgccattgcactccagcctgggtgacaacaacaagattccatctcaaaacaaaacaaaacaaaacaaaaaaaaatgtagaaccaactttaacaaaattgggataatcagaggaatttgagcacagaaattgaatattgacttaatattaaattgttggggggtaaggaaaatgggaaaacgttagtaaaacggcacaaacttttattggtaagatgaataaaatgtacaggatctgatgtacagtgtggtaactagtattctggcagcctcccaagtagctagcactacagrtgtgtgccaccacgctcggcaaatttttgtagggttttttttttttgccatgttgcccaggctggtcttgaactcctgagttcaagtgatctgcccactttggcccccaaagtgttgggattacagttgtcagccactgtgtccaacctttatttatttatttattttattttatttacttttttttgagatggagtttcactcttgttgcccaggctggagtgcaatggcgcaatctcagctcactgcaacctccgcctcccaggttcaagcgattctcctgcctcagcctctcgagtagctgggactacaggcatgcaccaccacacccagctaatttttatatttttaatagagatggggtttcaccatgttggtcaggctggtcttgaactcctgaccccaggtgatccactcgcctcagcttcccaaagtgctgggattacagttgtgaaccactgcactcagctcaacctttattttttaagagatgggatcttgctctgttgcctacgctagagtgcagtggcacgatcatagctcactgtaaccctgccctgggttttttccagtcagctccctgcctcagactcccaagtagctgggactacaggcacatgccaccactcctggctaattctttgcttacttttttagtttgtctgtggagactgggtctcgctatattacctatcctggtcttgaactttggcatgaagcagtcctcccaccttgacctcccaaagtgttgggattacaggcatgaatcaccatggctggccccaaacattttatcattatattgccataaatcgtttttggccgggtgtggtggctcatgcctataatcccagtactttgggagactgaggtgggtggatcagttgaggttaggagttcaagaccaacctgtccaacatggtgaaaccctgtctctactaaaaatacaaaaattagccgggtggtagtggcatgtgcctgtaatcccagctactcgggaggttgaggcagaagaatcgcttgagcctgggaggtagaggttgtggtgagccaagattgtgccactgcactccagtctggatgacagagtgagaccctgtctcaaaaacaaaacaaaacaaaacaaaaaaagttttcagtgttgcatttgggcaggggactctggtatttgggaacacgttggtgtttataaaatagctcttatggtaggatccttctgtagatgattacgtattttaacatcctgtmttgtatgttatttctgacttgctactctgtgtgcaatcacttttattgtaaacgtcaacattcccatattttcagtatctttctgtgatatgtaatcatctggattcttaattaatctcagtcatattttgggktttttttcttctcttataattaaaaaaaatatatagtacttcagttccaagaaaagatgtccatgaaattactagtgacactgcaccaaagcctgatgctgttttaaagcaaggtaaggataatcttggaataaattacaagtactgtaaaaactgctaaagtgtttttgaagattaaatttttctttgctctttaaaatttttctttaaattatgtttttatggttatatttggttccttgtgacctttatttttataaacccatgtgtcttctgtgttataagtttccttttcttttttttttttggagacagagtcttgctctgtcgcccagggtggagtggcgcaatctcggctcactgcaacctctgcctcctgggttcaagcaattctcttgcctcagcctcccgagtaactgggactacaggcacacgccgccatgcccggctaattttttgttattttaatagagctggggtttcaccgtgttgcccaggccggtctcgaactcctgagctcaggcagtccacctgcctcagcctcccgaagtgctaggattacaggtgtgagccactgtgcccaaccataggtttcctttttttttctgttttttttttttttttttttagcttatagtcaggcataataatctagaataatgggagagaactgtgtagtcagctgttactataatctagcttttgcctggtaaataaaatattagtttctgggaatggtagaagaaaggaatcaaagtaactttgtgttgttgttttttttgttttgttttgttttgttttgtttttttgagatggagtcttgctctgtcgcccaggttgcagtgcagtggtacaatctcggtgcaccctccacctcccgggttcaagcgattgtcctgcctcagtctcccaagtagctgggactataggggcccaccactatgcccggctaatttttgtgtttttagtagagacagagtttcaccattgaccaggctggtatcaaactcctgagctcaggcagtccacccgccttggcctcccaagtgctgggattacaggcataagccatcacgcctgactgaggaatcaaagtaattttggtttggtatttctcactaatgaatgtacatccttaaccacaaggctccagtagttttatttgaggaatatgtggtaattgcatctgtcacttgatttttggcactgtaaatagttgtcttctctttgcccttattccttgaattcagtaatatgctatgtagattggttaaaatcatcaagattttttggtatataatttattcccatatattataaaatgagaataattgtgtctagctaattttagttgaaggtaattgttaccatagttttaattgaagttcaactgaaaatgtaaaaatcatgtgtggtcagttttcaggtattgtatatttattttaatggctctgtgcctggtattaatactgtttgataattgtttgttgcataagatattacatgatttcctgtattaaaggtttttactagtgaagcttaatctttgtttaaaagaataaaactgctgttcttttatttatttaaacttaagtaatcttccaatggtggcagttttgccatctataaaatgactacctaatgcataggatggataggattaaatatattgctacatttaaaagcacttaacacagtttctggtacatagcaaacaataaatgtcagtggtattagcacagtagtttttatttctttatcgtgtttaatactttttgagaaaacaattgtcttaatttcttcagttcatgtaccttgtggtctgtttccagcctttgaacaggcacttgaatttcacaaaagtagaactattcctgctaactggaagactgaattgaaagaagatagctctagcagtgaagcagaggaagaagaggaggaggaagatgatgaaaaagaaaaggaggataatagcagtgaagaagargtaagtgaaaacagttgataycttttaaaattataaataacagttgggtttcccttgtgggttaggatttggcattaagtcattactcatataagtatttttagtatgagaaatatttcataatcttgtatttgagatcctcataatcagatagtttacttggttactttagatatatgatcttgtgaaatagaaaatattaagcctgattttcctaataacctcaaaaacatgtcttagtcttcctatgctttttttaatgagatgattaagaaagtatccaccaggctgggcgcagtggctcaggcctgtaatcccagcactttgggaggccaaggcaggcggatcacgaggtcaggagatcgagaccatcctggctaacacagcgaaaccccgtctttactaaaaatacaaaaaattagccgggggtggtggtgggcacctgtagtcccagctactcggtaggctgaggcaggagaatggcatgaaaccgagagacggagcttgcagtgagccaagatcgcgccactgcactccagcctgggcgacagagcgagactctgtctcaaaaaaaaaaaaaaaacgagaacaaaaacaaaaaaacttaccatctaggccaggcacggtgactcacgaccataatcgtagcactttgggagggcaaggcaggtggctaacttgaactcaggagtttgagaccagactgggcaacatggtgaaaccccatctcaacaaaaataaaaataaaaataattagcagggcatgtcagtgcactccagccccagtgcactcagtagccccagctactgaggaggctgtgttgggaggacggcctgagccctggaggtggaggttgcaatgagccgtgaatttaccactgccctacatcctgggtgacagagtgagaccctgtcttattaaaaaaaaaaaaaaaaaaaaaaaaaagaacctacctacctaattctttaaaatgcttttcattaccatgttgacagctgtcacctcatgaaatgcttacatctccatattttattgattaacccagaaaagtataaaatacatctttcatttaatatttaaaagaaaaatcaggccgggtrctgtggctcatgctgggatgactaatcctagcactctgtgaggccgaggcgggcagatcatgagatcaggagttcgaggccagcttggctaacatggtgaaaccccgtctcttactaaaaatacaaaataattagccaggtgtggtggtggacacctgtaatcccagctactcgggaggctaaggcagtagaattgcttgaacccgggaggcggagcttgcagtgagctgagattgcgccattgttctccagcccgggtgacagtaggagaccccgtctcaaaaaaaaaaaaaaaaaaaatagcagaaaagtaaagatcaatatctctttgattcagagaatcttgaatcattttatctaagacaaatgggtagatagttctgattagatcataaataagccataaaatatggctcaaagagctcaaattttggattttattttacctggagctttagatctggcagtgacaaggtactctttaatggtttgctgaacagcctcgtaaaagttaatgagtggtgcagatagtgaaggctgctatatttgaccatgaaatgaaatgtatttaatgtgtttagtaaattaattggtcagtatgtaatactttaggtaagttatgaaattctgccttttaactgtagtaaagtattaatgaaatgagattgttttggaggttatattttagggtgtagtgatctgtaatgacaatgtataatgtagaaatttccctgcttcagtcttctccctgactgctttctatttaaattgctaaaatcagcaatcattcccttgctgctaaaaacctcctgagtagctttttgtcactgtaaaagttaagctttcatatagaatctcctttatagtccaattcctgcctcaattttttctcatcatttccctttctgtgtcctcccccttgaactttatgctatagcaatgtcaaattacatatgttgctgctactcacctttgcatatgctagtacctctgtaggcaccaccttttcctcccctccttccttagtcagcatggtacattcctgttcarttttcagaaccctacttaggtgccatctctctaaagagaaacctgtgaaccatcacctccctcacctcaggaaagcaccagttcatttgctagtctaaactactactgctcctggcaggcacggtgggtcatgcctgtaatcccagcactttgggaagctgacgctagcggatcacctgaggtcaggagtttgagaccagtctggccaacatggtgaaaccccgtctgtactaaaaatacaaaaattagctgggtgtggctgggcgcggtggctcacgcctgtaatcccagcactttgggaggccaaggcaggcagatcacctgaggtcaggagatcgagaccatcctggctaacatggtgaaaccctgtctctactaaaaacaccaaaaaattagctgggcatggtggtggacgcctgtagtcccagctactcaggaggctgaggcaggagaatggtgtcaacccgggaggcggagcttgcagtgagccgagatcacgccactgcactccagcctgggtgacagagccagactccatctaaaaaaaaaaaaattagctgggcgtggtggcaggtgcctgttatcccagctactagggaggctgaggcagcaggattgcttgaacccaggaagcggaggttgcagtgagccgagatgacaccactgcactccagcctgggcgacagagcaagactctgtctcaaaaacaagacaaaacaaaaaaagaattactactgctccttatacatatttttgtcatttatatttattgtctattttttcttccccacgaatttgtaagttccttaaagttaggaatgctgtcttactcgtattcatacttaaaatgtctgtcatagtgtgtaaaatataacagatgataaatagctaccaaaccttttggtgcttagtgttttcacaagtgtttttgtaaaagcaaatctgtagtgtagtgtaaacattttcttgagttaaaagcttaccttaaatgtttttggaataggaaaaattgtgctgtttattaaagttaaatattgtaccrtgggaacatttaagataacatctagaaaatagatgtccttagatttgtatttgatcaccttaccaaaacctgaatgtatggagtgtgtttaaattgagaaatacagattcatcattagcarattaatggttgtcatttatttttctctgcccaattagaaaacctaatagttgatcaacataggctttaaaaaaaaaattacctttctttgttgtactagcttttaaattaaaaagacaatctcgctaaagcagtggcattaggcacatgattttccaaattgaaaaatgctatgtttttatttatttagattaccagttgaatatcctaacttttactgttacaaatctgtatatttaagccagagtaactgtaaagcctagctgtatatttggaatcattttctctgcagttactcctaatcatgttctgtaacagtaggctccatagcctattttttcttttatttgattcagcacctggcatagtacctacacttacaggtgctcaagtgtttgttgaatggatgaaagtcattgaattggtgagttcctcaatcttaacctactaccctgctccttgcaggttgcttcaggaccagctccctgctgccacagcccttggccacagcagcaagaagctagtccttcccttgtaattgataaattggggaactattttattacttgaagatttccctaagtctgaatcttcaggtattgtagatcaaatttgttccccactttactgattatgtaagcttgaagtatatacagtggggctgcataaaatgaaggatacttgcagtcagctaatgggacccatacttttatagtaccttgaggagcaataatagaattagttttgatgtttaactctgatccagtttcgcataagttgagagtaggtattcttgaacctgtgatcctgatttgaaaaatagctctctcatatggtaaaaaaacaaaacaaaacaaaaccacgaacagtcttgctagtcccttttctcatatgggaatttttactgtggggattctaactattgggatactttttaaggcatattcctctataaaacataaaatgtctagacttacctggttttgaacagcttagtgttaaaagagtaactttgattacgtaaaaagcctttgaagtattttaatgaacactagtctttgctattggtaagaaatctgcttgttttattaaaatgcttaattgaagaaaataatattcttctgtgattaaaattaggaagaaatagaaccatttccagaagaaagggagaactttcttcagcaattgtacaaatttatggaagatagaggtgagtattttttatttatcattaacgtggtaagttttggacagataattagtatcttaaaaataagaatagaattttgtttactgaactttatgtcatcagtaattatggctgtctttttgactctgatatcaccagcacctagcatagcgcctgtcacgtaacaagtagaatgaggaatttgatagcattttgacagatattgtggctatggacacataaatgcacttattaccctgtcctgccaatccctttacctatccatgggtccctaaagaacagtagcaaaatgggaattaagccagaaatagataaagaagtgtgacaaagtctcaaaagtgagccttggctcagcttatttaatctgccagaagctgctaaggccacggaaggattgaaggaagaagaataacttagggtaatgaactaatccttccgtaacctcaacactgttattctctagcttatcttcttggtcagagtctactttcttcttttctgggaagatgcttgtaagggagtaaggagaggctttctagctggaagggaagggcaaaatgaatgattagtgtttggaaacaccacaatactctgggaattgaacgttttctaaatccctgattgtaatgctgatgagtagaaactgactctgtttgtcatgtttagttttcataaatgataacaacgcctaacacaatataagtatattttctttttcaatataaaatgtctttgattcttgtattatttctttacatgaatggagggttggcctaagaagtatgctgtttcataggctcttgtataagataaatgaaaaagcaaagaaaatgaataaaatctaatactagaaaagaatgaaaaaatatgattaagccagtcatatattttgtagaaatggccatatgaggcattgtacccctaccctgttacctcctctaccactttctcatggtttgtttgatttagcatccttgccttgcgttttcttgtgttagaatgaaaaaaaaaaaaaaacgtagctttactatagaatcattatttagagtagtagtaaattggtaaaatacaaagaaaatgccataaaagtaactcttattgggaagcagttatctagtatttcttccctcagcagagggaagaaagtagaatgaaaataaaaggtttcaagaatctggttatggtttttaaaatttaaaaaattttaaagtggccatgggcttatttatgtgtagataccatgtctttgattaacaagataatttctcatatatatatacatatatatgtatatatacacacacatatatatacgtgtgtatatatatatatatacgtgtatatatatataawatackataaatacttgtattatttgaatcttttgaaattttaaattaaaaatgtagtgtggatctaatatagtttgtgttttctgtaacaggtacacctattaacaaacgacctgtacttggatatcgaaatttgaatctctttaagttattcagacttgtacacaaacttggaggatttgataatgtgagtgttgtagtcaaactgaaacatctttttcatgtaacatgttttctcaggtatctgccatctctgaaattgtttttctaaacaacaaaacaaagtttttcagtaaaaacctaagaagaagataaagtggaaagtacagctagcctcctcagacaaaatttaaattttaaagattttttaggccaggcatggtggctcatgcctgcaaccccaacactttgggaggctgaggcgggtagatcactttaggccaggagttcaagaacagcctggccaacatagcaaaaccccatctctacaaagaatacaaaaatcagccagacgtggtgacgcacgcttgtaatcccagctacatggcaggctgaggcacgagaatcgcttgaacccaggagacagagattacagtgaaccaagattgcaccgctggactgcattccagcctgcgtgacagaatgagactctgtctcaaaaaaaaaaaaaaaaagattttttttcatatcagctttctgattactgttaaattggtcaatctttcataaaccttctttttttatctgagtcacagcacagccatattggtggaaatccttcctgtgtctctttttcattagacagtatgctccttaagagcagggatctgtcttaatattctgtatattcttaatccctttcagaatataaagggattaaagcaggaaatgtttgttgaactgatctgaagaaattattttaaggttgacgtgatgtacgatacttatccaattgagaatattctatggaataaaatactttacaaatttctgcagaactgcatttattagcctgtatattttatgcgaaataataaatcctttaaaaatgtttgtctccatttctttgttaaaaattttgatttaagagcctgaatatttttccattttccataactgggtttatttaaaagtcaaatggggccagttatggtgactcatgcctgtaatctcagcactttgggaggctaaggccaggggattgctggagcccaggactttgagacccgcctgggcaacatggtgagactccatctccacaaaaaaaattttttaattagccaggtgtggtggtgtgcatctatagtcccagctacttgggttgttgagtcaggaagatcccttgagcccggaagttcagggctgcagtgagctgtgtttgtgccactgttgctgcactttagcctaggcaatagaataagatcctgtctccaaaaaaaaaaaaaaaaaaaaaatagtcaaatgacttaatatttcaacatttataattttctgatatttgttagagtactaaaacctttatttttaaaccaaatttagaatttatcaagtttttaaaaattcttttgagtctaggaccaataaatataaaaatatactcatatatactgtgtctatcaaaatgttattatattaacaccttttaatttgagagtttttgtttcactttgtccattagattgaaagtggagctgtttggaaacaagtctaccaagatcttggaatccctgtcttaaattcagctgcaggatacaatgttaaatgtgcttataaaaagtaagttagtataattgatatgattatcttcagtatttttacctagaaagcaggatgaaatttaccttataactgaggttaattatttctttaaagaaatcagaacattttactagagtagtcattctatgatagtattttctaaagtgtattctatgaatactagatctatgagaaattctgtgaagaaagtttttgtggctaagtacatttgtcaagtacttcatagaggttaaaaagctaatattctgaagtcaagtaaatccacatttgaatcctagttctgccaattattaactgtttatgccctagggccagttatttattctcctaagcctcagtttcttcatttgtaaaatggaatgcttggccaggcacggtggctcatgcctgtaacttcagcactttgggaggccgaggcgggcagatcacttgaggtcaggagttcaagaccagcctggccagcatggcgaaaccttgtctccactaaaaatacaaaaattacctgagcatagtggctaacgcctgtagtcccagctactcaggaggctgaggcaggagaattgcttgaacccaggaggcggaggttatagtgagctgagattgcgccactgcacttcagcctgggcaacagagtaaggctgtctcaaaaaaacaaaaaaaaacaaaaaaaacaaaaaaaggatgctgctgtgtgccccagggttactgtagtgactaaatgagatttactaaggagtccagcctcacacataagaaatgtgcgaaaaatagatgctattactaatacttttaatagctgttattgttatgactctgagcacagtgttttaaatgaattttttgacaaaattttttttttgcattgaaaagattagaaagaactagaataaattagaatgttaatatggctcaatatctgagagtttagacaaaagaaatgaatacacattaaaaataactctatagttatattttgaaatgttttcaccaaatgtaatttctcttcatgtttccagatacttatatggttttgaggagtactgtagatcagccaacattgaatttcagatggcattgccagagaaagttgttaacaagcaatgtaaggagtgtgaaaatgtaaaagaaataaaagttaaggaggaaaatgaaacagagatcaaagaaataaagatggaggaggagaggaatataataccaagagaagaaaagcctattgaggatgaaattgaaagaaaagaaaatattaagccctctctggtaaatcagatattgttaattgtcttttgctttctttggtatattttccatatcctctataaagttccaaaatcaatatattgtataatattattctttattatttgtttattttcttcattaagtgctacttttgtataatttttatcataacttcaaaatagctgttagctatttttgtctagagctttaaagtagcaggagtttcttaaaagtaatttataacttttaatattagaattggttgatacctcctgttgctaagrgataaaccatggatataggttgaaaatttttacttttgttggtttctttcctctgatctttttctagggaagtaaaaagaatttattagaatctatacctacacattctgatcaggaaaaagaagttaacattaaaaaaccagaagacaatgaaaatctggaygacaaagatgatgacacaactagggtagatgaatccctcaacataaaggtagaagctgaggaagaaaaagcaaaatctgggtaagaaaattgtttttggttacgatgcatttcagcttgatggattcttatcatttgctctttgtatgtgtttatgtatgaatctaaattaattgacaaaatattaaataatagagtgattggcatttattaattaaatagcattcacttctttcagagaccctactgatagaaatttgtagagaaagatcatactttgatccacccttcttgctctcatcatggaaattgataaaatttttagctagagcaaagtactttttaggtctgctgaattacttgataatataaacttggggctatgtccatgttttatatattgtatgttggctrtagattctgagagttgtatttatttcttaagcaaaagcaagagtggaaaaatactaaagttttaaaaggccaaaaattgtatgttctattttatgtgatagtagcatttgtttgttttagtcacttggaatgatgaattatttgacaatgtaatttatgcactgctagtggacccctggattttatagataatctttggcattgaatcttttttctgaggcttaaaaaacataaacatatctgttagtgtctcatttaaataagtacaatgaattaaaaaaaaaatcatttagcaggccaggtgcggtggttcacgcctgtaatcccagcacttttgggagaccggggcgggcagatcacttgatgtcgggatttcaagaccagcctggccaacataccgaaaccctgtctcttctaaaaatacaaagaagtcaggcgtggtgacatgtgcccataatcccagctactcaggagggtgaggcaggagaatctcttgaaccctggaggcagaggttgcagtgagctgagatcgtaccactgtaggccagcttgggggatcgagtgagactctgtctcaaaaaaaaaaaaaaaaaaatcatttagcgtactgacatttggccacagtatgcagacgaacagggaaggggaaaataaaaaatggggcttatatgaatatagtaaaaaatgtttattatactttgttgtatttttgtgtataaaaatatatatttgaagtatgccttactgctgttggagactatttcaagtattaagaaacagtaaagatttcagctttttgcctaaaatcttttgattgatcagagttctgaaattttggtggcaccatacaaacatggaagaaaaacatcctgggtttagaagaatgtagtaaaagtgtttgttgattatactttgttatatttctatgtgtagaagtgtatgtttaaagtactgctaaaggagatcattttgataagaatcttaataaagattcagctttttaccaaaaaatctgatttttaaatctgcagatgtttctggaacatctgctgtttgcaaggcactgtgataaatctgtatttttttctttgctaattttttaagttggtgcttctgcttattttatagaataaactgtattttgtaggtttttaacaacccctttaactgtataattatatggatttttatgtactacagatatttattagtatatgcgtacctcaaactaaaattttcctgatgtgactgccctagtttggtagatattttttagaagcattgcagttgggactgtttatatagtactccctgcttttccacagtttcagttacctgtggtcaactgtggtctgaaaacaggtgagtacagtgcaataaaatattttgagagagtgagacaagaccatattcacataactgttattatagcmtattataattgctttgttattagtcattgcttatctcatgctgtgccttattaataaattaaactttatcagaggtatgtatgtataggaaaaaacacagtatatataaggtttggtactatccacggtttcaggcatccactggggatcttggactgtatcccttgcagataagaggggcttactgtaattgatttttgagttttattagataattgcagtggaaaattttacagtgataattaatatataggtatttttctggcatataaactttctctaagtaataggctactaccaagaatgttcagtgtccttcttccattgtccagatgtgggagattgaagaagttgatatatgtaaaatgtctagttcagtgccttggccatagcacgtacttaatacactatcttttttaaaatttttgtttcattgtaaagagtgtaatatcaagtagggaagatttgatatttctttgtgaattcagatgaaaatccttgctgatacatttcgtttcccaagatattcttctctaaaatatgactagcttaaatgcatatgtgtgtgtatgtatgtatgtatgtatgtgagtgtatgtatgtatatgagtgcatgtatgtagtgtatgcatcaacttaattttttttaacctgtatgtatgttggttgcattttatactttcagaggctctctttcttggcattctgtgttccatctggtttagcacattagtcttgaatttgccactgaagtcttagagagtagaatagttttctttggttgattgccagtaattatgttgtttttttctttatacttcagtgtattattaaagtgaatttcatttggtttgtgtctgagggtgatattaaatgtatatttttaatttttgattgcttgatttcattaataaaagagtgttgggtttttgttgtagattgaatgaaaatttgcctgggctactacttaaagtatgattgtgcttgctgttggcatttagaattgtttgtattcatcaactcagtgtattctatgatgtaagatacagcttggagtttgtcgtcatttcaaaaaatttagaattttgattctatatctcatttttatatgatgattctgaggtgcatgataaatctcttttattgtggccacaataaaatatgcttcttttccccactatgcaaagatagagtmttatgacttaggcaagtattctttcaaaaaaaattgttttaatttactatataaaataaaattcctcataataatttatcattgataatcccatttctgttaatttttttgatattttagccttaataaaattacttttttataatagaaatattattttcaataacattgttaatattttaatctcaggctgggtgcggtggctcatgcctgtaatccctgcacttcgggaggcccaggcaggcggatcacctgaggtcaggagttcgagaccagcctggccaacatggtgaaaccccatctctactaaaaatacaaaaaatcagcagagcgtagtggcatgtagtcccagcttattgggaagctgaagcaggagaattggttgaacctgggagacggaggttgcagtgagctgagatcacgccactgtactccagcctgggcaacagagcgagactctgtctcaaaaaaaaagtatatatatatacacgtatatatgtgtgtgtgtgtgtgtgtgtgtatacatatatatgtatatctcagattatagctggtttcatgaaggttttagattttttaaatacttatatatttgactgtaactgagtctttaaaataggaataaatcttgagaatttttgaggaatttgtgttatagttcagacaaaattgatatatttgatactttcgtgaacacggacttacttccaccggtccattaaacatcctgccaacactcctgccccactatacaaaaggacaaggagaataaaaaagcattatagtgctgcttatatcactatttatatattatttttgttgcctgtataattaattaggaatgataaagtatattatccctaaaaaggttgcatatagagatataaagctgaaattttcagtggaggaagttttttttttaatataaatattatattcatcaggtgggcacagtggctcacacctataatcccagcactttggaaggccaaagtatgaagattgcttgagcccgggagttcaagaccagcctaaacaacatagtgagacccctgtctctacaaaaataaaaaataaaaaactatctgggtgtggtggtgtgtgcctgtagtcccagctacttgggatgctgaggtgggaggatcatttgagcacaggaagtcaagaccacagtgagcagtgatcaggccacttcactccaacctggatgacacagtgagaccatgtctccaagggggggaaaaatatatacacacacacacacacacacacacacacacacatatatatgtgtgcatggtgtaatatatgtatatatataatcattactcttaatatataatatagcatatattttaatatatcatgtattttacatattattaatttttaaagcttaaatactaaactatctggttgttctgccttatgatgtttagtcatttgtgagccctaaagtgatggagtctttaagtacagacatacaggacagcaaataaaaccagactaaatgtagccttggatttcatattgaaattttttaaaaaataaatctagtgtttggaaagatttatgattgaagattttctccaacttgttgaatacagattggtggtcaatataaaaaggatatgaatgctcagttttagaaagtacatggtactaagaagataaaaatgggtgtaaggccaggtgtggtggctcacggctgtaatcccagcactttgggaggccacggtgggtggatcacctgaggtcaggagtttgagaccagcctgaccaacatggtgaaaccctgtcattactaaaaatacaaaaaaaattagctgggtgtggtggtgggtgcctgtaatcccagctacttgggaggctgaggcaggagaatcgcttgaacctgggaggcggaggttgcagtgagccgagattgcgccattgcaccactccagcctgggcgacaggagtgaaaatctatcaaaaaaaaaaaaaaaaaaaaggatgtaatactctttctagaatagtttgacttttagtttcatatacttgtaattggcctctcatctgtctatttctttggaacatcaaagttgagaagatttgtagaagatgttaataaatctgtggtaatgagagtagaaattgtgttgaagtttaaaggaaagaacaaacatgataagatattggtagtacattattagaatatttctgtttaaattaaaatagtatttcagttattataacatttgaaaattcggttggagaatgttttaaagttattaagactgccatctgctagtaaaaattattgtttcaaacttcctgaggcctccagcttgggtgacagagcaagactctgtctctaaaaaaatgaaacaaacatcttgaggctggaaatatttgaatgaaaaataatttttagttgtaaaatggcaatgaagtataatgaatttttttgtcaattgagatgttaaaacacttttattaataaaacatgaaaaaattgttagagttgaccatacttgcttcttgctgttcggcacaaattctgttcttctgacttttggaaattttcttttactgcacttatttttgaatcttcattttctctaaatgtgtctttctgtaaccttggttgtcttacagttttagtttttaatagtaaaatgaaactctgagaatttcatacacgtggaacctgcttttcctggaacaatcacagccacaacttttatcaatatatgtggtttggaactgaaaaacttatgaagtrtcttttattaactctgcaattttttaaacctttcaagagatgaaacgaataaagaagaagatgaagatgatgaagaagcagaagaggaggaggaggargaagaagaagaagaggatgaagatgatgatgacaacaatgaggaagaggagtttgagtgctatccaccaggcatgaaagtccaagtgcggtatggacgagggaaaaatcaaaaaatgtatgaagctagtattaaagattctgatgtcgaaggtggagaggtcctttacttggtgcattactgcggatggaatgtgaggtaacttgagttttagctagtgattattacctaaaaacaattataaaatacttttctatttaaaaacttaagtaatggattacagatttattagtattctaattgaggtcatagtaccttataaaaaatagtttttagcatgtaaatacctcacttagtgacttacaattaatgttttcactacttagaagatatccctaatgtctagaaaaccgaggtctacacacttgatttttatgtactacatgtagatcagcagacaaaacattgttgaaatgatcagaacttctggacatctacaaaccaattatcaggctgcttgctgtcttgcattttaaactacattgccacagtaacctcttttttgtattctgaagtcatttctttccttctgtagtcagggatttaaaatcctaggaaacattagctattttaagaaagccttatctccttattaacagctattgcattacagccttattcagaagtctcagaaatttattagtatctttgaaaaaatctggttgaacatgtaagcagacctgcttcactaaaatagaatgcactttttgactgctcctaacctagggaactgaaaggcaagagtgaaatttggttttaagtcatgttcaatgacttaagcatttttcttagataaattttctttggctttccaaagaaattttgtattttgattttatccaaaattggcaagccagttttgggatctattcattcagttatcttttaagaatcatttattttagaatatttgatagtatatttgaaatgtagcctataagacagatacctggaaagattaaccatagaagtttaagttgtggtttcatggtgtacctagtgtcttcaaggaggaatacagttctcatgctttatacttaaattatattctgtggtttgggaagttaataggaaggcatcatctcaaattctgtgtttgagtgttgcaaatgaaattttgattctctttaatcacttcccacaatgccctttctctaaagaaaatcacttctgagagttttgaggctgtccttactaacttttcattctactttcacatacatataaatgtactcatagaaaatatatagtattcttacatgcatgtgttttaaataaattatactatacaaaattctgtttcttaaattttttgttgtcctgttgtgtaataggaagctcatgatctaatctgattacctttcttattttgagaaaagtaccagtccgatccattctgatgyttggaagaaaatagcaaatagcaaatagcaacttaagtcatgaggagatgttcagaagttttgttttggtctcattctttattatgtctaatcaggatacagttttagattttaagaatacctatcgtcagagcttagatgtgatagtcatccagaaacataagtttttccagataccactttaacacactgcacaatttatcctttcacctgttggttctttttttctgttttttgtttttgtttttgtctttttttggagatagagtctagctctgttgcccaggctggagtgtagtggcacgatctctactcactgcaacttccacctcccaggctcaagcgattcttgtgctgcagcctcctgagtagctaggattataggcgcccaccattgtgcctggctaattttcgtatttttagtagagatggggttttgccatgtttgtcttgaactcctgacctcaggtgatctgccttggcctcccaaagtgctgggattacgggtgtcagctgttggttcttatgctgcctttctggtatgtgattttcctcacctgaaggtctggctattaatgaatatattccaaagaaggtacttgagatctcagatatagctaccaaaagaatattttgcccaattttttacttctagtcattttgatcttactaaattatcttaccgaatataaatgtagagggagttctacttctgcctaggatataaatgtaaatgtagaatatgttagtttaaaattaggaagaaaaaagctgggtgtggtgttgcatgcctgtagtcccagctactgaggtgggaggatcacttgaacccaggaattcgaggctgcagtgaactatgatcatgccactgtactccagcctgagtgccagaatgagacctcatctcttaaattaagaaatacttggattagcaaaaacgaataattactgcataatgcccatgagatagagtcacaacaccttttgcctctctttttagtttttctgattattttgctagtttacatgtagaggcagtttttcctcttggcctttatgaagtatttgaaattctatgaaaaagggatagaatttaggtgttctccaactttcactgtatataatcagggctcatttccttcccttcttccttccctccttccctccttccttccacggagtttcactcttaatgcccagcctggagtgcagtggctggatcttggctcaccgcagcctccgcctcccgggttcaagcgcttctcctgcctcagtctcctgagtagctgagataggcacgcaccaccacgcccagctaatttttgtatttttagtagagatggggtttctccatgtttgttaggctggtctcaaactcctgacctcaggtgatccacctgcctcagcctcccaaagtgctgggactacaggcrtgagccaccgtgcccggccaaggcttattttctattaattggctctttaaacaaaaaaggcttagtagatataagaactgagtcattcatgaaactgttttacaattaagatatagctttgttttgttaagaaaagattgactaaaagaaagagaattccaggagtattttgattttagatggtagaaagaatctctagtaatttagtttttaaatagcaggaagggaaaggaaagaatttaaattgaggcattcaagtttttaataatatagggaggaaaatgcgacctagttcaacaagacatgcttgtgttactgtgaacgttgccatctatttctgagaactcaagtgcttgtatgctatgaactttcaaaagaagaaaacttaacatcttgatgaagacctgtaggatggatctctatacactccaacatcatggagaaaacaaatgtacttcagtagattaagcagttaatcttcttagagttaacataactattttatttctttctgcaataatcagtctgtcttattgataaataagcaataatttttatttttgcggctcctccagttctgaagctaatttaataaggactgcaacaaatcctcatcagctgtatgacaatttttcttttatttttagggtcttcagcttgatctctaaatttatacttaacagatgtgaaattggaaatgaagatttatgcgtggaggttcatgaaaatagttttatcttcagtggtagtcattcatgacaagcagtttgggagatttgtgtggacctatttccatggtttttttaatctgaaacaagtatttcagattaaaaaaaaagagagagacagacaggaccttgttctgtcacccaggctggagtgcagtggtgcaatcatggctctccagcctcgacttcttgggctcgagtgatcctcccacctcagcctctggaataggtgggactctaggtgtgcatcaccacacctggctaattttttatcttttgtagagatggggtctcactatgttgcccaagctggtttcaaactcctgggctcaagcagtcctcctgccttggcttccaaaagtgctgggattatagacatgaaccaatgctcctggccatgaaacatgtttttccggtaaagagattttctcaaataatgtaagagtgtctgtctttttgtttaaaaatactgtttttaggccaggcacgggtagctcatgcccataatcccagcactttgggaggccgaggcgggcagatcacctgaggtcasgagttcgaaaccagcctggccaacatggcgaaacctcatctctactaaaaatacaaaaattagccagacatggtggcaggtgcctgtaatccgatctacttgggaggctgaggcatgagaatgacttgatccaggggcacagaggttgcagtgaaccaagatcacaccattgcactccagcctgggtgacagagcaagactccatctcaaaaaaaaaaaaacaaaacaaaaaacaaaaaaatcaattttcttgttaatttttacatttttcttttttttctaactaaaatgctgtttgtttgtttgttgtttgtttttgagatgaggttttgctcttgttgtctaggctggagtgcagcgccgtgatatcatctcactgtcacctccgcctcccaggttcaaaagattcccctgtctcagcctcccaagtagctgggattgtaggcacatgccaccatgcccagcaaatttttgtatttttagtagagatggggtttcaccatgttgaccagactggtctcaaaygcctgacctcagrtgatccacctctgcccccgtaagtggtgggattataggcgtgagccactgcgcccgacctgtataaatctttaatataattttcatgtatgtccctatttcacagctgaaaatgttgatttttgttatacaaaggttaacatttgggcaagtttgttttctactgttgtgatgaaaaaaagtcatattttaacatgttcacaccacatttactggaaagggcttgaactctttaaccacaaatattataatactcttacagaatttttctgatgcagtgacagtatctaaaactattgtctagcactatattacttactatgtcaccaagcactaggcatgtttggagtatgctcataaattattttttaaactcttctaaaaataacaatttagaaaaatacataaaagtagaaagataaaattattgctggccggccgggcacggtggctcacgcctgtaatcccagcactttgggaggccgaggtgggcggatcacctgaggttgggagttcgagaccagttcgagaccagcctgaccaacatgaagaaaccccatctctactaaaaaaaaacacaaaattagccaggcatggaggcacatgcctataatcccagctactaggtagggtgaggcaggagaatcgctcgaacctgggagacggaggttgcggtgagccgagattgcgccattgcactccagcctgggcaacaagagcgaaactccatctcaaaaaaatagaaaaaaaataataataaaattactaatattatagtgtgttctcttttagtcttttaaaatgtctccctacatttaaaaaaaatttagttctgcttaagtagtttttaatagtaggctctctatttaacttttcttagtgatgttaatattttatagagaatcttagcataattatctaattgatccctttcactctcaagtttctaagtcgtgtcgtaaatatgggattgatttttgaaagtaagggtacacattgaaattaacatgccgtaaactagtygagtgtgttggatttctttgtttagtaacaactgagtgaaactatctagactaattggcatggaatttaaaatacatcaatattttgtaatagtgtatcaatactgattgaattttctcgctcatttccaacttggctttctgtaatcaaagagttgcaaatttagttagagaataattttttgtatgttgaagatcaccagctgcattaatgggaacccaaaagtaaaagagacactgtaaaacttcagttgtaaaactcttaaataagccacaacagttctagtgcatgttaacagttacagagaactgaaaataagctaaattatgctaaatatattatttgaaattaaaaatgtgttacatttaaaaaatattttcgccaaacaaattaaatcctcttaggagggaatgagttaggggatgaaaaaacctggtaaaaggctttcacaaatgagtaggctcaatcctattttttgccatcattcagttgctttttatcacactttattcctttattttccaaacataagttgaatacccactatgtgccaaatactgtgcttgtcaccaaagataccaagaagtggtccttattaaggaattcataataataataaattctttattaaggtattgatcctaccaccccttacctcttcaccccagttaatgcactcagtcttcccttgatattgcttacattccctggcattattattataatcacttcttttgactcaagctgttctttttctctccttttgctttatagtactcatctgacaaaaccacaagaaccttgattaaatctaaccctccagctccttgcctgcacctgtgcagccgatcgtggttggagtaaagcaagcaaccacaatgactgttcttattttaaattcattactgtgaacctcaagtgggtccttaattctctatgtccttcttccattcactttcctactttcttagaagactatttcatactgctgcttatgtcttcacatccccaacatctcttccctatcctcattttcagctggtgaccttgctttgtacctactgagagatagaaacaagaaaaacatttctacacacttcataagatctgcctacctaactgcgtttgctgccacattctctgtgttttcatctttagccatagatatacagtcatgctactgtctgaagccagtcttcataagcatcccttcttgactgatcaaagacatggcccattttcttgctctgttctgagtcattcccactacttacagatctgtggttatttgtcacatctcaaggaaaatcttttctggagcctgacttctactgtgacatttcttcgctccattttcattcagcagaactgtttgaaagttacctacacttgttactcagtttctctcctttttctgtgtaaatccactctcatcagccttttgttcactgtgtctccacaactgtgcttaccaggaacactagtgaccctttgtagataaattcctcctgcttttcttgccctcttacgtaccttatcagtggctttacagtcagttgatcactccttccgtgatatgctttgcttgggctccagctgctccagctacaaccatttttcttgtttattttccttttcttcctttctcaaaattaagaaaccactcctcaattatcttttctgtcttcctcatctttatgtgttttctcccttctaatttttcccctatttctttctgatatccatttaacatttttttggtttctgttcctatttttccaatcctaacttgagtcacaattctgatattgaatttttctaaattatttttccgagccaaaggaatttgatctggaatataactttcacctaggactctgggtaaattctttcccttcaactctcctccccctccttttctttttttcttcatcgttcaagctttctacattaggactacgttatgtattattacaaaagtgaacttaattttaaaatatgaaaaaaatttctgtttcatatctattctcctaatatcccttaccacatctagaaaagtattcatttggcatatgataagtactaaatgaatgttgaactaaattggacctcctgacaacaaaatggaagtagagcagaaggtaaaatccaaataaaagccactggttttttaaagtgatacctataataggggattgggacagatatggcttgaccctctcactggagctgcttctcacctcatttatatataactctgtgtttcacattctaaggaactgtcaaacttttccacagagacgacaccgttttacattctcaccagcaatgtgttagggttccaggttctctgcagccttgtcaacacttgttattctctgtttatctcattgtgcttttttgatttgcattttcctaatgcaacattttttcatgtacttgaaatgtagagttgaacattttttcatgtacttattagccatttgtatatcttctttagaggaacgtcccttcaagtttttgccatttttgaattggtcagttgttttgttgttgttgaattatagttcttcatatattctagatgttattcccttatcagatacatgattgcaaatgtttcttttgttgcctctgcttttgatgttatttccaaagaaacattgccaaatccagtgttctgaaaattttcctttatgttttcttctaagaactttatagttttagctgtaatgtttacattgttgttctaatctgagttcatatttgtatatgatatatgtgacctctttgggttacataaagagctcatctcttagcaaacaaaatggagtcgagactgagagactggaatgaatttgattggaaatattaattttctgttactttttagctattcttagtctccttttgtccttaaaaaatttttaagtcacttttcagcttaatttctttgttctttcctgctctaaaatgttttgtgtccttcattttttttctttcttatttccatgtaatctgatccctgctgtacttgagttgtgtatgccattggatttaggaatattgaaatagagtacaaagttgttctactcattttctttgaaataattgtcctggtaatgatagaaagcaaggtaccctgggaagttgtctgcgttgtttctatagtacagaagtcagaggcctataaaatgaccatttgacagtggtttccattatctgtaagtttgtattaaaagagagtggcttttgagttaaccatagwttttgagtacaaatgaacataaacatttccttcatgaaaaaaagatgataattcagttatgtgttgtactcaaatgggctttaatttttctttgtgtattcatcttagaatgtttactaaacttggacctgtttcattcagtagtttcgtagattggcaggtacattgatatttttgtctaagtacgcacaaataactaattccatacatttatcaaatattaacaaagtacacttttggggaatttaaaaaacttagcatctgcattacaatatgcaattaatggcacagttaaccatttgcagttgtctttgtacgctttggtaaaatgctgtattagtgttcttattattacatattacctctgcctaaagacctatacttccgtttcattttatagcgttacattgcttaggaaaacctattgatataattactataccattccgttgagctgtttatgtcaactcttaaatatgactatgctataatatttatggttctgtcattctgctgttatattcttaagtgtgaggaataccatcgctgtctctctgatgtagatttaagtgttatatgaagtagaaatatgaaatgtttatatcatacttaggaatttcattttattttattttattttgaagcggagtttcgctccgtcacccaggctagagtgcagtggcatgatcttggctcactgcaacctccgccttctgggttcaagcaattctcctgcctcagcctcccgagtagctgggactacaggcgtgtgccaccatgcccggctaatttttgtatttttaggagagatgaggtttcaccatgctggccaggctggtcttgaaatcctgacgtcatgatccgcctgccttggcctcccaaaatgttagtcttacagatgtgagccactgcacccggcaggaattttatttttgaataatatactacttttttgtttcattttattgtagatacatgattaaaagtattaattgtgatcagttgttattttcatatatcttgttttagatagtcagattaaaatacatataaattgagattatataaaattcataaagtaggtaaatattgataaaattgcttatgaagtttataattaataatgattaacactgctttttatcttgacttggtgtttttttctattattttgtcatacttttatttatttaattcaggtggggaaatccctttccatactaagacagtacaaatttccactttagatgtgaggttcttaaaaactaagtaagttaattatatgacatacattaacttttttgattatagagaggcaagatataaaatacatattgtgcaacaattattaaatgaatctattcattatagaaakcaaaatatagatgattttaacatttacttaatggttggttattagatttttatcttatctatacatatttcaaagagtgaggtttcaagtttatattaatttgattttacttacgaagttatttttaaaatacctttattctgcatgctgtttatttttaaatctcttaagactgtgctttttaggtatatattaactatatgctgataatatttcttttaaaattgggtttaagaagaaccaaaagctgaattgatgtgggcatattaaccattttggtagtatatctggtcgactaatgttcttttccatttttattattacaaaatgatttcttacataatttgccaatgcatctgtacaaaagccataaagttttctttttagaaatccaatttttctgtggtgagagcaagtatgctgtggtctctgaatggtatcttttagccttgtatgaatatttttaaacatttgaaaaatcaaatatttgtgtggtggcttctttcagaaagtttcacgtttgtattcacaatttgtcattactgtttagtattgtcttcttttgttgaattgtaagctcctcgcaggcaagggctgtgtttgttgattcattgctgagtacccagtgcctagcagactctgttattacataatagataccttagaggtgtttgtcaaatgaatacgtccacatgtgtacttatggtcttggagtctcatataatttttcattctacggccaggtgtggtggctcacgcctgtaatcccagcacttcaggaggctgaggcaggcaaatcacctaaggtcaggagttcaagacaagtctggccaacatggcaaaacccagtctctactaaaaatacaaaaattagctggacgtggtggcacacacctgtaatcccagctactcagggggctgaggcaggagaatcacttgaacctgagaggcggaggttgcagtgagctgagatcgcaccattgcactccagccagggcaacagagcaagactccgtctcaaaaaaaaaaaaawttttttttcattgtacttcattttatgtaggtcagggaacatactagatcttcagaagttaaatgagtttatcatgcatatgttattttatgttttgttagttgaatgttaagtgatctcaatagaaatattatcagacaagtcatatatataccttggaaatattttccttagtactttagataaatattcaataagatacttgtttagattccatctgtagaattaattacattgactgtattgataactgaattgaaaaagtataggctaatcactgtcttaattttctaactcaatatttgtttttaatatttgtttcaatactttttgtttatttcagtatttctttttaaatggaagcatttagtaatgctgtttcccttgtgccctgcaaaattaatttatttcctgttattatgaaaaggccaattatgatttgtaatcataattcctaaaggttaagaccagttaaagccaggatagataaactatcctggattgtatatatatgtatatattgtgtatatatatgtatatattatatacacatatatataaaataacaacccagtctacctgaattttcacattttcagaaaactgtattgcttgaatctaaaattgcaagacaatttattttattttattttattttacatatttttttgagacagagtcttgctctgtttcccaggttggagtgcagtagtgcagtcttggctcactgcaacctctgccttctgggatcaagtgattctcctgcctcagcctcctgagtagctgggattatagacatgcgccaccgtgcccagctgatttttgtatttttagtagagatggggtttcgccatgttagccaggctggtctggaagcattttaaaaccaaaaggtttgtatttaacttacttactaagattattgtattccgccagatgcggtggctcacacctataatcccagcacttcgggaggccaaggtgggcgaatcactagagcccaggagtttgagaccagcctgagaaacatagtgacaccctctctctacaaaatataaaaaaattatccaggtgtggtggtgaatgcctggagtcccaactgttcaggagtctgaggtgggacaattgatactgggaggtcaaggctgcagtgagccaggatggcgctaccgcactccagtctgagcaacagagactctgtatgaagaagaaaaaaaaaaaaagaagattctcgtattccttaagaatgtactttcggggatgaatagatatcttacttgacgtggtaccccaaggagaaattgagaaatattttatggccttctatttcttagctgcagtttcactctttgccacttcctttccagttattttgttttactttatttttatttattttattttttttggagacagagtctcgctgtgtcacccaggctggagcacagtggtgcgatcttggctcactgccacctctgcctcctgggttcaagtgattctcctaccccagcctcccaagtatctgggactacaggtgcccgccgccacagccagctaattttttttgtatttttattagagacggggtttcactatgttggccaggctggtgttgaacacctgatcttgtgatccgccctcctcggcctcccaaagtgctaggattacaggcataagccaccgggcctggcctattttaattttttatgaaattcaagataygtgaacttgagctaaaatttcccattttctatctgcattgastattttcttatctattatgtctaaggtaaatttggtgttgtctctttttaatatatactaaatgtactgtatttttaaaagtctaaatttataaagaagaagtaggattaactgtagctttttgttgtagttctgaagtaaattcttctttgaagcctgtgcttctttggtaaggaatgagaaatcttgacccactratattgctttcttaaattaattggcaccagtaattatgccagtctaagacgttctttcttatataattttaatgtctgtaggaaatatggggttttcatgtagagtttttccccgcatgaattttatttttttgagatgagtcttgctctgtcacccaggctagggtaccgtggcatgcgatctcggctcactgcaacctccgcctctcgggttcaagctcttctcctgcctcagcatcccaagtagctaggactacaggcgcccgctaccacgcctggctgatttttgtattttcagtagagacacggtttcaccatgttggccaggctggtctcgaactcctgacctcatgatctgcccacctctgcctcggcctcccaaagtgctgggattacaggcatgagccactgcgcccggcctaatttttatctttttgttagagacggagtttcaccacgttggccaggctggtctcgaactcctggcctcgggtgatctgcctgtctgggcctcccatagttctgggattacaggtgtgagccaccgtgcccggcctccccacatgaatttgcttttttttttttttttccctattctttgaaaatatcctgtagagaaaatagaaggaacacttgggtagtattgtaatgggtaattacatatacggaaggaacatttcttatttttaaaagcaatgatcagttatagttatttaatcttctgaccatctttatttttcttgtaagatctatcagacaactaaagtgctatttaacgtctcattaggttttgaaatacttgtctgccaatatgtttgtgtcagtgatctcagcttgtatttggtaaggacatttgtaattcgaaaaagcttccccaaccaaaattctcacatgttattttctccttttcttcctcttcacgccactggtctctcactcttcactaarcttactctgaatagggcctggaatgccccctaccgttattttcgtgttagaatcttttcccgggcagtccatttccttctcttctctaattctccacaggagtgctttttggcaagcactgtctttcactttcattgttggaatttcttaacttgtgaaataaaggccctgataaatttttaagatatgctctagttctaaaagttattagttttgataacagtaacaatattgtgtaactgtgttttatacaaagagcataattggcaaggtaaaaaaaaatgcaaaaacttagtgtcaaaacaagggcctgaattaaacaaataaaagcactgagaaagtagaatagaaagaagccaaataacagaagagtcataatattagctaatatttatagatctgttaagttagatctataaatataatgtaatattattatacattatgtttgctgttagattacattattactctatagtaagttttcagggaatttcttaaaaccatacagagtattccatgagaattttttttgttttgttttttgagacggagtcttgttctgtcacccaggctggagtgcaatggcgcgatctcggctcactgcaacctccgcctcccgggttgaagcgattctccagcctcagcctcccgagtagctaggattacaggcatgcgccatcatgcctggctaatttttgtgtttttgtagagacagggtttcaccatattggccaggctggtctcgaactcctgacctcaggtgatctgtccacctcagccttccaaagtgctgggattacaggcgttagccactgcgcccggccccatgagaattttaaaacaaaaattttccagaatagtaaggccatactgttaattacaactatgtatgtagtttgtttcatctaatttaagaatttatttttgtgtgtgtgtcctgcctgctccaacacacttttgacatctaaactcaactacttaacatttttctgacatccagtcctcttgtaccatccttcttttataattgagtagaagagaacatgattaccatataggatttacagagcttaggcagtgggccccagcctgtaccataccaagcatccatcattttattatttatgtgtatgttcttgccaccttgttcttaagagaatttaaacaacatacattatatctgagtaataaaggaatcttcctttatcacagtggccttacccatgaggcagtaactgtttttccttgtttgatgtgtttggtgttgcatgtaaaatatacaaatgtgcaatatcatgcatgtattcttaaattgaaaactactattttaccctacttcaaaatataattgataataaaacccaggttgaattgagtcagttttttattgatagtaaaacatgtctggtataaaactagctacagaacagatagcctttggttaagaaaggtagaacatgattataactttgtttagctcacattaatgttatgtgcagccatcatgaactgacttcagtttctctcataaaaaattagaaagcttgttttgttttcttttaaaaacaaagttgatatcttgacttcttctttccataactcttctaatagagcaacttctaggagttcatactgaaatytacagaggatggaggtgttttcttttcgtttcccaccatgcccccgattttggaaggaagtaaattgctttcctaagcattatacaattttcgatattaataggaaaggtaaaagtactgctgcaaatatatggatagatgctacagtgccaggtagaagtaccaaaaggagtgtatttagtagaagaatacttactttaaagcttttcaaagtacttaccatatatttgtacttacaccagtacttaccatatatttctacaaaaaaacccatatatggtatgtaccattattttttattttgtttttaaattgtagtcttattttatacagaaataaactaagccttagattgagaatgagttgatcaggaccacataactaggaagcagggattatgttaagtctgtcctaaagctcattccattccctcttattcttattacggccctcagcatcttccagcatataaacagaaccccttgcatggggatgaatcctcagcttttctggcttttactggctacaagccagtagtttgtaccagcagagtaactgcccaggagtttgctacagatactttccaggcctatgctagagtaagaatataatttattagtcaagtaatgactcaagtcatttacttcttgatttggggactttgttacttccttttaatacctctaacaatgaggacattttaatttaaaagctcgttttcaggtgtccatgttctagagttttgtgttttctatgagtaatgtatataactttgaacacaaaaagagaatgtcaattagtttttaatgtttacttcttctagctgttataattcttgaatgaatgaagaacgaataaactgtcattcttttttttttgctttaaacaaatagttttattgcagttaatagtaatttgcaccctatgaaattgtgaagaccatcagcattgaatcaagaggccatcacagctgttgactcagctgtctgtacatgtagggagcatttcagaatactgaaaaactttgcagagtaatgtttttctggtattttatgagcaagcattttttttttctagttgattttgcattatccatacgttacaatatggtgcttttcttttcttatttcttttttttttttttttttgtgaaacagagtctcgctctgtcgcccaggctggagtgcagtggcgcgatctcagctcactgcaagctccgctcctgggttcacacgattcttctgcctcagcctcctgagtagctggggctacaggcccccaccaccacgtctggctaattttttgtatttttagtagagatggggtttcaccgtgttagcgwtgatggtcttgatctcctgacttcgtgatctgcccgccttggtctcccaaaagtgctaggattactggtgtgagccactgtgcctggctgtaatacggtgcttttctattacacaatgccatttaaaactgaagctattaccttagctctctgatgtgtctagagaaaaattgcctacctgctgcttaagaaygaaacaaagtaaaacaaaatgtagaaaatactgtgatttatcttaatacttactgtacagattcagtttctctttgttgtagccgagtaagcagtgctagttgaggaatcatgagatcatgctctctagtcttggctcggccagtagctaactttaagtccatgggcaagttattacctccctctctttgtgccttggtagcttgctcttcaaaccaggaagctgagatgatttccaaggtcctttcccttctaaaatgtcaagattctatatgagtttctctttaatatggcataggttatttccgtggtatatattgtacatatttatattaatttcctttaattttagatacgatgaatggattaaagcagataaaatagtaagacctgctgataaaaatgtgccaaagataaaacatcggaagaaaataaaggtaagtgcttgtttttactacacactattagctcttaaaaagaagttttcctccaaatgatgcaattaaatatgtgttagtgttacactttattgaaatagcacatttttcaaatgctagatttgtatataattaattttgtcaggttagggaaagcattttagaaacagtactggatgatctttgagactttttcagtcccaacattatataaagccattcaaccagattttatttatctatttctgccatttccttcccctctagttcccaaccaggagccataaggcagtgtgacttggagagacataggttattattgtagctgtaaaccattccaaggaagaaaaggctatctggcaactcctttttctcttcttctttatctgattatagtcagtggcttagaatatattcacaagatttttttttttttttggagacagagtctcgctctgttgcccaggctggagtacagtggtgcaacctcggctcactgcaacctccacctcccagttcaagcgattctcatgcctcagcctcccgagtagctgggattacaggcacacaccaccacacctggctaatttttgtatttttagtagagatggggtttcaccatgttggccaggctggtctcgaacttctgacctcaggtgatccgcccgccttggcctcccaaaatgccgggattataggtgtgagccaccacgcccagccccacaggatcctattaaccacgaaaatgccatgaggatttacttaggagctcatatggaaaattaatgttacttttatgtatgatagaattattcattctaagactaaattttcctaaatgtttgattagcatcttctatgcatctggaatgatactagatatgtaccatccttaggagaattactctcactcaaaatttatagtgcttactgctaactcatgcttcagagagcttatttttcctataaatcaacaaaatttttaagagtagtttccaggaaatatatcggcctttgcttatctatttgtaaacaaataatttgagaaaatttctcatcttttctcaaaacattaatatatcactgaggtaggaaggttgcccctgacttgactttacaaaagtacctggaattttgtcattcccaacccacatatagtgagattttaaaatgaccacgttgcaatcgtttcttttttttcttgtttttttgagacggagtttcactcttgttgcccaggctggagtgcaatggcgcgatcttggctcaccgcaacctccatctcccaggttcaagcgattctcctgcctcagcctcccgagtagctgggattacaggcatgcgccaccaccccggctacttttgtatttttagtagagacggggtttctccatgttggtcaggctggtcttgacctcctgacctcaggtgatccacctgccgcggcctcccaaagtgctgggattacaggtgtgagccacctcacctggcctctttttttagttagtatttaatttaaacgtattgtgattttaattctgaagagcaagttgtaggtttgctagtcctaatcacctatctgattgctaatttgattcccgttattaaagtataaatacaaaaccttttgatcatcctgtgtagtatwttgttaagtagctttaaaaatctggctgttttgaggggcttcttatgttctttctttttatgttaaatatttaacaacatattctgtaatagtgagttaaaagtggacattaacattgtttctgataaatgccttatgataaattacgacatacyttttttcttaacctagaataaattagacaaagaaaaagacaaagatgaaaaatactctccaaaaaactgtaaacttcggcgcytgtccaaaccaccatttcagacaaatccatctcctgaaatggtatccaaactggatctcactgatgccaaaaactctgatactgctcatattaagtccatagaaattacttcgatccttaatggacttcaaggtaaacataacaatcgttctgttgcatgcaagtatttgattttaatttatgagtcaagttctataaaggtaattcagtgacattaccaactactgttttttctaccagagttttgtttgctctcttattacaggttgaatatctcttaactgaaattcttggaaccagaaatgttttggatttcagatttttttttgattttggaatatttgcattccacaagccaaatccgaaaattctaaatctgaaatgctccagtgagcgttacctttcagaatcacgtcagcactcaaaaagtgtatgattttggagtcttcagattttggatttgggatgttcaacctgtacttgaaataaaatcagccattgattgaggcctcaaattttttattactagtagatccaagggcaccataaaattttggttaacatttaatattcaacttttagcattgttactttagttttttaatcttttctgtgccatcctttctgttgcaatgtaatgcatagtttgtgttatacaacatcagaccataaaagtatactgacaagttgttgtaaagaacaccaaactttgtttgtcctgattatgactattatgatctctgtttctttgagacagggtctcactctgtagcctaggttggagtacagtggtgcaatctcagctcacttcagcctcaacctcccagactctaaagatcctcacacctcagcctcccaaggagctggagctgcaggcgcatgccaccatgcccggctaatatttatattgtttctagagacggggttttgccctgttgaccaggctcgtctcgagctcctaggctcaagcaattggcctgtcttagcctcccgagtgctaggattacaggcaggagccactgcacctggactgactgctttttttttttttttgagacggagtctcgctctgtcacccaggctggagtgcagtggcgcaatctcagctcacttgcaagctccacctcccgggttcacactgttctcctgtctcagcttcctgagtagctgggactacaggcgcccgccactgcgcctggctaattttctgtatttttagtacagatggggtttcaccatggtctggatctcctgaccttatgatccgcccaccttggcctcccaaagtgctgggattacaggcgtgagccaccgcgcctggcctgacatgacctcttttatgatgggattattgcttagtatttaaggcaaaatgaagtataggtaataaaagcaatgaggattggagcagagatttattaaatctgactggcagggaaggggacatatctatgagataaaagaatggatctccataaaaatatcttatcatttctcataacttaaaagaggtttcatttttacttattytgaatgttaatagaagctagtttttgtttcttattgtagatgtgtgtttatattaactcattattttataaaccaaatgctgtactatatttttatttactcaccactgtactaattagggcaatatttttaaattgatttttaaaaaattttcccatgtatcctacatgcaaatagtgcatggaaaatacatgtatagtttaaagaacagtaataatatggatactagtatgtctccacagtagcaatcaaatactatttacttaaaacatgtagtatgtctcctcccagaagtaattatagtctggacttttgtgtaatccttgctttacttttcttcagaattgaattatctatatttatattcctaagtaatttttattttacttcgtagtatgtctcctcccagaagtaattatagtctggacttttgtgtaatccttgctttacttttcttcagaattgaattatctatatttatattcctaagtaatttttattttacttcatttttttagggtgtttttttgttttgtttttgtttttgaggcagagtctcgctctgtcacccaggctggagtgcagtggtgctatcacgactcaagtgacctcctgggctcaagcgacctttccatctcagcctcctaagtagctggaactacaggtgtgtgccaccatgccaggctawtttttgtagtttttgtagagatggggtttcaccctgttgcccaggcttgtctcaaactcctggactcaagcaatccaatccatctgcctcagccttccaaagtgttaggattataggcatgagccactgcacccagcctgttttttagttttttaaaaattgagtaacaagcataagcctagttttataagaaggctcagatgaaggctttctgagaatgttacctgaatagagattctaagtcatactctgatttcagatttagcttctctgagagtttacaaaagcccctctagagaattcagttggacaggtcataagccagttctgataaacctaggggtccactacagttagaatatctgacacatttggctgggcatagtagctcactcctgtaatcccagcacttttggaggccaaggcgggcagattacctgaggtcaggagtttgagaccagcctggccaacatggtgaaaccctgtctctactaaaaaaaaaaatacaaaaactttgccgggtgtggtggtgggtgcctgtaatcccagctacttgggaggctgaggcaggagaatcgcttgaacccaggaggcagaggttgcagtgagtcaagatcacaccattgcactctagcctgggtagcaacagcgaaactccatcttaaaaaaaataaaataaaaagaatatstgacacattcgcagtggatgttatgtgggagtgtgctcagtcgtagtagcagactactctatatatattctcattctaggcttatggtgatttacccctatttttcacaagtaggtcagaatgtttctgctggataaaatgatgtcattagctgatctaggtagtggcacataagacatggaagggagagctggaatttcattgacacatagttgaaacaagataaatacagattttaaaatccagtctgggtcactcaggcattcaaagactacagagaggcggtagcaggtagcttaatgataatagcctgcagtatgactttctttggaaataacactgctgtagtctggactggtttccctctatatctgttgcacagctattttcctagggagatcccattctagggatctcctttaatgtagttcttggatttctttgtttttggcatctcaggttcctccccacccccatactttcattttggtggagcacattctctagtagcttctaaagaacaagtgcatgagatggaatttttagagattggctgcatttaaatatctgtatttatttttgcaaatatctttattctattcatagtttggctggattggaagtttttccttcagtattttattggcagtgttgaattgtttttttgcttccagtattgcttttgtgaagtccagagctcttccaattcctgattctttgtatgtgacttgttttattctttattttttgcttttctgtctctggaatcttttttttttcttttctttttttgagatggaatctcactctgttggccaagctggagtgcagtggcacaattttggcttactgcagcctctgcctcctgggttcaagtgtttctcctgcctcagcctcccgagtaggtgggattgcaggggcctgccaccacgcctggctagtttttctatttttagtagagatggggttttgccattttggccaggctggtctcgaactgctgacctcaagtgatccactcacctcagcctcccaaagtgctgggattactggcatgagccaccatgccctgctaggaatcttgaatctttgtttttcgtatccagaaatttaactctgaaatatatctacacaaggccaaaggaagagaacagatatatccacagtacacttggctgttctctttctttagccttgtgtagatatattttcatcccctgtgatgcctacttgctagactctttcattctagcaacttctgtctttctgttctaggcagtttttttgaatgattttcttgatgatttcctctcctgcattttactgttctctcctttttaatttttgttcattgttactatttttgagatgaggtgttactatattgcccaggctggtctcaaacttctgagctcaagcgattttcctgtctcagcctcccaaagtgctaggattacaggcatgagctactgtcccagccctgccaaattttttttttttctttaattgagactgtgtttcactatgttcagcccaggctgttctcacacttctgggctcaagcagtcctcctgcctcagcctcccaagtagttgggtagctggggtataggtgcatgacactgcacttggctgttatctttctttggccagccattatttgatattataccttctgtaatatactctaatatgctcaccttttaatttcttgctttttattaatttttttgtctttttatttctttgaaattttatctgctttgtcttttaatccttttgttgactttttgctgtaatgtttaagttttcaatgatttttttttttttttttttttttttgagactgagtctcactctgttgcctaggctggagtgcagtggcatgatctcggctcactgcaatctctgccctccaagttcaagcgattctcctgcctcagcctcccgagtagctggtattacaggcgcctgccaccgcacccagctaattttttgtatttttagtagagatggggtttcaccatcttggccaggctggtcttgaactcctgaccttgtgatccacctgcctcagcctcccacagtgctgggattataggcgtgagccactgcgcccagcctttcaatgaatatttttaaattaaactagtttaatttttcaagagctctgttttctgtgtgttttgtaccactctgttcttatagatggatgcaataccttacctttcggattttgatctttcaaaggattttataatttttggttttttcagttacctctaatttgcttttttctgtgttgttgttttgagctcttccctattaagaattttttttcctggctgtcttatgattatgaaggaaagactaaactgatttggaaattgcaagcatatggttggcacttgttgaccttgagtttcactatcgggtgatctggttggccatgtcctagggaattcataatatgaagtctttaggtctttttctcttagactagttggcttccagagaaaagagttccaatctcttgactggagggtggtaagagaatggtttccagtgttctaggatctagttgaagaacagagagtggggtggaggattcttagtggttagatatgttcatgaatccccctaatttcagcatcgcatctgtacctgtgccttcaacagttgttagcatctcccaggctaggagccctctcctactgtcttcagagaataaagctctagaagggcagtcaccttccaacctgaagtgaggtggggatctaggcatctaagtaatttttagtcttcacccagtgctccttgtatgaggctccccactgccctttttaattttcataggcactagggcagtcagtaattattgaggtttctatggtaaactgggttggtttttggctttcctcactgctggtatgaggtttagccttctttggtgcccgtcattcatttatctgctttctgacttgcaaattgtgttgcttttctttcgtattttcccccatttttataggtttatattatttcagaaattgcatttatataccatatatatgacatatgagtatatatacacacacacatacatataacacatatacaatgaccccaaacccccccacacacatatttatcctatatgtgtaatagacactcacatgtgtgcagtctttttacagatgggatcattaacatattacaaactctttttttcccctacttagtggtataacttataaatctttccaaatcggcacatccacatctactgaatagatatatcataatttatttaattagttgctaaaaaaagacattttgatcctttcccatatttttcctgttagttcaacaatgagtatcatatttgcatacttttaacattttaagtattctcttcatattttcttttttcagtgaattttattttttatctttggccacagatcaaattgaagacatttcaaatatttccagttaattaatgatcatcatatgaatgcatatgtgtatgtatatgtatacataaaaatttgatgccccttgtgagtagagaacacagacagctaagattctatcctcttgtcctgagatgggttgggaataaaactagaggtacagtggtagttggagttctgtggagaaattgaatgtctctggagaataatcttctacattctggcagtggaaatcccctagagtaaactagatccgggatgaatcacgtaaagcctatcagttaataaatcctactaacagtagtgtcaatcaagttttaatagggcattcttaatcatctcttgttaatctcagagaacctacagtatctataaaacaagaataagctgggcacggtggctcacacctgtaattccagcattttgggaggccaaggtaggcggatcacctgaggtcgggagttcaagaccagcctgaccaacagggagaaacctcgtctctactgaaaatagaaaacagttagccgggygtggtggcacatgcctgtagttccagctgcttgggaggctgaggcaggagaatcacttgaacccacgaggcggaggttgyggtgagctgagatcacgccattgcgctccagcctgggtaacaggagtgaaactccgtctacaaaaaaaaaaaaaaaaaaaagaataagatgcagtgaaaaagaaaagaataagatgcagtgaaaaagaaaagaacaagaaagacttggagataaaaatctaaaggccaggcacagtggctcatgcctgtaatcccagcactttgggaggccaaggtgggcagatcacttgaggtcaggagttcgagaccagcctaaccaacatggtaaaaccgtgtctctaataaaaatattaaaattagccgaatgtggtggttggtgcctataatcccagctgctcaggaggcagaagcatgagaattgcttgaacctgcaccactgcactccagtctgggcaacagagagagaccctgtctcaaaaaaaacaaaaacaaaaaatctaaattaaaattcagtagagctgggcacagtggctcacacctgtaatcccagcactttgggaggccgaggcaggtggatcatctgaggtcaggagtttgagaccagcctgaccaatagggtgaaaccccatctctgctaaaaatacaaaaattagcttggcgtgtgcctgtagtcccagctattggggaggccgagacaggagaattgcctgaacccgggaggtggaggttgyagtgaactgagatcttgccagcgcactccagcctgggcaacagagcgagactctgtctcttaaaaaaaaaaaaaaataagcaaattcagtagagcattaagaattttaaatggaggaaatcttcagaaagtttaaaagagcagtgatggaaattttagagaaaagataggttacataatgtattaatctaggaagggggaactatgaaaacagaggagagaggccaggcgcggtggctcacgcctataatccctgcactttgggaggctgaggtgggcggatcacgaggtcaggaaatcaagaccatcctggctaacacggtgaaaccctgtctctactaaagtacaaaaattagctgggtgtggtggcatgcacctgtagtcccagctactcaggaggctgaggcaggggaatcacttgaacctgggaggtggaggttgcagtgaactgagattgcaccactgcactccaacctgatgacagagcaagactcagtctcaaaaaaaaaaaaagcaaataactaaagaaaaattccagaactgacagacacaaatctttacattraaattgctcactaggtaccgaataaattaatagagtcataccgtagtacatcattatgaaattataaaatatcaagaatgaaaaaatcaccacaaaggaatgagaaaccaaaggaaggttatggcttataaccccttaagcaaagaagcaatacattcggaaggattcagaactctgaaggaaacaatttttaacctagaattctgtacctcgtgaaactctcaatcaatgaagtttgagggtaaggatgtattcagataagtaaggacgatgaatatttatatcccatgtacctttttaaggaaactactcgatgagctctagtacagatgagataaccaaggaagaagaagatgtgagattcagttaacagtggacctagctcaaaagaaagcagtgaggaggattccccggatgacagctgttagagcagacccagagagataccacccagatgctactgcagaaaatagctctctagggtgcagagataggatgaataaggggaaattggatacaacgcttaatttaatgaaataaaataatgtaaaagagatacaaaggaagatgtaacatgcagaaaagtagttggaaactcttggaaaaataaaatgctgtataagaaaggaagtttatcaaatgtactacttatttctgcagggaaccacatttacatatgttataaatactatattgtaaaaatgaaagataactatatatagaaaggatggtagaggggagatatgggtgttgataagtaagaatccccattgctcatagaggataaactttataaataagtcagcaggccagggacgttggctcatgcctataatcccagtgctttgggaggctgagatgagcagatcacttggggtcaagagttcgagatcagcctgtctaaaatgatgaaacttcatctctactaaaaatacaaaaattagctgggcatggtggcatgtgcctgtagtcccagctgcttgggaggccgaggcaggagaattgcttgaatccaggaagaggaggttgcagtgaactgagatcacaccactgtactccagcctgggtgacagagtgagattccgtcacacacacaaaaaaataaataaaacaaatagtatattatgaatagtaagagatgactataactatcagatgttaacactttggaggtggaaaaacagatttttatcctctttttggtttttcattatgagtctagatttgtttttaatgatgtatatgtattgttttgataatttaaaaaatgtggccatgcagacacacattgtaaaggtgaaatggtttcacaatcttagttatgtcagttatgttttacatttaatgaatttagctaaagaacatgcatggatttctcagtagagagctatagttaaggttgtaagttctggagttaaatgacttagatttaactaccttggggggtagattaacctctaaaccccagtccctttttttttgctttgttttgttgtgttgctttttgtttgtttgtttttcttatttatttaagaccctagtctcttgaactataaagtggggctgataacatgtatctcgtagcattgttctgaggattgaatgagatggtctgttcaaagtgtatcaaaagtaaccagcatgtagtaagttctcaggaaatgttatcttaaaataacaataaaatgatttaccagaatgaacacactgaagcagtaagttccataattaattttacataagttatcagtaactaaaattaattatatctattctttaaaacatcatggaaatcattgattacaaaattattggatattcattattacattgaaaaatgaagctggccaggtgtggtggctcatgcctttaatctcagcactttggaaggctgaggtaggcaggttgctagagctcaggagttcaagaccagccttggcaacatgacgagaccctgtctctacaaaaaatacaaaaattcactggatgtggcacacctgtagtcccagctacttgggtggctgaggtgggaggatcatttgagcccaggaggttgaggctgcagtgagccatgatagtgcctggggaacagagtaagaccctgtctcagaaaaaaatagagagagagagagaaataaagaaagagaaaggaaagagaaaggaagggaggcagggagggaaagaaaataaaacaaaacaaaacaaaggaaagaaaaatgagaggccaggtgcagtagcttgctcctgtgatcccagctactcaggaatctgaggtgggaggatctcttgagcctaggagtttgaggctgaagtgcactgtgattgtgccactgcactccagcttggatgagagagtgagaccgtctctgatgaaaagaaaaatgaaggctatagtttcataagagtataaacttggggccaggcgtggtggctcacgcctgtaatcccagcactttgggaggccgaggagggcgggtcacgaggtcaggagatcaagmccatcctggctaacacagtgaaaccccgtgtctactaaaaatacaaaaaattagccgggcgtggtggtgggcgcctgtagtcccagctgctcaggaggctgaggcaggagaatggcgtgaacccaggaggcagagcttgctgtgagccgacatcacgccacttacacttttagcttggatgacaaagtgagactcaaaaaaaaaaaaagaagaatattaacttggaggtagcacaatctgggattatatcctgactccactattttctcagatatattatgataaaaatattatacttatataaacttggagaagcttttttcttttttatttcagctttattaaggtacagtttacataaaagtgatgacttttatgtttaaaatgtgatgggttttgacaaaagtatacagtgttacaaccatcaccgtgatcgtaatagaacatttccatcrttggaagagcctcttagcctctttgaaacccagtttctttgcatgttacatagagataaaagccagcaacctcgggtggctgtatacacaggacctaatatatacagtccctggcacatagaagacattgctagtgttcttatcatactcatcatttttttttctgttattttctagcttctgaaagttctgctgaagacagtgagcaggaagatgagagaggtgctcaagacatggataataatggcaaagargaatctaagattgatcatttgaccaacaacagaaatgatcttatttcaaaggaggaacagaacagttcatctttgctagaagaaaacaaagttcatgcagatttggtaatatccaaaccagtgtcaaaatctccagaaagattaaggaaagatatagaagtattatccgaagatactgattatgaagaagatgaagtcacaaaaaagagaaaggatgtyaagaaggacacaacagataaatcttcaaaaccacaaataaaacgtggtaaaagaaggtattgcaatacagaagagtgtctaaaaactggatcacctggcaaaaaggaagagaaggccaagaacaaagaatcactttgcatggaaaacagtagcaacagctcttcagatgaagatgaagaagaaacaaaagcaaagatgacaccaactaagaaatacaatggtttggaggaaaaaagaaaatctctacggacaactggtttctattcaggattttcagaagtggcagaaaaaaggattaaacttttaaataactctgatgaaagacttcaaaacagcagggccaaagatcgaaaagatgtctggtcaagtattcagggacagtggcctaaaaaaacgctgaaagagcttttttcagactctgatactgaggctgcagcttccccaccgcatcctgcyccagaggaggrggtggcagaggagtcactgcagactgtggctgaagaggagagttgttcacccagtgtagaactagaaaaaccacctccagtcaatgtcgatagtaaacccattgaagaaaaaacagtagaggtcaatgacagaaaagcagaatttccaagtagtggcagtaattcagtgctaaatacccctcctactacacctgaatcgccttcatcagtcactgtaacagaaggcagccggcagcagtcttctgtaacagtatcagaaccactggctccaaaccaagaagaggttcgaagtatcaagagtgaaactgatagcacaattgaggtggatagtgttgctggggagctccaagacctccagtctgaagggaatagctcgccagcaggttttgatgccagtgtgagctcaagcagtagtaatcagccagaaccagaacatcctgaaaaaggtgagaaggaaaatgtgtatgttgacttattttagggtttcccstcttaaagtttcaatgatttcacagtatctcttgttataacctgaggcgattaagtgtcatatttgtgtgaacatggtaaaaatggaaattttaaaggtaatttgaaaatgaatagtggaatgcatttaaaagcttgagaaggctttaatgtgctttgcttgagccatccatggcattttattgtggaccagaacacatgctagaaattgcacccaggcccaaatccaaacctgtttgagaattcattatatgcagtggttgactatatggcatgagcagcttaaatctatttctgtaacattgtttttgcaattgtaatgtgcagtttctcacgaacattttgatttattgacagacccctccacccttaaccaaatactgtatgtaggggtttggagcaaccaactgtccaggcactgctttcctcagacaaccgtgtcaaactgattttcaagcctgactaacttgtgtgagtttgtaaaggaatttgatgctttcttagatgcatagcttccaaattgaaggaccaatgtgtacgttaataacctacagtaatacttttttgattttccgtgaaattgttaaaagtggaaattcaaatcggtaccttcccaaagtattagtgcctttcgatggtgccatagccatacttctgtcatcatttttcttataaaccacttcattcaggtatctttaaatcagtatactctaggctgacacctggctttggaacacacttttccatcgtaaagacagagcactggagtatgttttttatataccgtaaaagattttagaatgctagctttaggttttcagcaaagcttaaagagatatggtctagatcaaattagttaattctatgttttctcaggaatcttgacttaaaacatttctgttttaaaataaattaaaaaaatacttgcaattaaattgaaatgttctttgctttttttcacatttacaagtataactactatgattttatctgtgccatactatctcatgcaactgaactatccaggcatgactaatcttcaaaatgaaagaatcctttatttcagaatattaggctttcaacagtaagattttactggccaggtgtggtcactcacacctgtaatcccagcaatttgggaggtctgggaggtcaaggcggtggatcgcttgagtccaggagttcaagaccagcctggacaacatggcaaaaccccatctctaccaaaaatacaaacgtcagccagctgtggtggcgcatgcctgtagtcccagctaccttgggggctgatgagggagaatcacttgatcccggaaaggctgcagtgagccaagatcacgccactgcactccagcctgggtgataaaacaagaccctgtctcaaaaaaaaaaaaaaaaaaaaaagaaaaaacaagaaaagaaagaaaaaaacaggttttattgttataggttttcttgggggttttttttttgagatggagtctcgctctgttgcccaggctggagtgcagtggtgtgatctgggctcactgcaacctccgtctcctgggttcaagtgattcccctgcctcagcctgctgagtagctgggactacaggcgtgtgccaccatgcccagctaattttttgtagttttagtagagatggcatttcgccatgttagccaggatggtctctatctcttgacctcatgatctgcctgccttggcctcccaaagtgctaggattacaggcatgagccaccgtgcctagcctattgttgtagtttttaagaggttgtatccttattatgttcgtaatatcttacaaaagattaaaattaacaacaaaaaaaaagaggatatcttctctgctaatagactaagtcaacactgcccttttgaatcttaatcttgactaggttaataattgtggaatttgaaagctactcctaaatttagggtaatttatatctctttagaaataattggtgtttttctttttgttgggttttttttttttttttttttttttttttgagacatagagttttgctcttgttgcccaggctggagtgcagtggtgcaatcttggttcactgcaacctccacctctcaggttcaagagattctcctgcctcagcctgctgagtatctgggattaacgcccggctaatttttgtattttgtttagtagagatggggtttcgccatgttggccaggctggtctacgaactcctgacctcaggtaatccacctaccttggcctcccaaagtgctggaattacaggcatgagccaccgcgcccagccagaaataggttcttaagcacctgtttcacatggccacattttaataaatttacttactatgaatattggagactccccactatatcacaagttaaaatttaagttttactatttagatgtagttttttcctcttaatttactctacattgaaggtttttatttcttagtatctgaacactttagaattaaactctcttggagagaaacctgacaattatggttctgtgcttcagtatggtcaatatctacgtctcctttatgtttcacttaaattgtgatattaaaatgacattaggtgggtcacatacttggtgtaaaaaataaaaaagaaatattaaaaatttaaaaaggtattaggaaaagttgtaagtaagattatatgacccattaaaaaaaagctaggaagttgcagacagttaattacttgtcctgtttttgatcaaggaagttaggttttatacacagaaggttgatttggtgtctgacattggaactgaatggagatagtactttattagtctctggagaaaaaatcttactttatatagtctgagagataacatatatgaattagacagaaatatagcagatgttaaggaccaaatgagtagtatagaaaaatgctacagttcagagtagtgattgatcagtgaagcctggaacatcttagtgaagatgtaggacttgggctagtccttgaagaaaagggagacatttatttgtaatgttttgcaataatttcccaccaagaagatgagacgttttttagaactactatgttggatttgtaaatggtatgcatgttaaccaaacagtgccctgggagcttagttattcttgacataaattggtaaaaaagaaccaagtatgaattactgctaaaatttacctcatttatatcatttaaaaattatattaatatgattataagacataatgtcattaacattttaacctgtgattaagtcttaatattttggttttattgaatcttaacaaatttcagtttttattttcagcatatacttttaattactaggcttataaactcccagtactatattaaggactattttcagtttatatctgatttttttaaagaaggatgtgcatactttgtttgcctttttaaaaaccctgacttttattatgtataagaattgagcttccattaatgacagtttatttaaaaattgtagtaagttctgtgacaacttatraatgtcataaagaacatgtagttttggattgttctatgtttctaaaatgtggaattaatttatacttagggaatgttggattttattttgtgttacttaattcctttcccttcatagcctgtacaggtcagaaaagagtgaaagatgctcagggaggaggaagttcatcaaaaaagcagaaaagaagccataaagcaacagtggtaaacaacaaaaagaagggaaaaggcagtaagtgtgaaatctctaatttttaaaatataaaaataatagctgataattttacccccagtaagaaaatggtattcagggtatgggatagtacactattttgattttgtctgtacactcaaaaaaagtcacacaaattctgtaaggctacttgctttaaaaaacaaaatagacaaaaaaaaaacatgcactaggacaaatacctaatgtaaatgatgagttgatgggtgcagcaaaccaacatggcacatgtatacctatgtaacaaacctgcacattgtgcacacgtaccctagaacttaaagtataataataaaaagaaaaaagaatttctgcaaaaacaaacaaaacaaaacaaaaaaaacacaggttttctaatcttaggtaaattctagttttaagcaagttggtgttattcagcggtggtattgattgctgatgaaaaatcaagtaatctgtttttgaaataatagccaatatattataaacatcaacatatttgttacctttgtattccacagttcttttcacttgctataaaatgtatcacacattgtgaaatatttcaactacatgttatttttattacagtgaaattgattgcttagtaattcttcaaggcaaaatcagcatagaagtataacaatcaagataactttagaactataattccaacaactccagtctacaacatttgtctttggtactctatattatgtgacctgagagtaactacaaacaatactttttgctaagtatgctccaactttagcaacgactccgtgcatcaatccacagaaaatatatatactgtatttcttctgagggctgcacattttatctctcttttgtagacaaagtaagaagcagaaaatatgtaaagaattttttttcaggtgccccacactgacctcctgctgctcttccaggagactcctgccacctccactgcctgacctttgctagcagccggcttggctgcacttcagtgcagaaaagggttattcggccagctccccgaggttctgctgagcccatatgacttccaggcggtgaatatggcgtccctggggccccgggcggctgtgctcagcaaggccatgaaagccaggctgagacagtccactgcatagagtggggccaagccttgggtggcttagctaggagttgccaggggttccagagcagcagtgggggagctgggagggaatttgtgtatatgtgtcaaccagtggtggagtttctttattcccaaaatttcacagtgggaggagttgctgctatctacctttactatttggaataatttctggctttgagagtttaactcctttttttttttttttttttttttttttttttggtgatgttgttaagtgaaaaatcagtaaatatatgccaaatcagtcagtcatcaattgtttggtgtaactggtaggatatttaaagtgttttttctttcactgtgatgtttttgtcttcaagagtttactatttaaatgacatttcctaagagagcgcatcttcaatgagttatttagtatattcatataatacagagatatagtgttctcccattttacttattgggattctgccatggtaaatcagaatgagttaaccattcaagagaataatttagtaacatgaattaattctgatggaatctaaactaatactttgtatccagaaagaggttatctatggaaatactaatcccatcacctacctgttcacatggtaagctgtcaaggtcaagtatttccattttagtgctgaagtttaattagcaatagcagttgtaacataattgttacacagacttctgaattgttcataaaatactgaatattttattagggtgaaactgattattttagtcaacccacagcataggagttatttaagagtaatttcattatacatatcaaacttcagagtttattcccgaggagttctttattgaatatgatgattgtgcatcattatttgtttgtggccaaaggagcaggaaaatgttgcatatacccaatgttacatattcattgtagaggtttctacaattaatcattttaaaagatgatatattttatgtattaacataatagagtaaaaagccattcagatgattactgtatatttgacagtctaccaagcataatgatagattagtgtgagtgattttaaaagtatacatattattggcagttcaggtaagaagaattttttgtttttgcttttcctaagatgctgctgcatttgtatatgattttccaggtttctaggcaggttgttttctgtaggactaaattcaaatggctaattttaaattacctactaaaatctgtgacaaatttattgttacatttttgtttattaaatcttttctttctctttcagcaaatagtagtgatagtgaagaactttcagctggtgaaagtataactaagagtcagccagtcaaatcagtttccactggaatgaagtctcatagtaccaaatctcccgcaaggacgcagtctccaggaaaatgtggaaagaatggtgataaggatcctgatctcaaggaacccagtaatcgattacccaaagtttacaaatggagttttcagatgtgtaagtgacatgttaaattgacaagcatacaaacttcatcctagtaactctttttgttttattttgtttttgtttttagagacagagtctcgctctgtcaccaggctggagtgcggtggtgcgatcttggctcactgtaatcttcagcctcctgggttcaagccatcctcctgcctcagcctcccaagtagctgggattacaggcacgcgccaccacacccagctaatttttttgtgtgtttagtagagacagggtttcaccatgttggccaggatggtctccatctcctgacctcatgatccgcccgcctcggcctcccaaagtgctgggattacaggcatgagccactgcgcctggcctttttttttgagacagagtctctctgtcgcccaggctagagtgcagtgcagtggcatagtctctgctcactgcaacctccatctccctggttcaaatgattctcctgcctcaacctcccgagtagttgggattacagacgcccaccaccacacctggctaatttttttgttgttgttgtatttttagtagacatggggtttcaccatgttggccaggctggycttgaactcctgacctcaggtgatccatccgcctctgcctcgcaaagtgctgggattttgggcatgagccaccatgcccagccccaatcctagtaactcttcatgccaatactctgaaaaagaggctttaccaaacttaatagatgtactaatgtacaatgtatagaccttatttggatcccggtttgaataaataaattggttaaagaaaaattttaaggcagttgaggcaaatgccaacactgactagatatttctgatatggctgggcgcagtggctcatgcctgtaatcccagcactttgggaggctgaggtgggtggatcacgaggtcaggagttcgagaccagcctgaccagcatggtgaaaccctgtctctactaataaaacaaaaaattagctgcgcgtggtggcacgcgcttgtagtcccagctactcaggaggctgaggcaggagaattgcttgcacctggcaggtggaggttgcagtgagccgaggttgcgccactgcactccagcctgggcgacagagtgagaccccatcccagaaaaaaaaaaaaagatacttctgatatgatgtcggtaatttgatttaaaagtatctggtgttaggggtgaggaatggataggggtgcagatgatacaggttttgccataaattgatgattactgaagctggataatgagtacatggggttcactatccttctctctatacttttgtatatgtgagaaatcttcataaatcttcatttaaaaaaaggtatatatatatatgttttaggtatacatatatatatatatatatatatatatatatatatatatatattttttttttttttttttttttttttttttaaatagagacgaggtctcattatgttgcccaggctaatcttgaactcctgagctcaagactgagctgatccttccacctctacttcccaaagtgctaggattacaggtgtgagccaccacacccagccaatatgtatatttttttaatactactctagagtttttcacacaaggaaataccttaagtattcttaggagattgaagattgctttagagctttttaaaattgccttctaatttaaatttttacacactctttaaaaaaacctaaaaaataacagagaacagaagagaaaaatttatccacagtcttgttactcacaaaatgtgtacaatttagcattttggtgtctttccaggttttttgttttgttttgtttttgtgtttttgttatttttagacagagtctcactctgttgcccaggctagcgtgcagtggcacaatctcggctcactccaacctccaccttccagattcaagcgattatcctgccccagcctcccgagtagctgggattgcaggcacccgccaccatgcccagctaatttttgtagttttagtagagacagggtttcaccatcttggccaggctggtatcgaactcctgacctcgtgatccgcccacctcggcctcccaaagtgctaggattacaggtgtgagccaccgtgcccagccccagttttatttttaagtgtgattttttactgtggtaatactgtatatggatgtggatatatgtagatcttaaggtgtttaatgctgtacatattcattcaacaaatactgtgcatttattatgtgccaggcattgttctaggctagataaaaaatttggaaaacaaatatttcagaagccttagttttttagttcatctgcctcaaccttattcagcagccatgctcgatgttctctcctttttgtatgttaaaattttctttaaaaatgtctgttaatgaaagctttaaatttatagcggacctggaaaatatgacaagtgccgaacgcatcacaattcttcaagaaaaacttcaagaaatcagaaaacattatctgtcattaaaatctgaagtagcttccattgatcggaggagaaagcgtttaaagaagaaagagagagaaagtaagtatttttactttatttttatttatttatttattttgagacagagtttcactcttgtcgccaggctggagtgcaatggcgcaatctcggctcactgcaacctccacctcctrggttcaaacagttctcctacctcagcttcctaagtagctggaattacaggcatgcaccaccaagcccggctaattttgtattttttaggtagagacagggtttcgccatgtcaatcaggctggtctctaactcctgacctcaggtgatctacctgtcttggcctcccaaagtgctaagattacaggcgtgagccaagagtgccctgccagtatttttactttatttaaacataaaccagaatttctcactctgcagttagactgccatgactttgtctattttcaggcaaattctttaatttctttatcttattttcctcatctctaaagtgaaattatctcaaataaaaaaattatttcagatcataatattcactttcatagagtttatactctaccaaaaacatcctaataagataatttcagatattgaaagcactatgaagaaaatgatgttaaggtagtgattggatgggttactttagattacaaatggtcagtatatttttgttgatacctgaatgacatgaggaagtgagataaattaaaatctgggaggaggccgggcacagtggctcatgcctgtaatcccagcactttgggaggctgcggtgggtggattgcctgaggtcaggaggtcgagaccagcttggccaacatagtgaaaccccgtctctactaaaaaatacaaaaaattagctgtgcgcggtggcgggtgcctgtaatcccagctacttgggaggccgacgcaggagaattgcttaaacccaggaggcagatgttgcagtgaacggagatcatgccattgcactccagcctgggcaacaagagctaaactctgtctcaaaaaaaaaaagacatctatccagaaactccttctaaacaatgttttgtaaatatagtcaccacaaattctttataatgaatgattttgctaaatagagcctctctactgggttagcattaaaagtcggttcctaaatactattttaagaaaaatccataggaaaatgcttatcctggttaccaaagaaatgcaaatcaaataaggtatcattctttttttttggagatggagttttgctctgtcgcccaggctggagtgcagtggcgcgatctcagctcactacaacctccgcctcctgagttcaagcgattatcctgcctcagtctcccgagtggctgggattacaagcgtgctgccaygcccagctaattttttatttttagtagagatggggtttcaccatgttggccaggatgcaggatggctcgatctcttgacttcgtgatccgcctgcttcagtctcccaaagtgctgggattacaggcatgagccactgcgactggcccaaataaggtatcattcttaccaaaaaaattaaaactaaaaccaatgcaggaacagtgtagtgaaatatataagttatgagttgtaatatagtagaatattactcaactttgaaaagaaaaggatctgtatgtactgatatggaacaatctcttaaaatatattgtttaaaaaaaagtcagacactgaactatgcttccacttgtgtgtgtgtggttttttttttttttttttttttttgagacggagtctcggtcagtcaccaggctggagtgcagtggcgcgatcttggctcactgcaacctctgccttccggttcaagcgattctcctgcctcagcctcccgggtagctaggactacaggtgcgtgccgccatgcccagctaatttttgtaatattattattaatttttgagacagagtatctctctgtcatccaggctggagtgtagtggtgcaatcttggctcactgcaagctccgcctcccgggttcacgccattctcctgcctcagcctctctagtagctgggactacaggcgcccaccaccacatctggctaattttttgtatttttagtagagactgagtttcattgtgttagccaggatggtctcgatctcctgaccttgtgatccgcccacctagtcctcccaaagtgctgggattacaggtgtgagccaccgtgcccggcctccacttatgtttttaaaggtgttgctatatctatatattttaaatttgcatatcatatctctagattctagagataaaattcctgtagaacaggggttgcaaacattttctgtaaagagacaataaatatgttaggctttgtgggccatgtggtctctgtagaaactacttatctctgccatggtaagtgtgaaaactcccataggcaatatgtaaacaaataggcatggctgtgttccagtacaatttttctttccaaagacaagtaagccagatttgcccctggggtagtttttttgccagccttttttctagagttgtaatgaatatgaatcaactggtagcaatggggaagggaatttgggtgattaggaggttcctggatgagagtgagatttgcttttctatcctattacccctgtactgaatgaattttttaaatctgtgcatgtatttaaaaatattaatttatgaacactaatttataacagagaggccgggcgcaattgctcacgcctgtaattccagcacttagggaagccaaggcaggcagatcacctgaggtcaggagttcgagaccagactggccaacatgacgaaaccccatctctactaaaaatagaaacattagccggacatggtggcgcatgcctgtaatcccagatactcaggaggctgagacaggaaaattgcttgaacccaggaggcaaaggttgcagtgagctgagattgcactgctgcagtccagcctgggcaacagagcaagacccccatctcaaaggaaaaaaaaaaaaaaggaggctgaggcaggagaatggcgtgaacctggaaggcggagcttgcagtgagccgagatcgcaccactgcactccagcctgggcgacagagtgagactccgtctcaaaaaaacaaacaggctgggcgcggtggctcacacctgtaatcccggcattttgggaggctgagatgggcggatcatgaggtcaggagatcgagaccatcctggctaacatggtgaaaccccatctctactaaaaatacaaaaaaattagccgggcgtggtggcgggcgcttatagtcccagctactgggggggctgaggcaggagaatggcgtgaactcaggaggcagaacttttagtgagccaagatcgagccactgcactccagcctgggcgacagacagagcgagactttgtctcaaaaaacaaacaaaaaaaaaaaaacgaaaaaaggaaacagtgagagacttcctctgatgaaaataactaatgtgttatttgctttgtaaacctagtggcggagaatgcaacagttgagctatgcactgttttgatccaacttgaagaagcaattaagcctcccactcttgtcaccatttacatgtacaagaaaactcctaagtacagaaagatggagggattaggaggggacaaatgatttttggatggattgcagatttttcctgttttgatacttgtttcactgttacaaaaagtgtattctgtattttatttctgtgtcttgtagactaggcacagttctttccctctttgacccacgcaggagccttccctggtctgtccttttcattacttctgtagttgggcactgtctagcttcttgagctacactagcttttcctttcttcacatcgtagaactgtgagaattgaccactgttgttgtaagctaaatgattttggacaatatagcggaattttagttcagaggactagtattttctgtctattgttagacataaatttttattaagctcttggtttggtctcccttttccttaggtgctgctacatcctcatcctcctcttcaccttcatccagttccataacagctgctgttatgttaactttagctgaaccgtcaatgtccagcgcatcacaaaatggaatgtcagttgagtgcaggtgacagcaggacttgctaaagcactttgcacttaatggctgttgagggccactttttttttatactgcacagtggcacaaaaaaatatcagacaagcactattttatatttaaaaattgtttcttgacaagctgacttggcacttaagtgcacttttttatgaagaaaaagtacaatgaactgcttttcctcaagcaataattgtttccaacttgtctgggaattgtgtgtctggtaactggaaggccttccactgtggcaaatggaggcttttcactgcctgtagagacaatacagtaagcatagttaaggggtgggtcagaacatgttaagataacttactgtatatgtattcccttgtattttgttaaagctggaacatttgatatttttccatttatttatgaaaaaatatgaacctattttcatttgtacaaggtaattgttttttaaagcaagtcaccttagggtggctttaattgtataagtcaagcacatgtaataaattcaaaacctgcagttaacaggatattagacatcaatcctggtaaccaaatattaaagattctctttaaaaaagactgaacatgtttacaggtttgaattaggctaaaaggtcttgcagtggcttttcatggcccttcaaattggaatggaactactgtactttgccatttttctataaatcagtatttttttttaattttgatatacattgtgtgaaaaaagaaaatggctaataaactgtattaaatcttaaacaatgtataaagattgtacttagccagttcaaagtgtatatttattcataatgaattataacagttatatttttgtgttttcttgtaaatgtttcttttcccttaaatacagataattcatttgtattgcttattttattatgagctacaacaaaaggacttcaggaacaagtaatgtattagtatggttcaagattgttgataggaactgtctcaaaaggatggtggttattttaaatataaatagctaatgggggtggtaggcctataaaattaaatgccttgtataaaatccaaaatgaatgcaaaattgttttcacttgtattgactttatgttgtatgattccaatctctgttctgtttggcacttgtatttaattcttcacctttgtaagacatttgtatattgtggatgtgttcattcaagctatttaatatctggcactgttaatacacagtactttattgtacagactgttttactgttttaattgtagttctgtgtactttttttggatggggctggcatgttttctttgtttcctggcaatacgacgtgggaatttcaatgcgttttgttgtagatgctaacgtgtcagaatcctttacattcaacttttctaagaaaagcattttcagtcttgtagtgtrtgcttacagtaactaattttgttgaaaatggtttcaagttattcaaatttgtacaggactgtaaagatttgttgacagcaaaatgttgaagaaaaaagcttatagaataaaagctataaagtatatattaggatctgcaaacaatgaagaattatgtaatatattgtacaaatgtaagcaaaggctctgaaataaaatgccatagtttgtgaatccttgatttttgtttctaaaagatttagtaattttagttcatttctgtatgtgatgactgactggaacatacatatccagcacgtattatcacaggggattaattgatacacaaaaaaaggaagattctacctatgaaaattaaaagtccattaatcagataaggaatgtattaggcattcttttttttttttttttttttggacacggagtcttgctctgtcacccaggctagagtgcagtggcgcaatctccagctcactgcaacctctatctcccgggttcaagcaattctccagcttcagccttccgagtagctgggattatagacatctgccagcactcctggctaatttttgtatttttagcagagacggggtttcaccgtactggtcaggctggtctcaaactcctgacctcatgtgatccacccaccttggcctcccaatgtgctgggattacaggcgggagccaacacacccagcctaggcattcttttatctttgcacacactattttgcttgagtctgaatttaaatatttttcttatcacttgaagaattgtccaaatttgaaaattaagtgttttttttaaaatttatttaacacttgaaaccattaccagcggctttttaaaatttttaatttagttagacctttccgggtcttttatacttcagtgtgttctattgcacattgcaatcatctggacattgttaaaagtatattcagtactcacaccccactcccaaggagttatatttaattggttgggggtagtacctggatgttgatctttaatttttaaaggtctctagtgatattaatatgcatctgggttgagaaacactgctttgccgcaaacttctaaaaatctataatctagttttttggccccacttattggactttctaccaacagaaaacctttcttggctgggcgcagtggctcaacgcctgtaatcctagcactttgggaggccgaggcaggcggatcacgaggtcaagagatcgagaccatcctggccaacatggggaaaccgtatctctactaaatatacaaaaaaaaaattagccaagcgtggtagtgggcgcctgtagtcccagctactcgagaggttgaggcaggagaatggcatgaacctggggggcggagcttgcagtaagccgagatcgtgccactgcactccagcctgggcaacagagcgagactccgcctcaaaaaaaagaaaacctttctttaatacagagagaggccgggcgtggtggcttaatgcctgtaatcccagcactttgggaggttgaggtgggtggatcacctgaggtcaggagttcgaaaccagcctgaccaacatggtgaaaccctgtctctactaaaaatgcaaaattagccggtcatggtggcgcatgcctgtaatcccagctactagggaggctgaggcaggagaatcgcttgaacctgggaggcggaggttgcagtgagccgagattgcactccagcctgggcaacaagattgaaactccgtctcaaaaaaaaacaaaaacaaaaacaaaaacgagaaaggaaatcaacttttttaaggcctagaaagcttaaatacatattttttaaagcatctttgtggtggccctttattttcacaaaaattagtttaagggatgatattttaaatctgtggaacggtgcttcccaaaatgaattcctagaatactggtccctggaaatgctctgggaatttataaccaaatatattttggaaaatctatgtatagcacattcttagagaatcacagtgtttgcatattaaaaactttgagaaggcctgtgaagagatacctgcctaataacttcctttaccctactgttttcaatcctacctaatcatgaaaccctgttttttgaggagctcttaatatcacatactgagtatgttatagaaacagtgctgaataggggaattattccaaattttggtggagtcgagatttatgactttgtgcctctctgtctcgcctgccttcttgttctacgtcctaccttcttaagagggtttgaggattttattgaattagtagaattgacctatgtctacttctggtcacctaaactagactttactaagttagtttacaattgacatattaagatggtatgtttttcttttcttttttttctttttttgagacggagtctcactctgttgccccaggctggagtgcagtggtgcaatcttggctcactgcaacttctgcctcccaggttcaagtgatcctcctacttcagcctcccgagtagctgggactacaggcacgtgccactgcacccagctaattttttgtatttttagtagagaggggtgtttcaccgtgttagtcaggatggtctcgatctcctgacctcgtaatctgcccgccttgacctcacaaagtgttgggattacaggcatgagccaccgcgcccacccaagatgatacgtttcttaacggtgttctccaaaacgttttttttcctactgaaaaaactttagagtggggtcttgttaatttcttttttttgtttgttttgttttgttttagacagaatctcgctctgtcgcccaggctggagtataatggcgccatcttggctcactgcaacctctgcctcccgggttcaagtggttctcctgcatcagcctcccgactagctgggattacaggcgcccgccaccatgcctagctaatttttgtatttttagtagagatggggtttcaccatgttggccaggctgatctcaaacttctgacctcagatgatccacccacctcggcctcccaaagcgctgggattacaggcgtaagccaccgcacccggcctccttttgtttttttgagacggagtttcgctcttgttgcccaggctggagtgcaaatggcgcagtcgctgatctgaaactcctgggcttgcattccttccgtcttggtctcccaaagtgctgggattataggcgtgagccaccttgtcccaccatgtcctcatattttaaaaaactctcaaagcagtaagtgatctctaaatggttaaaaacagcactgaacagcaatgaagataattttaaaactatctgcaaccacagctgctttcgcagtctgttttcttctataagtatctgctacctagctgggcacagtgggtcatacctgtaatcccagcacgttgggaggtcaaggcgagcggatcacctgaggtcaggagttcgagaccagcccgaccaacatggagaaaccctgtctctattaaaaatataaaattagccaggcatggtggtgcatgcctgtaatcccaactactcgggaggctgaggcaggagaatcgcttgaacctgggaggcggaggttgcaatgagccaagatcgtgccactgcactccagcctgggcaacaagagtgaaactccgtctcaaaaaatacacagaatagaattctataattctagaaatatagaatataatttcttcactggactggatagaacagatttttgagttgtatcgcatgcatgtatggataagctttcttcatctttgtgaaataccagaagatcaagattatgggaaaccaaaataaggggcccagtaatcaaaacccagggccgagcagttgaatattgtggatttttttcataaatttctctgaagggggaagtaaaagtcacatatattcccagtcaacttggttgagtagctttcaaaaagcttaggctgtccccaaaagactcaaagtcaaatcctggctggatgcagtggctcacgcctgtaattccaaccctttgggaggccaaggcaggaggactgctcaagctcaggagttcaagaccggcctgggaaacacagtgaaaccccaatctctatttaaaaaaaaaaaaaaaaaaaaaggccaggcgcggtggctcacacctgtactcccagcactttgggaggctgaggtgggcggatcacaaggtcaggggttcgagaccagcctggctaacatggtgaaacccggtctctactaaaaaaatacaaaaattagctgggcatggtggcatgcacctgtaatcccagctacttgggaggctgaggcaggagactcacttgaacccgggaggcggaggttgcagtgagctgagatcgcgccactgcagtccagcctgggcgacagagcgagactctgtctccaaaaaaaaaaaaaaaattagctgggcatggtgctgctgcttgcagttccagctactccgtggtgggaggatggcttgagcccaggaagtcaaggctgcagtgcgccgtgatctcaccactacactccagtctgggtgacagagcaacaccttgtctgaaagaaaataagaacaaagtcaaatcctattttgccactcaaactattggatgatttaactagtaatcttttattaccctgagagtcaatttaacaaatattcactatgtacagctaatagagacacagcatacatgatgaataaaacataatccttactgtcttgcctttacatctaaagagactgtaactaacactaaagcagaccaaaaatgattatagtaagtaccatgggggcttgggaaaatatccctattgtaaatagcaaagaatttttttttttttttttgagacagggtctgccgcttaggctggagtgtagtgatgcgatcacagcttactgcagcctcgaccttccagggctcaagggatcctcttgcccgagcctctcaaagtgctgggactacaggcgccgagcgcgaaggtgcccgtctaatttcttttctgtagagaataagtctcgctagatcgaccaggctggttcaaactcctagtcctcacgcaatcctcccacttcggcctccaaatgtgttaggattacaggcgagccaccgcacctggctgcaaagaaatactaagttagacagtatctgaggtaggccttgaaggatggacattattttgcagaaggggaaagaggagggcaattacaacagaggggacaggaataacaactgtagaggcagtggagaaagcaggctagaatgtcaggggctggagggagatgagtctgggaagacgggctgagaacaccttgaagcgttttgaatgccaagtatctacttttccaggtagaatagcaggtccgcattacaatctttcgaattgtatgttgacgtgactcgttagagttgtggtttttattttggaataatgtcatgtttcagacaagttgcaagaagagtacaaagaattcctttgtactcttcacagcgattagcaaattgtaaacaccccactgcgttcacccctaaccgcatttcttgccaaacctccctccctccttttcaacaagtcagtattctacgtgtttctctctcggcttgggtggacaccccgctcctagcctggctgattcttcacactgcaggcttcaaccactcccagaagacgtccttcactcccaaaatgaggcttttctgaaacggcgaggaccaccaaccgacggcgacaaacctgctccctcacccagcgcctcccttcgccgccgcccggcggccgactgccggaggggagggggcgtggccagagagcggaagtgcccggaacccggaagtgcgagctggcgcgcagctgcagtctgggagtctttggagtaagaatggccttggaagggatgagcaaacggaagagaaagagaagtgtccaggaggggtgagtggcgcgcggcacgagtacctggggagggatgttgtacgttccctcgtgctggcgaagcggtggtgcgtggcgtggctgagtttctgtcgtccatttctagagagaatcctgacgacggcgttcgcgggagtccgccggaagactacaggcttggacaggtcgccagtagcttatttcgcggcgaacaccattccagaggtggcaccggtcggctggcgtccctcttcagttctctggagccccagattcaacccgtgtacgtgcctgtgcctaaagtaagtcactgggctttcttcccgaatagctcgttagaaccacttacatac

SEQ ID NO: 96880 - DNA, 13880 bp, Homo sapiens
gaatatgtgccaggcttgagctagacacctggagacatctatgagcaaggtagactgcgtcctgatattgctgagcttgtactctgatgggagaaaccataataaataagtcaacaaatatatagacagtgtaatgacagattataagaaatgctgtgaagaaaataaacatagtgatgagacagaaaagagaaggagcaactgtcttaggttgtgcaggcaggaacaattaacctgagatctgactggtgaaaggcagtctgccatataaacagccgagggaagaacttcccaggcagtgagggcagtttgggcaaagaccttaaggaagagagtttggcctgttctagactggtctagaaggctcacattgctgcaacatggtgagccagggtagtagggccccaaccaggctgaagaggtgttcaggccccagagcactcagcaccctgtaggtggtgcgaaggcacttgggttgtattcttatgcaatagagcccactaaagagagacatggtctgcataatgcacttatttttaatcagggagaccagctgtaaatactaataggttgaaaaagaggtggtggcaaggaaaatggagaggagtccaggcagccatttgcatgtgtgtttgtgtatttaataaggaccacgtgttccaccgttacgctggcttagtggaggatttcagactgttctatgtctcctcacttggggcttgggctgccctttcattccaccgccattcctagaggtgtcaagatacccgccttcacctttatgcagtgcttctagatagtctacaaggtccatggctgtttacagggagtcgtccacatgaagaggtcagaggaaaggcaagctcaggtgactgaagaatgccggcactgtctgttgatagacttcaatgaagaaataggaatatgagtagagctgtttttatagagccaaaaattggtttcactatttcagtaggcaaacttcagggttgcagagaaagcaggagtgtccctacagtcctgtgaagatggtttgattagagctccacaggaaggcaatggtcaggaaaagggccactgagtggttccataaactgccgctaaaggagacctgagccaactccacccctctgccaacaagaatggaggctggttgcctggcaaccatgatgccccccctcccccgtttagtattagaagttttaattagtcaagcaaggctgctcttgatgttattctcatctggtttcatctgtccaaacttattaatgctgaaggacaggggctcccacagtggcttgcctcagtccygtactgcgtgggtgaccctatctctaaaatcatagtccgtgagcactgttagagtatctaaggtctgcggctttaattttacagctgagacccagagaatttagctggctcaaggtgacacaatcagttaacagcacaagaaccctcttggaactaacgcagttccctgacaggaggttgctggttggaatttaactgaactggcttgacttgacttcccacagggaccttcttcttgctaggtacttgaaggcctgtcatgcctgtttgcaatgcaaaatggccccttgcaaagttgtgcttgtggaattagtctcactaactcacaattagggggagaacagatggaaccagtggaaagactttagaacaagggcagttctgttacgttcgagtactgtaactatagcgaaaaaaaacttttaataaagggcagccaaggaaaggtccagccagaactctcagggaaaagttggagtcagcttgcctttccaaggctcagggctctgtgggcttgaaagggctgtctgagcggggattggagggctggcacctggagtttgaatctgtggagatcagggaccgggattgcagaaggtagtactggatgcctacctttcaattagtgcattcaaaagggcaaaaggtgagggaggcaatttggtatgggtatgcagttctgagtgacatataaaaatgtgacaggctcacatagtcatggctatgatctgagactgcagggcctggttctcagggacctgtttttcagaaatgaacagcctaaggtttattcattttgtcctaggagacaggccccaggtttggaatttagcatgcatcagaccccgtgcttatctgccctgcctaatttcttttacaggttaccaagtttcaaatgaaggcacaggcagccttgtagaagaaaggggcaggaataggaagcaaatagtttaggcagttggggagataagatagggctttgttaaccaggaggctgacccagctttctgaagcgggaagaggggagtactttgcaattcaataatcactgagtgccaaccttaagtgtcaggaagggcacgaacataacaggctactaagaggggcagagcagaggccctcctcttcacagcccacattcttcactcagtgtaactctgaggaccactttcttcttagcaccaattggttctactcatctcacttcaatcttcagcagcctggggcctgtggcagtcccaaagtgagtgagtgtgtgtgtgtgtgtgtgtgtgtgtgtgtgtgtggtgttggcagaggtggtggaggggagggggttttgctggcaaattatggagtattataaagttgttaaaaacgacttagttcaattcctttttcaagaccagtattacccatgataccaaaaccagacaaagacatcacaagaaaagagctataaatcactctattctattttaaaaggtcttgtttatttcatgtttgtaaccgtaataagttatctgcctgatgcacacagcaagtcaataggctgagacactgggttgcagcagagaatgaagtttaattgtagggcagccaaacaaggagacagaaggaaacctcaaatctgtctccctgtggagtttgatggtagactgtttaagggttttgggatgaccacagtgtggagattattgatcggtcaaagagtgcagagtgaagtcaggggacaggaagatacagaaactgtattctcatgctgattccagtcctctgtgggggtcttcaaacttgttggcatcagctgtttcactgcaatttgggagctgagaatcatcttaagcaattcttaaacaaaggtcttatgagtctagtgtcagagagcctgtctattttaaacaaaagccttaagtaattctaatgtcggaaatcccatctgtaggaatgacagggatacgaatggtatctggtgctacacgacttctgtttacaaagaaatgggccaaagtgcaacctgattaatgcttaattataactctatttctgtccagaattcctgttaaccctgtaaggatggcttcgtgtttacttaattctttctctttgtagtttatctttgtataactttaaagatctagaattcatgtttatgttaacatgaccttaaattccattttgtttaacaaatactcattcattgtttactatatgcaagacattgtgcatgtctctattagtgcattaatcacctcacactggaatgatacgattgtgcatctgactcctctatttaaaggtagttcctttaaggcagtgttcatccctcactcatgtttgcatccccaccacctttcataggccattcccataatagtaggtatttaacatatgtttgaggaatttagatccaaatgtgtgtacaactttaatataaggctgaacttttcaagagagaaaatagaggagtggaaactgggagatgattctgaggtgaatttaggtatgtgtgtatgtgggaggaacaatattaatgaggaaggaggctaggaagtggaatagaatcaggccatgtcaaagagctggagtagcattttattgctaatgaggagaatgaagagtttgaggacaatgagagatcatttcatattagtttttagaaagaaaatttttgtaaaacccaataagtatcagttacacatacggctttcattgtgaataacagataacctggctgcctagattaaaacaaagaaggaaatgtactggtttgtaaaactaaaaagtccagaagtagggtggacttcgggcacaatttgatcaagatcccatcttcagttttttgtgattatcttggctttttcctcctccacgtgtagacatcatctctagactagtttctctcatggttacaagattgctaccagcagaaaccagagctatttgattcttcccccacaaatcattaacgaaaagtcctaagtttcactctgatcaatttaggtgagaccaatttaggtctcacccctcatgaacaaattaatgtagccagaaaatttggattaaactgattggctttggctgattgaggccacctccacagccaagatcaatctgcccaaatgacatgactactgcacagtagaagaaagcccaagaggcagatgagaatgtttactacgatgtggcagaataaatgtctaaggatatggaagaaattcatgaaaaagaagaacagaaaaggagaatttgtcttactttattaaaattatcaaaatgaaatggtattggcatagagaacccagacatagatatgtttatattaaaattaattcatgacaaaggtggcaatttgatagtaaagcacttttaattaaacgtgctggcataataattaatcaaactggataaaaactaagttagttagatccctaccttgtaacagaaatttaaaaattctaaataaggccgggtgtggtggcttacgcctgtaatcccagtgctttgggaggccaaggcgggtggatcacctgaggtcaggggtttgagaccagcctggccaacatggtgaaaacccatctctactaaaaatacgaaagttagccaggcgtggtggcagctacttggtaggctgaggcaggcaaattgcttgaacccaggaggtggaggttgcagtgagccgagactgcgccattgcactccagcctcatcaacaagagcaaaactctgtctcaaaaataaataaataaataataaaataaaataaaataataaaagaaattctaaatgtatcagagaattaaaagaaataaaacaaaaccacacacacacacacacacacacacacacacacacacacactaaaaacattagaagaaaattgaaagtatttgaataatattgggttggaagagacctttccaagtaagcctggaaacccagaagctgagagagagagaaagagagagagagagagagagagagagaaaaatatttgaccttaaaaaattaaaaatgcttttatgtcaaaaacatcaaaaccaaagtcaaaaggaaactaataaactgaaaaaaattttgtaaaatacatagcagaaaagagattcttgtccctaatatataaagacctaaaatgtttccaatagataaatagtagtcagggaaatgaaaagaaaatatcaactgggcaatgtaaaaacctttaaaaataatgataacagtcttggtggggtgtagagaaactaatattttcatatattgctgatagtggtataaattgttaccacctttttagaaagatatctgaaaatatatgtgaacactaaaaatatctacttttggctgggcatggtggctcacgcctgtaactccagcactttgggaggccaaggcaagcagatcacttgaggtcaggagttcgagaccagcctggccaacatggtgaaaccccatctctactaaaaatacaaaaattagccgggtgtggtggctataatcccagcacctgtaaccccagctactcgggaggctgaggcatggcacgagaatcgcttcaacctgggaggtaaagattgcagtgagccgagattacgccactgcactccagcctgggcgacagagcaagactctgtccccctaaaaaggaaaaatatctacttttgaatcagaagtctcacatttaggaatttttccagaaataaatgatttctgaataaatgattcgttgtcaggaattgaaatacaacattggtggaggagaacggtttgattctttgacagatcttgtggagcattacaagaagaatctaatggtggaaacattgggtacagtactacaactcaagcagccccttaacataacttgtataaatgctgctgaaatagaaagcagagttcgagaactaagcaaattagctgagaccacagataaagtcaaacaaggcttttggaaagaatttgagacactgcaacaacaggagtgcaaacttctctacagctgaaaagagggtcaaaggcaagaaaataaaaacaaaaatagatattaaaaacatcctgccctttgataataccaaggttgttctacatgacgggatcccaatgagcctgtttcaggttacatcaatgcaaatatcatcatgcctgaatttgaaaccaagtgcaacaattcaaagcccaaaaagagttacattgccacacaaggctgcctacaaaacacagtgaacgacttttggcggatggttttccaaaactccagactgattgtcatgacaatgaaagaagcggagagaggaaagagtaaatgtgtcaaatactggcctgatgagtatgctctaaaagaatatggcgtcatgcgtgttaggaacgtcaaagaaagcgccgctcatgactatacgctaagagaacttaaactttcaaaggctggagaagggaattcggagagaacagtctgacaataccactttcggacctgggcggaccacggagtgctcagcaaccccgggggtgtgctggacctcctggagaaggtgcaccataagcaggagagcatcatggatgcagggccggtcttggtgcactgcagtgctggaattggccggacagggacgttcattgtgattgatattcttattgacatcatcagagagaaggtgttgactgcgacgttgatgttccccaaaccatccagatggtgtggtctacgaggtcagggatggtccagacagaagcacggtaccgatttatctatatggcggtccagcattatattgaaacactacagcgcaggattgaacaaaagcagaaaagcaagaggaaagggcatgaatatataaatattaagtatcctctagcggaccagacgagtggaaatcagagccccctcccgccttgtactccaaagccaccctgtgcagaaatgagaggagacagtgctagagtctatgaaaacgtgggcctgatccaacagcagaaaactttcagatgagaaaacctgccaaaacttcagcacagaaatagatgtggactttcaccctctccctaaaaagatcaagagcagatgcaagaaagtttatgtgaagacagaatttggatttggaaggcttacattgtggttgactactttttgataagcaaaatttgaaaccatttaaagaccactgtattttaactcaacaatacctgcttcccaattcctcattgcctcagataagaagaaatcatctccacaatgtagacattatattttatagaattttgttttaaattaaggaagcagttaaattgtgtgctatagtttgcagattatggggattcaaattctagttataggcttttttttttctttttacaaacttaaccagtttaatttttttttcctcatcgtgggggatgataagaagaaatgatttgggaaaattaagtaagaacatcctagaaaagtgagaacaatctcatttaccatcgtgtatccagtagtggataattcattttgatggcttctatttttggccaaatgagaattaggccagtgcctgagactgtcagaagctgactggtctacctttgcattggcattaaagagtcatagaaaaagaatcatggatatttatgaattaagataagaggtgtgcctttttttttcccagtccatgaccaattatagtttggctgttgactgagaagattgtggtgggaaaatgtttgccatattttctttgcatttgtgtaattgtcttgtacttagaaaaaaagcacctatgaatgaccagtgtttttggttgtcaaatgttgctgacaaacttaccccaaaacttcagtggcttaaaaaatccctcacccccaactgttcttcaatctgagctgggctcatctgggctgttcttctgctagcctgcaggtggccactcatgtggtcagtaggttggtggagagactggggtggctgggcttctctctctgcctgcagtcctgagtctctccttctccatgtaatctctctaagtggctttgctggcagcatagctagacctctcacatgaagctcagagctcccaagagcttgaaagaagtggccaggccttctgaaggcttaagtccagagtcgtcgcagcatcccttctactgccctctattgatgatgatgatgatgattattttttctaatcagaagacagctggagtattacctctacgtactaaacaagtcacaagcccagtccaggttcaagaaaagggtgtgaagtggaggtgcagttaatcggggggccactagtctaacagacagtcacaaccagtgctatggaaaaccaaagatattagcaaaagtagaagttgctagtgaccttgggaagccgaagctgtttacagtagctgggacaagctgaaagtcagactgagaaataaagagagggccttcaagaagcttcctgaatgatttctgccagccctgagcctatttttggaaccagcatttggggaaactgatcttgtcaggatggatatgtttagggacacagggcttttgagagcagcaccacyccactggggcaaccccagacttggaaaatgtgactcttctaatgccactggcttttagtcaggccacagtgagaaggaacagccctaacaggcctccagtcaggttgaatgagctcatttttgttttagccaaccggtaagatttactaatgttctaccttaagtgccttctccaaagacatccctgtttgcctcatatgttgaaacatcattcagtgcggatatttcaatgaaaatatcattggttgacttttgtaacagtaataaaatgctatggcatctttgccgtgaagttagggtatccttggattcttctgactttggctcctgaaaggaaggcctagatccagccctggtagtagttcctttctgaggtctctcagtcccttgagaccctgaggtagtttggctgccattctcacagaaaaaatgtatattagaccccactcctgccccccaatattcattgaactttgaattgcttcagaacacaggttggcctgaaggtattcccttattagggaaatgtcatgactgctgtcttctagtcaaacttgtaaagaaaaagattccagttcagtatttgcaggaagaagcttgaatcctgttctttttattgcattgttacattgactcattctccattttgctttggttttgtcttgacttgactttgggggtaaagtctttcaccagcacacaagagtttgattgtacaaatatatctcctgcattaacatctctgcatgttgcttaagatcagttgcttttgtactcagaatggaaatacctgatcttggcttgctttgtttcctatgtttatttcatttagatttccctccatgaggtcagcaaactgtcatgttcttatgtaaacttaagccaaggccagagttatcatagtccctaggttgctaaggcttatcatgtgtttggtaaaaggtgattgcaggttctcagatgaggttactttacatgggatagaatcaggcagaatggctggatgatggagaaagctcagggtgcaggtttaaaaaaaagttgtagaaatgaaaagttccaaagaggtggtttctgaggaagtcagagagcccggggccaaagcagtccttaatgggtgaatcaggttatttggaaagtcggtgtgacagacacatggatgccatctacttctaggttgctggtaggaggtactaaatatgcacaatattccacagctcactgaggattttaaaattataagcatgggattttatattttggggtgaaagaattatctagaatatggtattggggtttttgaaaaagccaaatttcacagtcttagtaactttaaaaagaaaaactaaaaggcacttcatgtctagtgtgtggcccttctgaagctgatggtcatctctcccactgaaatcagggtcttttcaaatgtggctaaatggggatgagaaaacacgggtaggactttcttggtgtgtggtacgtgtgcattctttgaagagcccagttgctttggggaaacagccaagaaaatggtcaagattatgtttagagtttattttattggggattttaagaactaataacatcttgagttatttttagttcagggggatgtggaaaggcttgcaattatgaaatgttttgttgtagcctaatatccataagggaaacttagactgtagacataacttcaaagccagtgcagtttttgttttctgtatgttgttgggggaatcaagtttttacatagagcaagcacatggccaccctgatggcaggatgctttggttaggtctgtatttgccctcaattttgttgaaatcttttttccctcttcctcttgaaaagttccaaaatatagtttattggatcattcatcactaaaaacttgttcctttttcactacaggcagttcacacaaggcaaaaactattaaacagttggttttagtatgtcgtataactttgctgtatatcaaactaattttgacaggttttcatcttaagcctcaaatcatgtaattaataatttgctgtttatttatgacctaattgtgattcttttattaataaaagctaatgggaaaaggatccctgattaataaataaatagataaatcacacatacataagtatatatatatgtgtatatataatatatatacacactatacattgttacattgttaatagtggcaaaaaatggaaagagatatttatcagtagggctatggctaaataaattgtgacacaaccaaattatggaatattattcagcagttagaaatgactgctcagctcattttttgaggccctgataccaaaaccagacaaaaacatcagaagaaaagaaaactacagactggtatgtcttaggaatatagataaaaaaaacttcaacaacatgttagcaatccaaatccagcagtgtattgaaaagattatacatcatgaccaactggaatttattccaggaatgcaaaattgatttaacatctgaaaatcaatccatgtaacacatgaaattaacccatttatgcctgaagttgcaattttttaatttttgcaatcagaccttggcaatgaccttaagcagcaggatataaataactcccacatacttagggttccaataatggaacactaggcttcaataggctaatagaattaaggacaaaagtatgatcatctcaataaacaccgaagaaagagttgacaaaatccatcagcccttcatgacaaaagcactcaacaactagactagaagagtatttgtgaaaattgatgaaggccacctacaaaacaccccacagctaacatcatattcaatgatgaaaggctgaatgcttttccctaagatcaggaacaaaataaagatgtccattcttgtcacttctagttaacattgtgctggaggttctagccagggcaattaggcaagaaaaagaagtaacagcatccaaattgaaaaaggaagatgtaaaaccatctctatttgcagatgacataatcctgaatatagaaaatcttggggaatgcacgtgcacacacacaataccagaactaacgaataagtttagcaaaattgcaggttacaagattaacatacaaaatcagttgtgtttctggccaggcgcagtggctcacgcctgcaatcccagtacttcggaaggctgaggcaggcggatcacttgaggtcaggagctcgagaccagcctggccaacatggcggaaccctgtctctactaaaaatacaaaaattagccaggcatggtggtgcacacctgtagtcctagctactcgggaggctgaggcaggagaatctcttaaacctgagaggtggaggttgcagtgagccgagattgtgccactgcactctaccttgggcaatggagtgaatgagactctgtctcaaaaaaaaaaaaaaaaaaaaaaattgaattgtgtttctatacactagcaacaaacaatctgaaaacaaaattataaaaaacgatgtatttataatagcatcaaaaagaataaaatacttaggaataaatttaacaaaacaaatgcaaaacttatatctgaaaacttcaaaacattgttgaaagaaattaaagaagatttagataaacggaaaaaaattccgcgttcatgaattggaagaccaatattgttaagatggcaatattctcccaactgatctacaagttcaatacaattcctagcaaagcaacagctagcttctttgccaaaactgacaagttggtttaagaattcatatgtaaatgggagggacacagaataaccaaaataattttgaaagagaataaagtcagagaatgtcttagtctgttttgtgctgctataacagaatagcacagagtgggtattctgtgaacagaaatttattggctcactgttctggaggctaggaagtctaagataaaggagccagtatctgacaagggccttcttgttgcatcatcccatggcagaagggcaaagagagggcaagaggagcaaaaagatgggagagaaaaagagttcaaaagaaagcaagagagaaaaatgcatgtgggcaggagagcaagaggggcagagcccttatagcctaatcacctcccattaggccccacctccacactgttgggttggggaattaggtttctaatacaagctctttcagggacacattcaaaccatagtgaaggacgcagacctcctaattttaaaacttactacattaatcaaggcagtgtggtgctggcataaggtagacagataaatcacagaatagaattgagagtccagaaacaaaccttcacatttatggtcaattgattttcaacaagggtgccaagacagtccaaaggggaaaggaaaatcttttcaacaaatggtgctaagccaactggataagtccatgcaaaagaataaagttggaccctttcctcatgtcctacacagaaaataactcaaaatggatcaaaggcctaaatgtaagagttaaaactataaaactcttggaagaaagtataggagtaaatctggcagccttgggttaggcaaagtcttctcagacatgacaccaaagacataagcaacagaagaaaaaatgtagctaatttggacttcatcaaaataaaaaacttttgtgcttcaaaggatatcattataaaagtgaaaagacaaccagaataataggttgtcacatatatatatatatatatatatatatatatatatatatatatatatatatatatttttttttttttttttttttttttttttttttgagtcagcttctcgctctgttgcccaggctggagtgcagtggtgtgatcttggctcactgcaacctctgcttcccgggttcaagcaattctcctgcctcagcctccccagtagctgggactataggcgcctgccacatgcccagctaattttttgtatttttagtagagacggggtttcaccgtgttagccaggatggtctcgatctcctgacctcatgatccgcctgcctctgcctcctaaagtgctgggattacaggcatgagctac

SEQ ID NO: 96881 - DNA, 28332 bp, Homo sapiens
  misc_feature (1)...(28332): n = A,T,C or G
ctgggaccttgtcagccgaaacgacttcctgggcaaagtgagcaccaccgccccgccccccctcctcccccggcaggctgcacctgctgtcccccagcacctggctccattgcagccatcccatcctcagggacctccttctggcttccccaaagagggacactcaggaagcctgggactacccccccacctccaccgtctgccagaaccagcaacttccccccaccaccactggcactcagggacccttggaagaggcccctccccactaagaacagtagttggcaaggaggagacctaagtctcccagctccaggaaaactgccactatgtccccaggtggtgatcgatgtccagagactgcgggtggcgcagcaggaggagggctggttccggctgcagcccgaccagtccaagagccggcagcatgacgagtaagtgcatggagctgggcagccggcctcaaggggtggggtgggggctgacatttgggaattggctacaggcaggcagggcaggggggctgctcaggggtgagaggtcaggagacacagctccagggtcccctcagcccctgcccacctagccagcatccttctcatcccggctgggctccacctcccctttatttattattatttatttatttatttatttatttatttatttatttatttattttgagatggagtctcactctgtccccaggctggagtgcaatggcgtgatctcgactcactgcaggctctgcctcccaggttcacgccattctcctgcctcagcctcccaagtagctgggactacaggcacccgccactgcgcctggctaatgttttgcatttttagtagagacagggtttcaccatgttagccaggatggtctcgatctcctgacctggtgatccacctgcctcggcctccccaagtactgggattacaggcatgagccaccgcgcccggcccctcccctttatttttccccacagttctgcattcagctcagctctgtcttctgtcttttttttttttttttttttttttttgagatggagtcttgctctgtcacccaggctggagtgcagcggcacaatcttggctcactgcaacctccacctcctgggttccagtgatcctcctgcctcaacctcctgattagttgggattacaactgtgtgccaccatgctcggctaatttttgtatttttagtagagacagggtttcaccatgttggccaagttggtctcgaacacctgacctcaagtgatccacccgcctcagcctgccaaagtgctaggattacaggcatgggccaccaaacccggccaggtctgtcttcttagctcacaggttgtacaggtctcctgctttctgcctctggaagtttctgaaacaagtactcagacattttcctttgaaaatttccctgcagacctcagaccagggttcaagtctccaaggtcagtgtccctgagccatagctccaactccctatgccagnnnnnnnnnnnnnnnnnnnncagttttcctggagctgggagacttaggtctcctccttgccaactactgttcttagtggggaggggcctcttccaagggtccctgagtgccagtggtggtggggggaagttgctggttctggcagacggtggaggtgggggggtagtcccaggcttcctgagtgtccctctttggggaagccggagggaggtccctgaggatgggatggctgcaatggaaccaggtgctgggggacagcaggtgcagcctgccgggggaggagggggggcggggcggtggtgctcactttgcccaggaagtcgtttcggctgacaaggtcccagtcccaggcctccacgcacagcgcctccatggccccctcctgcagctcaaattcaaacgtctcattccagcgtgggtagcatgacttcttcacgatctgcccagaggagggtgggagggggttaggctgatgccactggactccccaggctgggcaaaaggcagagctgccctagacacctcccctgggttccccacagcctcctcgccttggaggttctgccacagcagaggttaaaatgtcctgtccaagctcccacccatttctgagatagggagaactgaggcccagggtggggaaaagatgtatccaaggccacacagcaaaacagtactgactatgaggatgtggtgaacagggaatacctctacactgctggtgggaatgtgaactagtacaaccactatggaaaacagcagagattccttaactaactaaaagtagaactaccatttgattcagcaatcccactactggatatctacccagaggagaagtcattatacaaaaaagatacctgcacacatatgtttttgttttgtttgttttgttttgtttttgaaacagtcttgctctgtcgcccaggctggagtgcagtggcacgatctcagctcactgcaacctccgccttctgggttcaagtgattctcctgcctcagcctcccaagtagctgggatttcaggggcctgccgctacgcccagctaattttcgtatttttagtagagacagggtttcaccaggttggccaggctgccctcaaactcctgacctcaggtgatccgcctgccttggcctcccaaagtgctgggattacaggcgtgagccaccgcgcctggcccttttattcttttcttttttttttttaaacagggtcttgctctgttgctcaggctggagtacagtgatgcaatcatagcccactgcagcctccacctcctgggctcaagcaatcctcccacgtcagcctcccaagtagttggcactataggtgtgccccaccacacctggctaatttttaaatttttttgtagagacaggatcttgctgttgcccaggctggtctcgaaatctgggcctcaagagatcctcccacctctgcttcccaaagcattgggattactggagtgagccactgcaccctgccagtatcccctacttagaactctttgtggaagaacaccaaagcccactcatctttgatattttaagcctctcatacctgcctttcttccccctcaagactgtctaataaaaccccaacattgaggctgggtgcagcggctcattcctataatcccagcactttgggaaggaggctgaggcaggagaattgcttgaacctggggaggcagaggttgcagtgagccaagaaaacgccactgcactccagcctgggcgacagagccagactgcctcaaaaaaaaaaaaaacaccaaaaaaaaaaacagcccgggtgcagtggctcacgcctgtaatcccagtactttgggaggccgaggcaggcagatcacctgaggtcaggagtttgagaccagcctagccaacatagtgaagtctcgtctctactaaaactacaaaaaattagccaggcgtggtggtgcacacctgtaatcccagctactagggaggctgaggcaggagaattgcttgaacccagaaggtggaggttgcagtgagctgagatcgggccactgcactccagcctggatgatggagcgagattgtctcaaaaacaaaaaacaaaaaaaccccaaggttttactgaaatattgagaatctccccagaaaaaataaggaggaaatgttctttcttcctctgcagcaaatggaccttcttaggctgacttggaattgcagcaggagtctcattgccgaggacaacgggggacaagtcccctcactctgagagaggcctggacattcctctcccctgctaggactcactagaaggccaaccactgtggccccagaggatgggasaggggagattcctggagagaggggagggccagggagacatgcttccatgcctcccatctccgtgggtgacgatgggtgcctgggagaagtggccccgaggtcccagagcccggccacgtgtgtgagcgggtgcacacgtgtgcatgcctgtcccccagacagcctggtgcccagaaaggataaggatggaagaagcaggtgagttggggtggggcgggggggaatgaatggcagggccagagagtgagcgagtgtgggggtgtggctgaggctcggcccaagcccagacattttccatccatttctattttcccaggacagaaaataactcccgggaagccagagtgagcaacatgggcatcatccgacccacacccctctgcccaagggaagtcttcctcttagacaggctgacccctcaagggtggggggaacactggctccatagggctgcctggctgggggccaccctcctgcctcacaggcagggagcgacttggggaggtggctttggagccggaagggaagacgcttctcacggacagagtgtgactcagacccaggcccagacgggagtgcagcctgcagctaaaaataccctgggggttggggggtggccctgtcacaggtgactcaggcccatggaaccatccaaaccactgtccctccttgggggaaccctcaatttgcccatcgggagattttcagcaactcttttcacccccccagccccacgagggacccacttacacacactcccaccaggccaagttcacactggcgttaaacattgggaagccggccttagcactgggggactgaggctgtgtgatcagagttcggggtctcctcacccgtaccccctactccactcctctgtgatggctccagttcctccatgagaacattagactgtcccttaagggacatatccccttgagtggaaatcacccaagaagcatcttcaagtccagaaaacctccccagaccctctcttttttctttcttttttattttttttgagatacagtctcgcttgtcacccaggctggagtgcagtggcgccatctcggctcactgcaacctctgcctcctgggttcaagactcctgcctcagcctcctgagtagctgagattacaggcgcctgccaccatgcccggctaattgttgtatttttagtagagacagggtctcaccatggtggtcaggctggtcttgaactcctggcctcaggtgaaccacctgcctcggcctcccaaagtgctgggattacagnnnnnnnnnnnnnnnnnnnntgggaggctgaggtgggaggattgcttgaggtcaggagtttgagaccagcctgagcaacatagcaagactccatctttttttttttttttttttttttttttttgagatggggtcttgctctgtcacccagtctggagtgcaatggtgcgatctgagttcaagtaattctcctgcctcagcctcctgaggagctgggattacaggcatgcgccaccacacctggctcacagggtgagaccctgtctctaaaaacaacaacgacaaaaatgacacaatagtgagggcacaggccccaggtcactgacttagattctaatcccagctcttccaactgctgtttcttcacctgctgagcctcagtttccccatctgtcattggggataccagcccctgcttcacgggtgcctaggggattcccaggagattatggaggtgcctcaaggtgcctggtagggctgagggtggagggtatgggggttcagggccgtgtccctggctgagctgaccccacaggtttcagcgggtgggcccacctgacggaggttgaccctgatgaggaggtgcagggcgagatccacctgcggctggaagtgcgcccaggggcccgggcctgccagctacgctgctctgtgctggaggccaggtgagactcaggggcctgggggcgggcagtgggtcccctgcaactagagaaacccaatgaggaagctgagccccccctcgccccacctctacctcctggtcccagagctggccacctcccatcaaagcctgctctcaagagagggtctcgccaggcacagtgtctcacacctgtaatcccagcactttaggaggccgaggcaggtggttcacctgaggccaggagttcaagaccagcctgaccaccatggtgagaccctgtctctactaaaaatacaacaattagccgggcatggtggcaggcgcctgtaatctcagctactcaggaggctgaggcaggagtcttgaacccaggaggcagaggttgcagtgagccgagatggcgccactgcactccagcctgggtgacaagcgagactgcatctcaaaaaaaaaaaaaaaaaagaaagaaaaaagagagggtcctggggaggttttctggacttgaagatgnnnnnnnnnnnnnnnnnnnnnnnnnnnnnnnnnnnnnnnnnnnnnnnnnnnnnnnnnnnnnnnnnnnnnnnnnnnnnnnnnnnnnnnnnnnnnnnnnnnnnnnnnnnnnnnnnnnnnnnnnnnnnnnnnnnnnnnnnnnnnnnnnnnnnnnnnnnnnnnnnnnnnnnnnnnnnnnnnnnnnnnnnnnnnnnnnnnnnnnnnnnnnnnnnnnnnnnnnnnnnnnnnnnnnnnnnnnnnnnnnnnnnnnnnnnnnnnnnnnnnnnnnnnnnnnnnnnnnnnnnnnnnnnnnnnnnnnnnnnnnnnnnnnnnnnnnnnnnnnnnnnnnnnnnnnnnnnnnnnnnnnnnnnnnnnnnnnnnnnnnnnnnnnnnnnnnnnnnnnnnnnnnnnnnnnnnnnnnnnnnnnnnnnnnnnnnnnnnnnnnnnnnnnnnnnnnnnnnnnnnnnnnnnnnnnnnnnnnnnnnnnnnnnnnnnnnnnnnnnnnnnnnnnnnnnnnnnnnnnnnnnnnnnnnnnnnnnnnnnnnnnnnnnnnnnnnnnnnnnnnnnggtcagcctgtttaagaggaagacttcccttgggcagaggggtgtgggtcggatgatgcccatgttgctcactctggcttcccgggagttattttctgtcctgggaaaatagaaatggatggaaaatgtctgggcttgggccgagcctcagccacgcccccacactcgctcactctctggccctgccattcattcccccccgccccaccccaactcaccygcttcytccatccttatcctttcyrggcaccaggctgtctgggggacaggcatgcacacgtgtgcacccgctcacacacgtggccgggctctgggacctcggggccacttctcccaggcacccatcgtcacccacggagatgggaggcatggaagcatgtctccctggccctcccctctctccaggaatctcccctctcccatcctctggggccacagtggttggccttctagtgagtcctagcaggggagaggaatgtccaggcctctctcagagtgaggggacttgtcccccgttgtcctcggcaatgagactcctgctgcaattccaagtcagcctaagaaggtccatttgctgcagaggaagaaagaacatttcctccttattttttctggggagattctcaatatttcagtaaaaccttggggtttttttgttttttgtttttgagacaatctcgctccatcataccaggctggagtgcagtggcccgatctcagctcactgcaacctccannnnnnnnnnnnnnnnnnnnnnnnnnnnnnnnnnnnnnnnnnnnnnnnnnnnnnnnnnnnnnnnnnnnnnnnnnnnnnnnnnnnnnnnnnnnnnnnnnnnnnnnnnnnnnnnnnnnnnnnnnnnnnnnnnnnnnnnnnnnnnnnnnnnnnnnnnnnnnnnnnnnnnnnnnnnnnnnnnnnnnnnnnnnnnnnnnnnnnnnnnnnnnnnnnnnnnnnnnnnnnnnnnnnnnnnnnnnnnnnnnnnnnnnnnnnnnnnnnnnnnnnnnnnnnnnnnnnnnnnnnnnnnnnnnnnnnnnnnnnnnnnnnnnnnnnnnnnnnnnnnnnnnnnnnnnnnnnnnnnnnnnnnnnnnnnnnnnnnnnnnnnnnnnnnnnnnnnnnnnnnnnnnnnnnnnnnnnnnnnnnnnnnnnnnnnnnnnnnnnnnnnnnnnnnnnnnnnnnnnnnnnnnnnnnnnnnnnnnnnnnnnnnnnnnnnnnnnnnnnnnnnnnnnnnnnnnnnnnnnnnnnnnnnnnnnnnnnnnnnnnnnnnnnnnnnnnnnnnnnnnnnnnnnnnnnnnnnnnnnnnnnnnnnnnnnnnnnnnnnnnnnnnnnnnnnnnnnnnnnnnnnnnnnnnnnnnnnnnnnnnnnnnnnnnnnnnnnnnnnnnnnnnnnnnnnnnnnnnnnnnnnnnnnnnnnnnnnnnnnnnnnnnnnnnnnnnnnnnnnnnnnnnnnnnnnnnnnnnnnnnnnnnnnnnnnnnnnnnnnnnnnnnnnnnnnnnnnnnnnnnnnnnnnnnnnnnnnnnnnnnnnnnnnnnnnnnnnnnnnnnnnnnnnnnnnnnnnnnnnnnnnnnnnnnnnnnnnnnnnnnnnnnnnnnnnnnnnnnnnnnnnnnnnnnnnnnnnnnnnnnnnnnnnnnnnnnnnnnnnnnnnnnnnnnnnnnnnnnnnnnnnnnnnnnnnnnnnnnnnnnnnnnnnnnnnnnnnnnnnnnnnnnnnnnnnnnnnnnnnnnnnnnnnnnnnnnnnnnnnnnnnnnnnnnnnnnnnnnnnnnnnnnnnnnnnnnnnnnnnnnnnnnnnnnnnnnnnnnnnnnnnnnnnnnnnnnnnnnnnnnnnnnnnnnnnnnnnnnnnnnnnnnnnnnnnnnnnnnnnnnnnnnnnnnnnnnnnnnnnnnnnnnnnnnnnnnnnnnnnnnnnnnnnnnnnnnnnnnnnnnnnnnnnnnnnnnnnnnnnnnnnnnnnnnnnnnnnnnnnnnnnnnnnnnnnnnnnnnnnnnnnnnnnnnnnnnnnnnnnnnnnnnnnnnnnnnnnnnnnnnnnnnnnnnnnnnnnnnnnnnnnnnnnnnnnnnnnnnnnnnnnnnnnnnnnnnnnnnnnnnnnnnnnnnnnnnnnnnnnnnnnnnnnnnnnnnnnnnnnnnnnnnnnnnnnnnnnnnnnnnnnnnnnnnnnnnnnnnnnnnnnnnnnnnnnnnnnnnnnnnnnnnnnnnnnnnnnnnnnnnnnnnnnnnnnnnnnnnnnnnnnnnnnnnnnnnnnnnnnnnnnnnnnnnnnnnnnnnnnnnnnnnnnnnnnnnnnnnnnnnnnnnnnnnnnnnnnnnnnnnnnnnnnnnnnnnnnnnnnnnnnnnnnnnnnnnnnnnnnnnnnnnnnnnnnnnnnnnnnnnnnnnnnnnnnnnnnnnnnnnnnnnnnnnnnnnnnnnnnnnnnnnnnnnnnnnnnnnnnnnnnnnnnnnnnnnnnnnnnnnnnnnnnnnnnnnnnnnnnnnnnnnnnnnnnnnnnnnnnnnnnnnnnnnnnnnnnnnnnnnnnnnnnnnnnnnnnnnnnnnnnnnnnnnnnnnnnnnnnnnnnnnnnnnnnnnnnnnnnnnnnnnnnnnnnnnnnnnnnnnnnnnnnnnnnnnnnnnnnnnnnnnnnnnnnnnnnnnnnnnnnnnnnnnnnnnnnnnnnnnnnnnnnnnnnnnnnnnnnnnnnnnnnnnnnnnnnnnnnnnnnnnnnnnnnnnnnnnnnnnnnnnnnnnnnnnnnnnnnnnnnnnnnnnnnnnnnnnnnnnnnnnnnnnnnnnnnnnnnnnnnnnnnnnnnnnnnnnnnnnnnnnnnnnnnnnnnnnnnnnnnnnnnnnnnnnnnnnnnnnnnnnnnnnnnnnnnnnnnnnnnnnnnnnnnnnnnnnnnnnnnnnnnnnnnnnnnnnnnnnnnnnnnnnnnnnnnnnnnnnnnnnnnnnnnnnnnnnnnnnnnnnnnnnnnnnnnnnnnnnnnnnnnnnnnnnnnnnnnnnnnnnnnnnnnnnnnnnnnnnnnnnnnnnnnnnnnnnnnnnnnnnnnnnnnnnnnnnnnnnnnnnnnnnnnnnnnnnnnnnnnnnnnnnnnnnnnnnnnnnnnnnnnnnnnnnnnnnnnnnnnnnnnnnnnnnnnnnnnnnnnnnnnnnnnnnnnnnnnnnnnnnnnnnnnnnnnnnnnnnnnnnnnnnnnnnnnnnnnnnnnnnnnnnnnnnnnnnnnnnnnnnnnnnnnnnnnnnnnnnnnnnnnnnnnnnnnnnnnnnnnnnnnnnnnnnnnnnnnnnnnnnnnnnnnnnnnnnnnnnnnnnnnnnnnnnnnnnnnnnnnnnnnnnnnnnnnnnnnnnnnnnnnnnnnnnnnnnnnnnnnnnnnnnnnnnnnnnnnnnnnnnnnnnnnnnnnnnnnnnnnnnnnnnnnnnnnnnnnnnnnnnnnnnnnnnnnnnnnnnnnnnnnnnnnnnnnnnnnnnnnnnnnnnnnnnnnnnnnnnnnnnnnnnnnnnnnnnnnnnnnnnnnnnnnnnnnnnnnnnnnnnnnnnnnnnnnnnnnnnnnnnnnnnnnnnnnnnnnnnnnnnnnnnnnnnnnnnnnnnnnnnnnnnnnnnnnnnnnnnnnnnnnnnnnnnnnnnnnnnnnnnnnnnnnnnnnnnnnnnnnnnnnnnnnnnnnnnnnnnnnnnnnnnnnnnnnnnnnnnnnnnnnnnnnnnnnnnnnnnnnnnnnnnnnnnnnnnnnnnnnnnnnnnnnnnnnnnnnnnnnnnnnnnnnnnnnnnnnnnnnnnnnnnnnnnnnnnnnnnnnnnnnnnnnnnnnnnnnnnnnnnnnnnnnnnnnnnnnnnnnnnnnnnnnnnnnnnnnnnnnnnnnnnnnnnnnnnnnnnnnnnnnnnnnnnnnnnnnnnnnnnnnnnnnnnnnnnnnnnnnnnnnnnnnnnnnnnnnnnnnnnnnnnnnnnnnnnnnnnnnnnnnnnnnnnnnnnnnnnnnnnnnnnnnnnnnnnnnnnnnnnnnnnnnnnnnnnnnnnnnnnnnnnnnnnnnnnnnnnnnnnnnnnnnnnnnnnnnnnnnnnnnnnnnnnnnnnnnnnnnnnnnnnnnnnnnnnnnnnnnnnnnnnnnnnnnnnnnnnnnnnnnnnnnnnnnnnnnnnnnnnnnnnnnnnnnnnnnnnnnnnnnnnnnnnnnnnnnnnnnnnnnnnnnnnnnnnnnnnnnnnnnnnnnnnnnnnnnnnnnnnnnnnnnnnnnnnnnnnnnnnnnnnnnnnnnnnnnnnnnnnnnnnnnnnnnnnnnnnnnnnnnnnnnnnnnnnnnnnnnnnnnnnnnnnnnnnnnnnnnnnnnnnnnnnnnnnnnnnnnnnnnnnnnnnnnnnnnnnnnnnnnnnnnnnnnnnnnnnnnnnnnnnnnnnnnnnnnnnnnnnnnnnnnnnnnnnnnnnnnnnnnnnnnnnnnnnnnnnnnnnnnnnnnnnnnnnnnnnnnnnnnnnnnnnnnnnnnnnnnnnnnnnnnnnnnnnnnnnnnnnnnnnnnnnnnnnnnnnnnnnnnnnnnnnnnnnnnnnnnnnnnnnnnnnnnnnnnnnnnnnnnnnnnnnnnnnnnnnnnnnnnnnnnnnnnnnnnnnnnnnnnnnnnnnnnnnnnnnnnnnnnnnnnnnnnnnnnnnnnnnnnnnnnnnnnnnnnnnnnnnnnnnnnnnnnnnnnnnnnnnnnnnnnnnnnnnnnnnnttttagtataagaataaccgctgggcgtggtgactcacacctgtaatcccaacactttgggagtttgaggcgggtggatcacttgaggtcaagagttcgagaccagcctggccaacatggtgaaacaccgtctctactaaaagtacaaaaaatggtggtgggcacctgtaatccaagctacttgggaggctgaagcaggataattgcttgaacccaggagatggaggttgcagtgagccgagatcccaccactgcactccagcctctgtgacaagagcgaaactccgtctcaagaaaacagctgggtgcggtggctcatgcctgtaatctcagcactttgggtggccgaggcgggtggatcatgagatcaggagttcaagaccagcctggccaacatggtgaggctctactaaaaatacaaaaattacccggatgtggtggcgggcacctctaatctcagctacttgggaggctgaggatggagaattgcttgaatctgggaggtggaggctgcagtgagccgagatcgtgccactgcactccagcctgggtgacagagcaggactccatctcagcaaaaaaaataaataaataaagaagaagaatgaccatgcactatttgagacatacctatactaaaaatattcaaatttaggccgggtatggtggcgcatgcctrtaatctcagcactttgggaggccaaggcaggaggatcacttgagcccasgagttcaagaccagcctgggcaacatagcaagaccccatctctaaaaaaaaaaaataagtaaataaaatattcacatttaactgggtgtcttgggtcgttttgctaaatctggcagcctgtctaggaagccctctggcttgtttgctgtggcccacagccctcartggttcagctttgtgtctctgtggaaggccccagacccccaytcccccagttcccatccttaacagggtaggagcaggtggacggctgtgtgtccagcacaaggtgtttccatagaaccagccaaggcccatcttgccatcttattttttatttatttattttttttgagacagagtcaggctggagtgcagtggtgcaatcctggctcactgcaacctctgcttcctgggttgaagcgcttctcctgcctcagtctcccgagtagctgcgattacaggcacctgccacaatgcctggctaatttwtatatatatattttaatagagatggggttttgccgtgtcagccaggctggtcttgaactcatgacctcaagtgatctgcctgccttggcctcccaaagttctgggattacaggcatgagccactgcgccaggcccaggggcccatcttaacactgctctgtgcatgaggctcgtgctgagcacgggcatgtgggagccttagaggctcccacttggtccacaccctcctctgttctgaacttccctatcagaacagggaagctgggaagctcaatctaatgtggcaagttgctgaactggctcgggtctcagtttccctattaggttgttatgagggttggggatttgcttctgctgtaaagtgtacccatgatggtgccattatctgggagttgatcgattcaaggctggcagctccacatacccaagcttggaggtggcagggagccagacctcgaagacagakagaggtgccttgagtgcagagacaggaagggctttccaaaaacagaaaataaatagcccgggcagagcctgggaggcagagctatgcagggcacccgratggagggcatgagcagagagatgggaagcygkccccaasggaaaaaactggaggccrtgggagtggtgtggtccagggtggcctgagtccctggtggagaggtcacaggctgcccattccaggggcaacctgggctccttgcagctggaggtgcggctgcgggacgagacggtgctgccctccagctactaccagccactggtgcacctgctgtgccacgaggtcaagctgggcatgcaggtgaggggrcctgggcagggtgggagggtccagtggcagtaggcctgtgcgcctgtccttcyaaacccattctgcagagcagaaacctgaggtctggggatgtgaggagctggccagtgtccagggccccrtccccagccaccccttgggaaamtgtcctctttccctgggatgctctgaggtcctcagagggaaaggttygggatcccccgtgcctctccctgcagggcccagggcagctgatcccactcatcgaggagacaaccagcaccgagtgtcgccaggacgtggccacgaacctgctcaagctcttcctggggcaggggctggccaaggacttcctggacctgctcttccagctggagctgagtcgcaccagtgaggcctgggaaggagctgggcccagaacrctgggaggtgtttgggggtgggtgggctcctcctgtaggaggcagatggggtcagasaggagggaggcaaggaacagagccaagggcagaggtgggacagtgggctgggaggtggcgaggaggccctttattgaggggscagcttagatcccccagmcccaaggtcctctgtcctccccctcccccaaaagctttgtsccagccccctacccactgggacctctgtttgtagtcagagtttgtttggctacttcctttgcaacccccacccccaacctttttctgcatggtagatgaaaaattgaaagtacctctgattggtccctttccacaaccaatgaggctggtcatgggccaagtcttcatttgcataggagtataactttgtaacttcacttcagccttttcccaatcaatcagagatttgcatagggtgtaactttgaaacttgcttcagcctctgataggtcccctccctcaaccaatcagactgattgtgggcactacttcatttacaagggtgtacatcaagtaaccaatgggaaacctctagaggatatttaacccccaaaaaattcggtaaccaggctcttgaaccacttgctcaagccactcccaccctgtgaagtgtaccttcattttcaataaatctctgcttttgttgcctcattctttccttgctttctttgtgcattttgtccaattctttgttcatgacaccaagaacctggacacccttctcgggtaacaaacccacttctaaaataatggcattaatccattcatgagagcctcagcacctcccacctcccaccactcaacaccatcacactggagatcaagcctctaagatatgaactttggtggacacatttgaaccactgccttgtcttacaggcagaagctctgacatttctgagaggaaaacagttacttcatcctgacctggagaagtctcaagttgtggcaaaatatctcttctccttagcagtccagtctgcagtcttcacccctcctttgaattcgtcctggatcttcttttcaatcttttctcttttccacagtgcaggtctccctacttctctactttgacttcactactgtttacattagaaaaagtgaatttacataaatagaggctctccagatctcctaattttcagtcttttccccccttacttcagtaacatctctgcttgtttttccttcagaccagaccctcaggtgactttctgccccctcatccctctgcccccagtctccatattctagaggagtttggccatcagtcttatggtacttataccgtcttctctttggtgaacatacctttttttctcttctttgtctgggaatactcctatttaatcaccttctagttgtcaggttccttcacccgtttggccaccagtcccaggtggaagccctaggaggtctgggagcacttttcaaattttagtctacctgaggagaagctacccttacctgaaaccaggttgtgcaggccaaagaagcaggtctctgtgttctggaattagatcagctcagtgaggtgaccaagctccatgtagagaagactataaggaggagtctctagtggtgagaagtttgagggagcatgatactgcttcctgttgcagtgtatggaaacctgtttcagcttgataggccagggaaagccttagaggaggtaactaaccctggagcagagactgggttctgaggtaggagccagcttaattggtctgagaagtgggacacagggagaaggagaggccaagggaagggctttgggttttattctatgtgtaatggaaaccctgatgggttttaaagaggagaggatgtggcctgccctatgtagaccccctcgcccttatccctctcatgctcccatttttcttgtttaagtttcctgttggctgtcctgtaaccactcaatgggttcttctttcctgttgctcagatacagctgatctatcaagatcagagaaagagtataatacacatagarccagctaaatgggagactagagttttattattactcaaatcagcctccccgaaaatttggaggctaagatttttaaagaatagtttggcaggcagggggctagggaatgggtgctgctaattggtttggggtgcagtcatagggctgtggaaaatggtcttcatgtgctgtctgcttctgggtggggccacaggagtctaactggggccatccagttatcagagatgcaaaagcctgaaaagacatctcaaaaggccaatcttaggttccacaatagtgatgttatttacaggagttattgggggaagttgtaaatcttgtgacctttggaataatggcagtaatcatttaactacaaattcaggcccctctcatccttctaacctggtggcctttcattagtgttacagaggcagtttaggtttgtgtgttttttttgttttttgtttttttgagatggagttttgctctggttgcccaggctggagtgcaatggcacaatctyggctcactgcagcctccgccttctgggttcaagtgattctcctgcctcagcctcctgagtagctgggattacaggcatgcgccaccacacctggctaattttgtatttttagtagagatgsggtttctctatgttgatcagctggtctcgaactcctgaactcgtgatcygcctgcctcgaccttccaaagtgctgggattacaggcgtgagccaccgcgcccggcactaattttttttttttttttttttttgagacagagtctcattctgtcacccaggctggagtgcagtggcacaattttggctctgcccccccaggttcaagcgattctcctacctcagcctcccgagtagctgggattacaggcgcacgccaccacacccagctaatttttgtatctttttcgtttttttgttttttgttttttttttgagccagagtcttgctctgttgcccaggctggagtgcagcggtgcaatcttggctcactgcaacctccgcctcccagattcaagagagtctcctgcctcagcctcccgagtagctaggactacaggcacacaccaccacacccagctaattttttgtatttttagtagagatggggtttcagtgtgttgcccaggctggtgtcgaacacctgagctcaggtgatccgcccaccgtggcctcccaaagtggtgggatgacaggtgtgagccaccatgcctggcccgttaatttttgtatttttagtagagatgggggtgttgctatgttggccaggctggtcttgaactcatgacctcaagtgatctgccctccttggcctcctgaagtgctgggattacaggtgtgagccacctcactcagcctcttcttaatttcttcactgtccccttgatctttcaggatggtgttgtttaattttcatgtatttgtacagtttccagagttccttgtgttacttacttctagtgctttttgtttttttaatttagaaagaacagaaatttgtttctcacagttctggaggctgcaacatactgctttttattccattgtggtctaataagatacttgataggattttgattcttaaatatttgttgagatttattttgtggcctaacatatgggctatcctggagaatgttccatgtgctgatgagaatatgtattctgcagctgttgaatgaaatagtctgtaaatgtctcttagattcattggtctatagcgtattttaagtctcatgcctctatgttgattttctagaccataatctgtccaatgctgaaagtaggtgctgaagtccccaacttattgtactggggtctatctctctctttatctctagtaatatttattttatatatctgggtgctccagtgttgagtgcatatatatttacaattgttatatcctctagctgaattgatccctttatcattatataatgaccttttctctttttgttttttgactgacttaaagtctattttgtctgatataagtatagctagtcctgcatgcttttagtttacatttgagtggaatatcttttttcatcccatcacttagtctrtatgcatctttttagtgagttccttataggcagcatatagctggatcttgtttttgttaaattcattttacaaaatttattttagagacaaggtcttgttttgtcacacaggttgtagtgcagtggcaatcataactcagctgcagccttcaactcctgaactcaaacaaccctcatgtcttagcctcccgagtagctgggactamaggcacatgccacgaggcccagctwwttttttttttttttagagctagtggtcttgctctgttgcccaggctggtattgaactcaagcgacatcctcctgcctcagcttcccaaagcatggggattacagttgtgagtcaccatgcctcgcctggatcttgtttttctaacccactcagcaagggtattatgtgtgtgtatatatatatttttttaattgkatttttttggagatagagtctcactctgtcacccaagctggagtgcagtggcatgatcttggctcactgcaacctccacctcccgggttcaagtgattstcctgcctcagcctcctgagtagctgagattacaggcatgtggcaccatgcccggctaaacaaggctatatattttaattgggaagtttgaactctttacattcaaggttgttattgatgagtkaggacttattcctgtcattttgttaattggtttctgatgttttatatgtcctttgttactttcttcctcttgaaaaatttttttcctttcctttttttaataagagacagggtctcactatgttgccttggctggtctcaaactcttgaccttaggcagttctcccacctcagccttccaaagkgctgggattacagggatgagccaccatgcctgatccctttcttatcttttgcgatttggtggttttctgtgatgataatgcttgatttgtttctcattcgtgtatctagtctatcagtgacttttawactttcacatggtttctgtctataattcccttttcctcctaccatatcttgcataccgtaagtgctaatcaatgctctgatgccacttaacataactggaaagtgactgtgatgattggctagcagcaagtctttctcagaagaccagccttttgagccattgtgggtgggctgggggacagcagggttgaaagaccggctataagtggcagctctgctgttgccctccaacgtggagcccagctgygcacctgccttcaaggggagctctgatgcaggcagctggatgcctgcaagcacacctgtctggggcaagggagaagataagaaggacaggaaggaagtagatgtatttttaaggaaatcattgacttctgatagggtgttttgcagattttttatagcttttgtttttgtttttttttagaaagtttctctgtcatcaggcaaagaccagggtgggaacaggaaaactagaaaactggtcaagggagaacaagtcccttttcctctcaccagtgaacagcaggtgaggaaacagactctgggaggaacgctgttcaggatggcttgctgcctgcatggcatgaggctgctgtcttgtgggtgctggcagccacaatctccatttttctgaagaccaccatttatggctagatccagtagargtccagaactttcccaacactgctggagaggaagtgtttcacagtcagaggagagagccatggggaatggaagcaggggaagaaggggtggggaggggaggagagatgagtggctctatgctaatcttagggttccttctctgcccttttgggtaccagagacagaccctaggaaaggaattctgcagacagtcttggaagcaccttctctggcacttaaggctttttcccgaatttcagagacagaaacatacccatccttgagcaactgcagtgaggcagtgtggaattctagggtgttgatagctgtgagctaccaggcctgttggacatttgcattctggcattttaattccttgtcctaagattttgactctttgccatgttcttggaactcctggatctttctggagtctgatagcggatcaaaatctcagctccattcagcaaacacagacgcttctgggggagagctaatggtcattttttcatcatggatcaattgttcaagatcaagcacctttctgatcactcttgtccacagagaaaaaaacacattactccacagttggcttctcagatttgatgtctagttgtcaacctgagaccttccttggaagcatggcttctgcacaagtgggttacattgactgtaccacagtggctcttaaaacaaggtttttgacctaaggagcctgttctccaggctgacctgaacccctcaaagacatggcaagcaggtgacatttctgcccaggrgatttgctgagagatctggaaggtacaaagccaccttaggcttcaatgggtgagtgaatttttaccacaaaccccaaagggctgatttgactttctctattatgtatatccaacagagagagcaggcttggggaaattttgtctggactcagaaaattcatcagtttcttgggaatcatcagctactacacttgaaagaccagagtatggttattccccaacaccaagttgggccttaattttcccatctgacctgtctctaacatgtgaatcagtcccaccttccctgaccacatgagtgaagtgtttctgtgatgcttggctgtagatgcagtgtgacaactgcctgaagcacatgatctcaggcaccagatggcactgctgctcagtagagccatatgctaacagccttcctagaggacactggtaacagcattctccccaactattaagctttattgttttgtttaagcaaagaccaaagaagcaacgaagatacaagaattaaaacagcaatccttgctgggcacgggggctcacgcctgtaatcccagcactttgggaggccaatgtgggcgggtcacttgaggccaggagttcaagaacagcctggccaacatggtgaaacaccgtctccactaaaaatacaaaaattagcccagcatggtggcacatgcctgtaattccggctacttgggaggctgaggcaggagaattgcttgaacctgggaggcagaggttgcagtgagccaagatcgcaccactgcactccagcctgggagacagagcaaggctctgtgttaaaaaaaaaaaaaaaaaaaaaaaaaaaaggcaatcctcaacatggtgagatgcagccacacccaaagaaccccaaaaggggccttatggtagcaggaggatcctaaatgtggaccctcacaaagggaatgcagcccaagttaaaagtgcttcttcctttgttaaggaagtgattatgtgaataacctcagtattctcagtgggaaaatatctggcaataaatttgtagccacaacttggaagtttctggaagaaatcaacctcccacagccacctttggctgactgcttatgttaggtctgtagacttcctttcaatcagccggcaaaagccccatctggccacttggtcacagttttactgcttcttcaccttttgttcctattcacctacacatcacttcctggaagtggaccagctttataaccaacctagaaagatcaggttgaatttggctttagagatctgaagctcctcaattttcttccctctgtggaagttttattagaataatctcttccctttgttgtcctcttcctaactaacctaatctcaaggctcaaagctttaaaggcaaatcttaaaatgtgctgcatcagaaagccaaggcagaaagccgatcacctaacaggctattgtaatttaaggcttcaaataactgttaatagtgtgtatcttctgttttgcctaaaagaaagaggctgaaatgtcaattatcatttagagttgtgagtgaattgcatttttatttacgtttaagagtctctctccctccttgtgttctagtctgtgaatggctcacacttggacttagtgtaggctcctatgggaggagcgggcggtagtgagaatcttcatcaaatggagtaacatgacccaaatctctagaggtttcataattttgctcttgcttctraaaacataatcatctcttatggggtgttatgtgctttgtatcctgaaattttccacttgctgcttcttggtgtgaggcgagaaatgccaccacgtggcactgcaggaggagactggtggaagccacagggctaggccttcacttcccaktgacactgttcccaattccctccaggataagctgagactcctcaggatgtggttctgcagcagatgaggtgcgaacaaagcctgctctgccctgggcacccaggatggcactgagttctaaaaggcaaagggtatgtggtgaggggccaggctgaggccctggtgtggtaccatcatgggcagcagcaccatttgaggccgggtaggagagacgtgcagggcctggccccccaagagaccagcagacaaactgaggcggcagagagagagattccagtgtcaccaggaagactgcagatcataacaacaatggttgctgatttggcatcaaagaggtggcactgtcaaagccgtaattgctgaaaatggcaccaacatgctgcagctggagagagtgggtgaccaacatttgtttgaagaacagatgatgctctttgaatggctcagccaacagcccaaagttttaagggaagacctctctgccagcttctcttggacagtgtctcatgtaaaacctccaaggcacttacatagcatatttttgtgtccactctcttgctagtctgttgtacctggaataaaaaagcagaggaagtgacaccctcacttgaaatggtcacttcccttcaatgtgctgcagagaacaggactgatgtggggaatgctgctgctgctgcttgtcaaacatctacggctgatgggtgagtggaataaaggctttccctggagcaggagcacatcagacatggctgtaaacccccagctgggtgaacccctcatgtgtaaaccccaaactgttgattctccataactatctgctgtggaagatttaataatgcaacagacttcctccctttctttctcctgtcctacaatatggatgcagggaggacagagaagagacacacaaaggtcagtttgtactagttacaggccgtccagcacacaaactccagaacaagggcttgggaatctgcctaccggggtgtgcatcagtacagtcctcagcagctgttccgcccctctgtgtcctggcttttttgattgcttgccatggggaaagtatctgccttgtgtgcttgtggggaaactagagaagtctgtatgtaaagcacatggagcaggccaggcatccattgaagactatgcaggtgtgtgcacttactctcatcattgtaatgacacttgatgctatgagactataaattagagagatttatagttacaagaggcactgaaaaaaaatcacttttggtatgtctaaaatatcttgtaaaaagtgttaaaataaacaaacccagtcaattaaaaattttgactgttattgagaaaactccaatgagggaaataataagatctataaaggtcttaagaaaaatataatttgaaaaaaacatgtggctgagtgtggtggctcacgcctataatcccagcactttgggtggcctaggtgggcagattgctcgagtccaggagtttaagaccagcctgggcaacatggcaaaaccctgtctctacaaaaaattagccaggtgtggtgggacacgcctgtagtcccagctactcaggaggctgaggcaggaggataggttgagcctggaagatcgaggctgcagtaagctgtgatcacaccactgcacttcagactgggcaacagaatgagaccttgtctcaaaaaaaaaagggaaaaacatactctattctaatctcttcagacagaaaagaagtaatgagtaatgaactgaagaatgcactcactgaagatgtcttttaaaagggctagcaataccttccctgaaggtccacaactgagattcacaccactcactggactgcggcccctgccacacctgggcctctttcacagtgctgtcagcactgagagactaacacttggcgatgactccttgtgcctgccccaccaactacagacaccctcatgctacagtgcatgtggttgtgcctggcctagggggtcggaattttacaattctgggtctgttaattggtgtttaaacagagagctggcaatgaaggtctaacacactgctgacttctgagctgagccagcgaactgaccacagcagtgtttcccaccttgactgccctcagcctcaccttcggtatagccaagcagacatccccttgtcttaggctataaaccctagaatttaaatcagaatttttcttgttgtcagattcttctgagtctgttcttggctgaccactgattttgctggtcttgagggcagggcttggcaatgttttcatatacagtagcagcagctaatgagttatccaggaggggaactgcttttatctccttttccctccttagactcaaaggacatgttagtgagagagccaggagtccaagcccagggcacaccctctgtgcacatggctcagcatgggcaggaagatgtctgtgggaacctgcagcctagaagcaccagctcagagcacaggtactgcatggagctgcctggggcagccatggtgcaaaggcaacccaaagaggacacgtacttctctctgtcggccttgtaggtgtgtgctatctctggcaccagggggtcatcggggttggggtcgcagagcagcgagcagatggacaagagaactgggaagaaaagaaaaggttggtcagctgtagccacgaagctgctgggtcacccctgggtaaacttccctgaacttgcactctgtattttgaccaagcagttgtcttcccttcaacagcccaatctaaattgcttgatgcaccacttgccccgtcccatgtatcagccgaggtggtcctcactgtgtggcctgaggcatgctgtgctaggatacttccctcctgggtgcatcctggttctcattccccttctccactgaagcaccccatcttagtctccaactgccctcccatccttgtctgtaccctacatcatgaacctctggcatttagtcctaggagtcctgtttactgttaaggaaacaagaattcagagcattcaagtaacttgtccaaggtcacagacttggaacacccaataaatggattaaaatgagattctggaccaggtgcggtggctcttgcctgtaatcccagcactttgggaggccgaggcaggcagatcacctgaggtcgggagttcaagaccagcctgaccaacatggagaaaccctgtctctactaaaaaaatacaaaattagccaggcatagtggtgcatgcttgtaatcccagctactcaggaggctgaggcaggagaatctcttgaacctgggaggtggaggttgcagtgagccgagatcgcgccattgcactccaccctgggcaacaagagcaaaactcgatctcaaaaaaaaaataaagaaattctgaaccaggtccttctaactgcaaagcagatgcatcctcctctgtgccagcaccgtctctaagatgtgcactcaatgtggctctcagcaaccctaggggaagggaatcacccactagggctgtggtgaggagcagaaggaattgtggtgcctggattcttggggtcccagagagaaatgcacactttcattcctggctttgctttcgactcaccatatgattccaaacaaactggattcagtgagtccatcaaagttctgaccacaggtccccacacataaagctacaaatgacaggggcaggtttgcctttcttaagatacttggctgggcacagtggctcacgcctataatcccagtgctttgggaggccacaatgggaggactgcttgaggccaggagtttgagaatggcctgggcaacaaagtgagaccctgtctcctctacagaaaaatttaaaatttaggccaggctctgtttctcttgggttgatttttcaccatcctcccacgctccacctgccaggatactgcaccatctacattcaggtctctcgtgcatacatagcccatgcacagcccatcttaattcagaaggaatatctgcatttctaagctcagtttagactggtttcttcaacttcaaccaaagacatgtgctcaacatcatttattttgggaagggaggatttctccaccaacttcgaggcccccggaggcatgccctgtatcttccttcagggctgactcacagtccgttttgtgcttattagatgaataaatgagggaacagagaaggtaatgtaatatttgcctttcttatttttggataaaaaaatataagtagaatcagtattttcttcttgcacccatgtgacagtcttgagcacaccagggcaattgactgctgagaagcgccagggagcggggcacaaagttctgctggtgctgcctcgtaggcgtgtaaggatatccacttaagggcacagcagtggacagggctatgtgacctgggaaaggtgacttctttctctgagcttccatttccactcagtcagtgctggggtaaaaacatgtgtaaaagagcacacagagcatgccatcagcatctctaccttttgacacagtcaacgctggagaccactgagaccgcaggatatcaaggcagatgctgccattgctgttgatattagggtgataaattttggttgtgaaagcaacctgcaaagacaagagatccccaatcagacaaaccacagggacgtgtgggaaatgaaccaagtaaagcagaagcagctgctgctgggcagtacctggagtgtgctgcatacctggccccacagtgcaggctaagccagacccccactcccaaactctaatgggatatgggagtgagtgatcacccagaagttccctgacccattccctgctggattctcattctgaacatagggggattgataccatctccctgaaagcagtatgctctgaggaataacaagggtggtggaaaggactcaaaagcccaggaagttttatgcaaaaagcagtgatgttttgttgatgtatcagcagaaaagctcaggcccaaagacttcatgactaaaacaccaaaagcaatggcaacgaaagccaaaatagacaaatgggatctaactaaactaaagagcttctgcacagcaaaagaaactatcatcagagtgaacaggcaaccgacagaatgggagaaaaattttgcaatctacccatctgacaaagggctaatatccagaatctacaaagaacttaaacatatttgtaagaaaaaatcaaacaaccctatcaaaaagtgggcaaaggatatgaacagacacttctcaaaagaagacatttatgcagccaacagacacataaaaaatgctcatcatcactggtcatcagagaaatgcaaatcaaaaccacaatgagatactatctcacagcagttagaatggcgatcattaaaaatcaggaaacaacagatgctggagaggatgtggagaaataggaatgcttttacactggtggtgggagtgtaaattagttcaaccattgtggaagacagtgtggtgattcctcaaggtattcctctagtactagaaatgccatttgattcagtagtgatcccattactgggtacatacccaaaggattataaatcatgctactataaagacacatgcacatgtatgtttattgcggcactattcacaatagcaaagacttggaaccaacccaaatgtccatcaatgatacattggattaagaaaatgtggcatatatacaccatggaatactatgcagccataaaaaaggataagttcacatcctttgcagagacatggatgaaactggaaaccatcattctcagcaaactatcacaaggacagaaaaccaaacactgggccaggcatggtggctcacacctgtaatcccagcactttgggaggctgagacaggcggatcacctgaggtcagcagttcgagaccagcctcaacatggagaaaccccatctctattaaaaatacaaaattagccgggcatggtggtgcaggcctgtaatcccagctactcgggaggctgaggcaggagaattgcttgaacctgggaggtggatgttgcggtgagccgagatcacgccattgcactccatcctgggcaacaagagcgaaactctgtctcaaaaaaaaaaaaagaaaaccaaacactgcatgttctcactcatagatgggaattgaacaatgagaacaca

SEQ ID NO: 96882 - DNA, 59376 bp, Homo sapiens
  misc_feature (1)...(59376): n = A,T,C or G
agcatgttgggaggccaaggcaggtaggtcacctgaggtcaggagttcgagaccagcctggccaaaccccgtctctactaaaaaaatacaaaaaaattagctggacctggtggcgtgcgcctgtcatcccagctacgcaggaggctgaggcatgagaattgcttgaacctgggaggcagaggttacagtgagccgagatggcgccactgcactccagcctgagtgagagggagactctgtctaaaaaaaaaaaaaaaaaaaaaaaaaaaaaagaattcctacaacccaacaacaagaaaacaaacaacacaattaaaaatgagcgaaagacctgaacagacgtttctccaaagaagatacacacacggccaacaggcatgtgaaagacactcagagtcgcctcatccgagaaatgcaaatcaaaaaccatagcacgtcagcacttcacaacccctgggatggctcttacccagaacgcagaggatgagtgctggggaggacgtggagaagccagggctttcgtgcactgcagtggggatggtgtgacaaatcctcagaaaattaaacagagttcccatatgatccaggaacccacttctgggcatataccccaaggaactgaaagcagagactcaaagagatattcatacccctgtgttcatagcagcatttgcactgcagccgatggtggaaggagcccaggtgtctgttcacagatgatgtggtccgtccccaccgtggaacattactccgcctttaaaaggaaggaaattctcacacatgccacaatctggaagaaccctgaggatataacgccaggtgaaataagcgcgtgctaaggccgacgcttacctgaggtcccaggagcactccaagccctagaaacggaaggtagtatggtgagagccaggggctgggggaggggcaggagtcagtgtggagcaggcacagagtctcagcctggaagatgagacgagctctggagactgacggtgacaatggccgcgccgcaacacgaatgttcttcatggcgctgagccacacacttaaaggtggtcaagatggtaaaagtcatgtttatttaccaaaatgtaaaaaactaaaacgccaaccaccaagcaaaacaaaacccactgtggccagcacctggggagacctagagggttcccccacccagctgcacgttccaggggagctgcagcctgtggtctggccctgagctggcgactggagccctggacagacggagctggtgtccccgtgtgcccaggtgagcggtctccatgccaccactgagagaacacccccttcccctctctcacaccgccctccacccacccctgtgccgtcgagcttccttctccccgggacacctgcccaacccctgtcctgggctgagcctgcctcagaaaaatgagtctgctccaatgtctgctccccactggattttccaggtgagggatcagcccgccctcagccccatgcggctcagctcctcagggtggtccaaagtagcccccagcccacgaccccacccaccccgccacacacctgactgttccccagccatctccgtccacctggggcgtaactgcccatcacctccttcctcccccagcccctgcttctttgctttgctcctcccagcgggggatcacccctaccgctcagtgctgctccgaggggggctgccaggcttagcagtggaaatacagggatccctgttctattccaactccagatcaacaacaataaatgtttgtgtgccatgcaaattagatttgaacttcagattaatcctaacagctgggcgtcctgcattttattcgccaccctgatgcagagttaggccatgaaggggaggccgcaggggccgggcatgtgctctgggcgtcaggacgcgggtttgtccctcgtggtgagcattgcagctttatcctgaagtccagactgctcatgtcagcacggaagctgcttccccgcagaggcatctgcgtaaagggcgtctgggcgctgggcggctggattctgtctgagagtctgtctcctgtggactcctcactgtccgttgaggacctggagcccaggcggggcagcgacttgctcaggccacaccatggtgccaagctcgtctgctcaagtctgacttttctgcatccgcacctaagcctgagcaggcctggcaggtactctgggcaccttggctgaatcggaccacagtgtcctggagagaagggcccgatgcagaagaagggtctccttcccggagtactgcaggcattggtggctggtgtagacctcggctggagactcctgtcttggttgcttttgcatgcctgaggctgcacagagctgtgcccactgttcccaaacaggtggctgggctaggggaggggcagcaagcacagggtccctgcaggcagcgccctggcagggctcctggcacgcggtggtgtgggggctgctgaccgtagctggctgaggaacagccacctcctagtccccagaacctgtgaacaggaccttataaagcacaggagagagtgtggccttacacggtaacagactgaaccgtgggtgaattgagatcttacgtggtaacagactgaactgtgggaggcctatgggatgagatcatctgggacggcctggtggccctaaatggtctccccagtgtccttgtaagagaagcagaaagagatagcacagctgcccacaggagagggccacgtgaggacggagatggagagacgtggccaaggaacgcggctgcactggagctgggagaggtgggagctgcgcttccctggagcctgccggagggagcccagccacacaacaccatgctcttggacgtctgcctccagagctgtgagaattcacttctgtcattttacctcccgcgtggtctgtcgcagccctggaagcatgcccccgctgtgggctgcagctgcgtggagcccccannnnnnnnnnnnnnnnnnnnnnnnnnnnnnnnnnnnnnnnnnnnnnnnnnnnnnnnnnnnnnnnnnnnnnnnnnnnnnnnnnnnnnnnnnnnnnnnnnnnnnnnnnnnnnnnnnnnnnnnnnnnnnnnnnnnnnnnnnnnnnnnnnnnnnnnnnnnnnnnnnnnnnnnnnnnnnnnnnnnnnnnnnnnnnnnnnnnnnnnnnnnnnnnnnnnnnnnnnnnnnnnnnnnnnnnnnnnnnnnnnnnnnnnnnnnnnnnnnnnnnnnnnnnntcctgggtgcactgtggctagtggctgcctgaagcctctggtagcacttggcccctttgtggtcaaagctgcccagccgtccagggcgggtgcccgcatcccctccgtcagcagcggctctcctctctctcccacaggtccagcttcccggggacctttgcttgtccacagttccctggtgtactccacatgctcctgtgtgcctggcatcgtgcctggctctagggtacactgaggagtgtgacaccgttccagccatagggagctcaccatgtcattcaccacctgccagaagggccaagggacaaggatggggcctggcccatcagaggctctgacctcagctggggcacaggtggagagagcggggtcccttggggcaaccagctggattcagctcaggaactggtgggagccaggaggccagagccagcgaaggacaggacagggtgtcagccaggtggaatcccctgctgaagagaggagaggggggacatggtcttgtgctcttggtgttgacagcagtggagagggggctttaggggcaaaggaggatgcaaagcctgggggccgctcccgagggagaagggccctgctctgtggccactggagggagcagcttgggggctgagaagccgagcccctcccatggctcagagcccctgggcactttgggtagattggggtggggttggggggtctcctgggcgaattcagaacaccgggaggttcctgggaaggaggagctgggacactgaaggtgtcatcaaatcacagatgttgaagccaaggcccagaacaggcagatgagctccctgagccactgcggccgagggtgaggggtaggaccccagctgccctgcagcagcgtccacctcccccaggccagagtcctgtggagatggaggagtgtggcacacggctgtgtgtggggacctaggcaggccgtgggtgagggcccaggacaaatggggccttgaacctgaatggctgccctcggggagggggacacgtgctctaagcaactccagggaacaggagtgggccagcttggaggagggatatctgtctctcgcttgaccgtgggctaccctgtgaggtggtgagctccctgtcctgggaggcatggaagcagagacccgctcactgggctgcagcccctcataggggcttccaagcaccaggaagtgagtggctgttgccccctgccccacccctcctgggatcctggttctgcccacagctctgactcagatgcagctccccggggggtgagaggcccacgtgcggtggctacaggggcagcatctccacgacgcccctgtggggccatctccatgttcactgtttgcagacacccctgtggctgagcacccgatgcactcggccagctggcagggccaagggtcgatggggcggctccctgctggttgggacttgcacggccctgagcaggggaggggggcggggctggcagggtgcctggtgcaggtgctggagggggatggtggggcgagtttctccacctgggtgaggtggagccacggagactgcttttctccagaaccagacgagctccagctcccaggctaggtgggtgccagctcctctcaggttggaggctgggcagggtggggtggggtggggtggggactggtagcccaggggtccagggcccagatggctggatgcacagctggggcagaggcaggagccatgccaggactgcagcctgtaagccgggcacaggtgtctgaggggaacattgcagagacgcagcctccaggttcccagccttccaggcagccttagagagtcgggggctcccccacagcggggtctgggcagccaccgccctgcctccccttcctcactgagccacggggtgccttgtgttccctccaacctggcagggaggctggggcaggggggcctgatccagatacccggcccctgggctgtggggaggagggtggaaggaggcccatcagcaacacacagaggctcccatcccagggacggcacagtccagcggcaatatttctccagggaccccaagcctggctgggacaggggccgtgccttgggcctaagatgagagagctcttctgaagggagggaggagggtggtaaccaaacccagcccccgcctgccctgcatggcccctgtgacattcccaattgctggggactgactcacccccacttcaaaggccttaaatagttcagctatttcacctgccacactgtgctgtcactctggaattctgctgtgtgggagctgaggccccacctgcagacctgctgctcacctgggcaggtgcctcctcacagcccatctgcacagctggcctgcggagtcctcctcaggggccactggccctcacctgccactgttgaagggatgcctgcccctgctctccccacctcagccatggccgtgcaggtgcccctgtggcaccactacctgcaggccatccggtcccgggaggcgccgcgtgcccaggacttccagcgcgcagagaacgtgctgctcacggtgctggagcgcgtgcatgccctggacccccgcttcatcgtggactactcccgtggcctggaggccttccagttcgccctgcgctcctctgaggacccaatggacatggaggtgcccctgtgggtggatgccgaggctctactgattgaggaaccagaggccacccagccggaggatggccttgaattatgccacctgggtgtgcccagggaaggggctggcctggagcggtggaccaccgaggataccttcactgcctcctcggagggtgacgccaagtgccgtggacacattgtgcccagcaaggtcctgtgtgtcctcaaggacctgctggtggcagccatcgtacactgcaagcaccacagtctcatcgcaccaggtacaggcacagcccactctgcacgcgtatctgcgtgtaccgaggggctgctgtgtgggtgtctgtgtgcaagtgtgtgagtgcacatgtgtgtgattgccatgtacgtgcacacagggtggcgactgtcctctgtgtgtgactgcacgcacaggcatgtgtgcacgtgtgtgacactgtgcaagtgtgaacagtgtgttggggcacagaagtcgggagacctcacttaggtcttccagctccaaacgcctgtaacaagacagatgacgtgttccgtgtcgtgtgtgtttgcacgggggttccacggctgccagtcgtccagtggctggagtctggggcagctgcttcactggtggccttgcaggagggtccctcacacggctctgggcaggcggctctgttgccagtcacagcctgtgacctcgaggctccccgaggccatcccgtgcccacttccagtgtctgatgatgttgcaccaggtgggaggggtgtgtgtgtgcctgcctgcgtgcgcgtgagtgcaggggtgtgaatgcgtgtgcaggtgtgtgcccgtgtcttatcagcttatggctgagttgtctattggtgtcttgagccccaagtgggctctgaggctgggcttctgcgtggaccaggggctggcctcagtctctcctctggggccttttgtttgtttgtttgtttgtgagactgagtctcactctgtcacccaggctggagtgcaatggcacgatcttggctcactccgcctcctgggttcaagcgattctcctgcctcagaatcctgagtagctgggattacaggcatgggctaccacgcctagctaatttttgtatttttagtagagacagggtttcaccatgttggccaggctggtctcgaacttctgacctcagatgatccgcccacctgggcctctcaaagtgctgggattacaggtgtgagccacagcaccaggcccacctttggggccttgttgatatggtccagggtgagtctgagcccagggctccttcagcaggggctgcctggacggcgacggtcgccgggaggacagggctcagcctgtgcaggggccaggatgatggggaccctgagtggtacagccatcctccagggggtcaggttgtcctggaagggaactggggactggaacagaatttgtcacatgtgagtcaccacagtcctcacagggctttgttgcctcgagtcacctccctagtattcatctgaccctcatgtcctccgtgaggtcagtgggtggggtcagctcaccttcgcgagaggccatgatctgcttggggatgcccggcgctggggcctgcctggaggcaggggcacctcctgtgggttctggggaagggtgtgctgccaccgccgcacatagccaggcctccagtctgcatgctgggaggccaggagggtggattctaacagaagccctccccagacctgtctagtgccctggggtaagtgactgacctgacctctggggtgtcagcttctggtgctcccagccagccctcaccctgcccccagcccctcgggcttcctgctccagcatcttctgaacctctaatcatgcaggccatggggtgggtatttctatcttcttcccgacctcacttggccctgtccccacctgtgagacaggcccacccattggggtgagcaggaggccgtgccaggccctgagtcattcggatttgctctaagccgccaggctcctcacgcccccagagaggctcctcacgcccccagagtgcctcctgagaaagcagactcgatactgcaggccgcgcccacagcccctgaagctgcgctgggctgggcatgcagggagattccaggcatcgtttcctgacactcaccttaaaggggaagtggcagcctaggtgacaggggtcaggctgcccccaccctgggaaccggtgagaccagcccggggctgtggcctgtggccgggctggtgcagttgcggctgccttccaagctgccaggtcacgggcagtgagcgtgcgtggcccacggcagatgaggtgtgtggccactagagtcggctctgaatggcaggcacctcaagtgctgcatgggggggccctccttctctttcattgatgggaactgaggcccctgtgggatgggccgcccaggcagcagggccagggttgccctgaggtgggccccagaggcgtccccagaactgccccacgggagattgtgggggctgaggggtccacacagccaggaccaggctccctccggaaggaccctggggcggtgggatggtgggaaggcaggccccatgctcgctcatgatggggacctttcccaaggcacatgccaggattccctcggggaaacgccagcatgctgcctgggcccagctccctgtgacctgggcaccctggctggacagtactggggaggggaggggcggcctctcctccggtccctgggccagtgtcaggcgggggccgtgtgggtgtctgcagtcaccctgagtgacacctcacctcttcattctcggatattaatttgtttttgggggggtagggcaactgaggcagaggccagagggcccctggactcaccagaatgcccccagccccagctccagccccattacaccctggaacaggccctccagggactctgggctctgtgttagtgaagtgggcactgggctgggtcctgggtggggtccgaggaggggagggagtgggaaacctcttggtcagaatgtgcctcctgtgggggacaggggccatggggctctcgggcaagggctctctgggaagtgtaggatccagacctggtcaggaatagtggctgagctccgtcactgtgagcctgctggcctgggcagcccagaaacgggggtggctgagctccgtcactgtgagcctgctggcctgggcagcccagaaacggcggtggccgagctggctctccactactggcagctgccgccgcctcttctctccatgggaactgagcctcagcctgggcctgtccctctctccccagctgcccccatcatgtagactggtcccctagctggatccaacatgggcttcccatgcatgcagttgatttgagtggcagggggctctcagggaagcttctaggggcaggggcagggggcagggggcaggggggaggaggaggtgagttctggggaggaaaggcctagcttcgctccaccctctccagctctggagtgggagccctgtggccccagcctggactgctgctgcctcctcccctgcagagaaggcagcagagatgccagggccatcgtcaggaggtagggggctagctgagggctgggactttggccccagggctggggcagagcgagcaggctcaggaaggcctgggaaggcacagcaggcgtggtcctggggtgtggggtgagggtggtgcctggcaaaggaaaacctcatgtaggacgctgctgtcatcactggtgctgcaagtcgctgagctgacagttgtgccgaggactgtcaccattgggcaggcatggtggccagctcctcacttggctgaggtccagggatggacacaggtgtctggggttggggagctgcagcctgcaggtgggggccagcagagaggsctgcaggtgagaggtgatgaggggcaggggcyaagttggcagcaggaggagggctgtggagtgtcctgggcaggtgaggcaagtcgaggggccggcgtgacttgggtctttgcaggttcgctgaacgcggccagcctgagggaggagcagctccacctgtccttgctggtgtccagcggctggagaacaatcagcttccacgtggtgcccgtggtgagaaggaagcttggggcgcctgccctggagggggtgcagcagatgcccggattccctgagggcagcttgagaagratcctcagccaaggggtggacctggtgccggccagygcccagctctggaggtaggcgcacmctcctggtcacaaggttcttggggagggggcaggaaggggccactgcccccatgctcccctggccccagccaggaggatctgcagggtcctccgtctgcctctgcccccatgggcatgtgtgttccactgagattactggggtctctggctgtagggagggtggaaatgtgtcctctcccwagtggaaaggggcctggtggcatctgacactgggtgatgagagacctggaattgtggatggctgccctagaccagacctttcactacccagcttttgcttggggcaggaaaatagskgagaggtcaggcaacctgtccaggcaggtgggttcccagagaagctgagagggttcccacacagtgggggtgcgtccacattgatgtctgtgagaggaaggagaggggcactgggcacaggctgagctcccctggagacccctagccaatggccagggaccgcaccccatccagatctgacaccactgcaacagcccctcagggtggctcaccccgcctcacttgctggaaggatggttgaatccacgctcgtcagtggagggctttgcaaagctggttatgtccctcctgtggttttcccctgcaaggaaaggctcagcggagcgccagtcacctgccctgcattgccgctgaccccttcacgcgaggcaggggcggcgtccaagcttgtggaataaactacctgcccgcctgccgaggaaggggaagggctgggctgggcagaatcatttttgcaagtaaatgggaaaatgacatttttggtgccccacatcctgtagacttgggggggacgctgggcgcgttactggcccctgttgtggctccttgaagggtgggcccatgagggtgcattgccaaggctccaccacctcagcccatccagcatgcacgcagcaagtcatctggtgtgagctgctctgagctgtgggcataggcagggctggggtgtggagcagagattctgagcccatcatgcrgccacccctggaggctgccgccctgggcttcctgaaggggccatgagtggagctgtcacacccccgggctgagtggttccaacctgggcaggtctgagaggcaccttcctgtctacacaaagggccggactggcctggaggctcctacatccctccgtattcagggccagggagtctccacgaaaagcaggcgtgcacactgcacagccgatgacagcagctcccgagaagcctgggttccggctgggtcccaccagcagacgcagcacagcacgaccctggccagggcccgaacctccggggctcagaagctccccatgctgggggccaacagcggcgggggctgacscagtgcgtctgtctgggccccaggacctccactgactacctgctcacgaggctgctgggggagctgggctccctgcagggtcatcgcctggacagcctctcyatcctcgaccgggtcaaccacgagagctggcgtgacagtggccagactgacggcctgacctttggccacctgaaggtacccagggcgggactcrgcgggttgtctgtcaccagggcccaggggtaggtgcacccaggcgtgtccctcctgccagccctgactggcaggcagctgctatgagtcccaagtcggagttggggggattctgagggcctgcccaggttctgaggaggtgaggccgtggctcmtgagggtcaagggaatgtggycgcgggtgccgtggtgccgcaggctggccttcgccatccctaggccgtgacctcggaggccctcctggccctgggacactgttgggtagaatctcagggtggggcctcacagagcccagtgttcccgcccagccagcctcctcccagtgtctgggaatgtcacctggctgggacacctccctctgggggttcccaggagagtccaggcacacccttctctctgcttcctgggccacagtgacattctgcagaaccctgtccttctggggctttgtaacatcaratgctgagaagaacaaggaacaggcaggggccagggattccaacccaccccaaccccgaggaagcaggtgggggctgtgctgtcttggggtctgctcggctggccccttcctggagtgtgtggccagccgggcgctrctccacagatggggctggcccctccacctggctcagtgttgagggagaggtgcccctcctggtgtccggagtccctaggtgacctctggccatgccctctcaggcccccacctgacctggagcttccagccccccttgaggttggatgcatggtggttcccaagccccaaactcaactgcagggtgagaggccatgggagaagagggtttgaaaagccgctgtgagacagggcctgtgagacagggcctggggcaggatggagggkaagggtgtctggagcggccgcaggcagctcaggtcttgtggttcaggccaggggtcatgagcacacaggctaggactgtgacaatgccatgggcccgttgggttggactgcagggggtgagtaggagctcaaaggggcggagggaaggagagaaaggcccagaggatgctgggagctgcagaggcccccaagggaggtcctgkkgggtgaaaggaggagctggggtggggcgccagggccagagccaggcaggggaggagagagaggggttcatgccttcgggagccagcaggctgggggcagcgggtgggaggggcctgggactcygactgggacgtggaggggagggcacagggtaggaagaggtgtgggtaggagcagggaggggcagccagggtgagggygggagcgcagggtgggagcacagggtgggccgggtgggccaggaggccagggctgaccctgctgtcctgcagatggtgctgctgtgggcctctgtgctcttcccggcgcccgaggactgggcagarctgcagggcgccgtgtaccgcctgctggtggtgctgctctgttgcctggccacgcggaagctgccccacttcctccacccgcagcgcaacctgctgcagggcagcggcctggaccttggtgccatctaccagcgcgtggagggcttcgccagccagcccgaggcggccctgcgcatccacgccacccacctgggccgcagccccccgccgcgcrtcggctccgggctcaaggcgctcctgcagctgccagccagtgaccccacttactgggccactgcctacttcgacgtcctgctggacaaggtgggtgctggcygcgggggccttgggcaggcycgggggcatgggagggtggaatggagccctggcctggctccctgcccattctctcccrggtcagcagccccaggaatgctgaggccaggtcagggctcggatggagagcgtctgcggggacatgtgatgtctgggggtcacacgggccgtgggggtcccctcactggtggcctcacagggcctggggcttctccctggaaccagggcagtgggtctgaccctgcttctgtttcccaccagaattgcccccmagctcacacttggtaaatgctcagagccccagctgcccaccctggagttccattcctcatgaagggatatggccttacctgggccccagagggaccatttttttctccctggactcaagaatccacagccgtgctccttgggaccctgtgtcccctgggccacttctcgtgggtgcctggaggctccaccaactgcccctccctgtggcccaggctctgccacctctgctgagcctgcctggagtccaccctgctcctcgcccagggcccggccctcaccctcatcccaggagcaaacacaatctccttccagggcacaaacaggggtttctcagccaccctctcctgtgtcctagtggcagtgaggccccagggtagccaccctctgctgggcatctcctatcctaatttagcaaacttccgcctgttgagatgctgatggcctcctggggcctcccctcatgcccaacacttaagaatttttaccccagagcctgcagattagggggcaaaggccatgctctgtgctctcagcagacctgtgtgggcagggtgcggtgagggtggggtggtcaccggaggcagccttcaagcagcaccgtgtggggcctcctcctcagtgtaggcccatgccagggacgccgtgtgtgaggaggggctcagggagcagyagaggctggggccgctccgcctctaggatgcctgtccaggcagatacccggggcaggaaggcccggcatggcccagggagggccagttgttccacgctgtgctctcggccctgagagcttatcatgggctccaggggtccctgtaacccttctcccctgcaaccctgcctgtagttccaggtcttcaacatccaggataaggaccggatctctgccatgcagagcatcttccagaaraccaggactctgggaggcgaggagagctgagctgggccacctggtctcagccacctgttcttggctccccaacagactctgcactgcaccatgggaggctcctgggatgttwggaagaagaaacgggcttctccttgagggggtagtggagggattttgtccccagcagtggcctctgagagtctttcagtgcctggtggggcagggcaggcctcttggagcacctcctccctgggtcagggcctggatgcaggtgccaagctctccatgtggtgcatgttgacccagccacgtggtgttgtcaagcaaacagcatcggcaggagacctggagctgaggacttggccctgcctgcactgtatgccattccttggtgayraaatgctgtatatttggttttgaaaaaatgaatgtgctgggtatacacagcagaaagggtactgtccactttttgtatatcagtgtgraaaatatttcccctagaagtagaaaaggctcatgtgctgatggataattttgagtcttctccattctctgtgaatgacccccttccccaggcatccccacctcctacctygttcttagagcaarctaaagccaactgagggtgcacacacagccatgagcccacctgcccaggactactcccatctgcttcttcccgtccccgtggaagtggcccctgatatggattgtatctgtatccccacccaaatctcaggtagaattggatctgtgtccccacccaagtctcaggtagacttgtaatccccagtgttggaggaggggcccagtgggaggtgattggatcatgggggtggatttctcccttactgttctcatgatagtgagtgagttctcatgagatctggttttttgagtgtgtggcccctccccctctccttttgctctcttcctctttctccggccatgtaagatatgcctccttctccttcaccttccaccatgattgtcagtttcctgaggcctcccagccatgnnnnnnnnnnnnnnnnnnnnnnnnnnnnnnnnnnnnnnnnnnnnnnnnnnnnnnnnnnnnnnnnnnnnnnnnnnnnnnnnnnnnnnnnnnnnnnnnnnnnnnnnnnnnnnncttcctgtatagcctgcgggactgtgagtcaattaaacctctttattcattacccagtctcaggtagttgtctacagcagtacaagaacctactaaacatcccccctctctgatgtaaggtgtcctctcctggcatctgatgccacccccactctgtccttaccattctttgtgcccacaactcacattctctcatcagcccagcactgcctgcctgcagcccatgacctgcatgggtcctgcccattggacatttcctattcyccatctttggcctctcaggggcattgacccctcagtgcctgagccacagctcacacctttggctcttggaggggacctgcaattcatgcagcagcagctccctggagcctccttgaaagggacctctggccatctgccagaggaagcacagactcacgacaggagatgcccaggccccttgaaggctgcaagatccagggcctgagctgacacacacacaaggggacacaaaatgccatcactcctcccccattagaatgggggctggtrgaagcagaatcttggttcacatctgattcataatggaaccgaagggccaggcccaccctgtggccatccccttggcatttgattgtgaagcagggtggctgtacatagcaggagtaagagctggaatagcaggaagggccaaggggaagtttattgcaaaatcatccctattcccatggccaagataacccagcaaaacataccacatcctgggtgtactaacggaatttagttctactttcagagactttaattcaccaatatggccccagtagaagccagatggattatggtgaatggtagtgggttacataaacttaaccaagctgtaacccgtagtccaggtgctgtgctagacgtggtatccttagtacaacaggacagcagggcctctggaacttgtatgtggtcactggmctgggagaaaggcattctttccaatccccatcagagrggaggctcagacacggtttgcattcacttggaagagrtaacattataagttcactgtctggcccagactgatgttaaccctctcttctctgtcacaatgtaggcctaatgggccttcatcacctggatggtctatagaatattacgctggttcactgtattgatgacatcatgccaattcgaactggagaggattgactggaaagttctttggatgccttctaagaccattcattccagagggtgggagacaaactttacagtctcaggrcctggcccagagattaagactttagaggctcagtggtctggggcatgctgagacattgcttccaaggtaaaggggaagtttttgtaccttgccccacctactgtgaagaacaggcatggtgctgtgtgggcctcattggattttggaggctgcatgcacctcacttggaaatgtccatttgctgggggactcagaaggctgttggttctgagtggggccagggcacaggcaggttcttgagtagattcacgctatgataccaccatggtgccaatggtatctgcagtagaaaggggcaccatgtggcatctctggcaaaccccaaaagaggaggtgaagtcctggaacgagagcaaattgtctgcagcagagaagtactcactgttcaaaagcagcatttggtgtgacaytgggcccctggccaggggacaccaagtaactgtgtgacctgagctgcccaccatgagctgaatgttatggggtcctaagtttgggggtggcagtggtggtgcaacagcaatccattgtacatggacatggcctcttcagggccagrccaagcagggtgggtggaaacaagtcagttagatgaacaatggcctgggtcaccctatcatcacctacgtgcacctgtgcctctcctttaacctcacacataatcgccttgagagggttccctgggactagatgaccgaggaagaaaatcttgagcctggttcatggatatgatggcttggtcttttggtgcgaaccaaaatggactttcccaactcagggttcctagaagagagtggtgagggaaaatmctccgcatgggcagagtatcaagaaatagaaactgggccaggcgcrgtggctcacatctgtaatcccagcactttgggaggccggggtgggtggatcacctgaggtcaggagttcgagaccagcctggccaacatggtaaaaccccgtctctactaaaaatacaaaaaattagccgrgcatggtggcaggtgcctgtaatcccagctactcgggaggctgaggcaggagaattgcttgaacctgggaggtggaggttgcggtaagccgagatcccaccattgcactccagcctgggcaacaagagcgaaactccgtctcaaaaaaaraaaaaaaaaaaaagaaaagaaaagaaatagaaatcgttcatctcttttgtatggagagacaagtggcccaaggaaagaaaacacacaaacattaagacaaagagtattaccagaggtaaggggcgatatttcacaatgataaaaatagtcagttcatcaagaaggtgtaacaatcctaacaacagaccttcaaaatcatgaagatgaatgcataaagggagaaggagacaagaccacattcatgctgggagaactgaacaccccactctcagtacttcatagaaaaagcaggcaaaaaaccaaamcaaaacaaacaacaacaacaaaaccccagtgatacaaagaagacttgaacaatgctgtcatccaggyggacctgaggatctgtagaagctcacacctgacaatgacgaagacacgttcatctcktgtccatgggatagtcaccgagactgctgctagtttataaaacagactctcagtacatgttcaaaatactgaagtccatatacagtatgagctctgaccacaacagacataaatttgaaataaaaaacaaaaatacatttagaatatccaccaaatatctgaacattacacagtataagtctaaatagtctgtggttcaaagaataaatcacaaggaaattataaaatattttgatctgagtgattccaaaaacaccattgatyaaaatttgggagatgcagtgaagaargcgctcagagggaaatgtttagctttaaatgctcatactagaaaacaaataaatgtttaaaatcaattaagcttctaccataggaagctagaaaaagaggagcaaattaaaaccaaaggaagtaaaataaaaggaacaataagagtggaaatcaatacaaagcaaacaattgagaaaatgatggtaaatgtcgcttttttggagagactaataaaatcagtaaccccctagcaagactgaycaatgggagaaaaaaaaggagaaaatataaattaccaataccaggaatgaaacagggaaatcaatagagagcccgtaagcattaaaggataataaagggatattatggatgattttatgccaacacattcaacaacttggaatcaagcatgctctgggtaacacaaattaccaaaacgggcacaaagagagagacaaaaatctaaagaactctatgtctatgaaaacattagaagtcattaaaaaaatccttcccataaagaaagctcctgtcccataaagcttcactggacaattctaccaaaatataaggaaaaaaaaaatagtccctattctagacaaatttaattgataaataaaggaaaagaaaatactgtccaaaccactttacaagaccaatgtaaccttgctatcaaaacctgacaaatatattacgagaaaataagaggtcagtcaacgaaacagcacatccgtagaatatagaaacataactttatgatcatctcaccataggcagaaaaggtatttgacaaaatacaacagctgttagtgataaataccctctgcaaactaggacaggtggggacttcctgcctctgagagcagggcagctgcagaaaccccactgctgccgtcagcctgacgctgagacattaaacacrtctccaaggcragaaggtgcacrctcatcactgagattcagcactgtatttgtggcctacaccgttgcaatgaagcaagaaaaagtacataaaaggcagaagatgtacaactctcattagtcacagagagtttgattatctacttagaaaatttaaaggaatctacaaagaagctactaggccttgtgaatttaggaaggtcagaagatacaaaattaatatagaaaaaaatgagattatatattaaaaaataaacaactggaaataaaaattttcaaatgccatttataacagcatcaacaagatcaaacacctaggaataaatctaacaaaagatctacgcccaagtgggctgtttccaggaggttctacttggagggagaagggccgctgggggccggggaggctgcctggtcctgcctcctgggctggatcwgtggctttcctgttcctgggttcctggctttccttaaataaccccctcccrctttgctgtatgttgaaaactagaaacattgctgaaagtaattttaaaatacttacatttctgtttgtgaaatggaatttatactttatttccattttccttaagttgatgtatagatttggtgcagttcctaccaaaatttcagcaagctattctgaagaaatagacaacatgaatctaaaacgtacacagaaattcaaaggatgtagaatacaaaaaacctttaaaagggagaaaaacattggaggacttgttcttaatttcaagagttattgtaaagctacaatatttgcaacagcatgggattgacacgaggatgcaatgaaacagaagagaggctgtaaatagacctatgaatgtgtagtcaactgatttttaacaaagttgtcaagtcagttcaatggggaaaggaaagtctgtttaacaaacgttactggaactgggatatcagtatggataaaaatgaaccttgaccccctttctacactgtgcacaaaattaatatgaggtgtatcrtagacctaaatacaaaagctgacactgtaaagtttctagaagaaaacacaggaagataccgtccagacctcaaagtaggcaaaggtttcttagacaagatacaaacagcccagaccatagaaaaaaactcattcataaatacgacttcaccaaaattgaaaatacctgctctttgaaagacacaattaagaaaatgaataggtaagctgggtgtggtggctcatgcctgtaatcccagcactttgggaggctgaggtgggtggatcacttgaggtcaggaatttgagaccagcgtggccaacatggcaaaaccccgtctctacaaaaaaacacaaaaaattagccgggtgtggtggtgcatgcctgtaatcccagctacttgggaggctgaggcaggagaatctcttgaacccgggaggtggaggttgcagtgagctgagatcacaccactgctctccagcctggatggagtgagattctttctctaaaaaaaaaaaaaaaaaaaaaaaaaaaaaaaaggaaagaaagaaaaaagaaaagaaaatgaacaggtaagccacagagagggaggaaatattcatgccacacgtatctgatagtatctagaatatattttaaaatgatcacacattgacaataagaagataaaaatycaaatatgaacaaaatatttgaactgacacttttcagaagatctacaaacggccgatagcttatgagaagttgctcaacatcaataggcatcagggaaatgcaaactaaaaccaaatcagacaggattttacaccccctagcaaaaaaagacaacatggagtgtgggtgaggacgtggagcaccctggacgctgtagctgcgggaatgaaacatggaagagccacttcggagaatttcgtggcagtctcgtataaggttaagcctattgtatgaccctgcaattccactcctagttatttatccaagaaaaatgaaaatatatggccacacaaaggcttgagtaagaatttcactacctccgtattcataacagccccaaaatagaaataacccagatgctcaactatggtgatgaaccaacaaatcatgaggtgtccatatgacggracggcactcagcaacaagacacaccggcgcccaygacgcacgtccatatgacgggacggcactcagcaacaaagacacaccggcgcccacgacggtacatgtgagtgtcaaaaacagtaagtgaaagaagctggcacagtggaggacctgctgtgtgttccactgaccatgaaattcaactatggctgggcacagtggctcacgcttgtaatcccagcactttgggaggccgaggcaggtggatcacttgaggtcaggagttcgagaccagcctggccaatatagtgaaaccccatctgtactaaaaatacaaaaattagccgggcatggtggtgcacacctgtagtcccagctaatccggagcctgaggcaggagaatcgcttgaacccgggaggtggaggttgtagtgagctgagatcrtgccactgcactccagcstgggcaacaagagtgaaactccgtttcaaaataaataaataaattcaaatatgccaggctgatctatggtcacagaagtcaggcagttgaggggtgggcactggctggatgggagcataggggaccttccattggaggcttccacgtgtcatgggctcaggtcctggctgtgcgctctccagcacgcaggtacccttgtccatgacaggggtctccaaccagccctgtgcgcyrtgtgggttcacctggatgtggtgcgtgaggacgtttgggggtgtgacwtctggggctagagtgtggtgacagcacctcctccaggggaggatctaccctgtgggctccaggatgaggagtgtccccctaaagtccacaatcaggcagctcagggagcagagatgctctcctctcactctttcacagaccaccccacacagtgaggagagktggccaggccctttattaaacattcccgggaggctcatggcctggggactgcagctcatttggaaggcactgggttttgcgcccaagtggactgtttccaggaggtgccactggagggaaaagggctgcctggggccagggaggctgcctggttctgcctcccgggctgggtcagtggctttcctgtccccaggcctggaggaccttgcagggtctgtttgctcctgatccctcagggtgggcatggkacaggtktgtgccagtgccagytgtgtgccagtgggcaggtcacagcttcttcttggggcagtgctgcagggccgccctcagggcctccgtcacgcggtccacattctcgcgggtggcattgcagcccagcaggccgatccgcagcacctggggggcacagggcgggctgacgtcagcctcccgcctgggacctgcctgaccctgaccgacagctggccagagccaggatgggctcacctgagtgaggaccacccacccagygtccatgaggggagttgacagccctgtgcaggtcacagagggggcccttgagcacccaggccagggcaggctctcctccctctgcacccrcagccacacgggaggacagggtggtgcagtgaaggtccctccccactgccactcagagacacagccaggcccaggcgtggggcttccggcctggttccagggtctggtcagagggaaggaaggatgttccgagtggaatcataaaggctgcacctggtgacctcagtgggctggggtgggagcaggggcgacaggatacgctttactggataccccttggagagtgggcccttctggacgctcctgcaatctgggctttcggatgaccccggcctcccctgcacctggtgcacagtcctgctcaaggaggggtggcgggtttggtttctgcaaaaggccctcraggcgctccctctcaccttccccgtggagggcccaaggycacccatgatctcaatgtcgaagtggtcyatgacgtagctgacgatgtctcwccagtcatagccagcgggtacagccacagtggtgactgtgggaagccggagcgcctgcaggaggggcctggctcagtgcgtgggtgagaggccctgtacgggcctttgtgacagctcttggcctgcaccatctgccccagcttcaggttccagaggagccgggggagaaarggccgggagagagcagggaccccaccccttaggaggcggtggatgggcamcttcccactgggagatcacaggccgtcctgagatcccgcatcagaggccrggagctgtgacttcgtggctcctgccgagactaatccctggcaccraggccacaccaccgggcagccgccccctccttctcaggagccagtgtccctcttgagggggctgggcaagagcccctcatccttccccatgggtgcagggctgcccaatgccaggggcctccttaccgggtccttcacgaagagctgcagccccagtgcctgcaggcgcccatgcrgatacgccgyggcctcgcggtgctggyrccagctgttctccaggccctgtgtgggagatggcgctggtgggcagygacatgggtggggtgggcaggaagccccgccctctgtggtgcgggaggaagaaactgactctgcaggccttggtgcaggggagcccctggagcccccagtttgactttgcctggggcagggcctgggactaccccagggcagaaggaaacatctgggtctgggagagacagaggagggttcagagagacagaggggaggtctgcctgtggcccctgggggagaagagtggagagtgccttgcagggggaggggactgggcaaggaggggaagggctgttgggctacacagggctggagtggatcagggccagggctcagggtgctggctcccaggccccctctcctctcagggccagctcccccgacctggcatcctccgcagcactgctcctgcctcagctctggacaggtgaggggtggtctctccagccctgggcccctcagtgccattacctctggtcacgggtcctcccggcctccagccaccagctctcatggccaccccaggtgggtccccggagcagcagctgctctctactctggccctggcccgtcttctctgcgcatgtgcccctgcaatctgcactctgccaggtccctgtgcctctgcccttgactgtgccctgctgtctggtcctgttctcttccttctctgcccagctcacaccccycacccacctttacgaccctagagcctttccctgtgtgagcgcctgacccctcgccttcccccgcgggtgcgggtggcatttagcttacaggggcaccctggcactaacccagccctaggcagtggctttatgagtggacccaggaggacaaacgtggcaggcacggccttgcaacctcatgggaasctggctgcagcccggggatccttcctggactctggactggtggctggcaatgggccctgtgggacacaggacccagatgaaagtaggtgggacttcctgtctcgtggcctgcagagctgctgggcctgaggccactctcagccgcctgtgtcctgagagtgtggatgttgcagtgtcctgagagtgtggatgttgcagtggccaaatcaamccctggtcacacccaagtgctcatgctcagctcttgccctgccataggagctggacaagcctgcaggaactgccaaccctcactttacatccacgcccacctatctgtgggcacatctctggccccttcggcctccccttctcccagcccacccactcactgggcctcacttactgcttcacacagcaatggaagggttgggagcatccacacctgccccattgctgcatctgtcyctggggctgtatccccctggccctgcccrcagccagtgtacccggggccctgtcctctctcccccacccccactgagggcctctctctggcaggctcccttttctctgtgcaccagggatggttccttctctgcaggccgcgccctygacaatccagccagtggccctktctcctcctgtggagtgcagcccatgcacctgttccgcaatgagggccaggctctctctcaggctgtacaggctgatgacggggattgtgtgatggtacctggaagacacgagggggcttggtccagcaccatgggcagggtyrggggcagatggggcattagctctgtctgcccyagccccaacagcacaggctctctgaccacaggccggtatcctccgcagaggagtcctgtccgggttcagaactttggaccgggaaggcagcttcgtctgccagggagagcatggcttgtgtagggcccagccaggaggcagtgggtggctgcaggagcagagacacgtgccaccacctccctgcggagcccctcagtcccagcgtgcctgcgaagccggcactggccctctgtgcccactgggctagggcaccattcctggcgccttgttcctgtgtgtaacataaggggccttgggtttatggccaaggtcgtcttttcagaaggggtaagctgaggcccaggagtggggagatgtggcagggccaggtccaaagtgcccgagggtgtgctgggacctctggggggacagtgtttgtggaagcggcagtgggggccatgaccctgcccagagcctcgggccagtcgaggaatgggggaacccagggtggggcatttgactgcctgatgcaggcggattctggggctctagttggggttcttgaggcatgaaggtggggggcttggagaatccctgagtgcagtgagaggccagcgccccacctctcagccatgcccagcgccctccaccttcccatccctgccaggcctcacatcctgggctggtcgtcacagccccagaagttggccagccacttgrtgtccaggtagaaggagaagggcttygtcttgyrggagtacatcttctttctggggagaaagaagyaggctgagcaccagcctctcagtttgggctgaaggccagggcagtctcgctggctgtcctgtttcacgggagtgagacggggtggggcccccaggagggcccgccccagctgcatttgtgctcaggggccagagtgggaccgggtgggtcgtgggtccctcagctgtccagtcccgctggcccttgggcccagctgtgtgaccctgccatgggggcaccaaggccagctccctccactctgtgtgcccctttctctcccccagcccctcctacagggtcagccttcatttctcacatcacccaaaggtgactgctttcgggccccaggggacactggccaggcttgaaactttaaatgtgtccgtctctacaactccagatggaggggccagccccggcctctccccaggctcctgactcacacccagccgcttccttcaccctcccgtgtggtccagctggcatctcagacctcccacgtccaacaccgaattcctgacttctccccgaagtcctctctgttctggggaacggcacctccagttgccaggctgcagctggatgggaaccgcctgtgaggtctggcccccttcccctaccccctgcccggcctggctcagaatctggacaccaggagcgggaggtgagattgggactgcagggggcactgtgtgtggcccacgttgtcccttggggcagcccctggaagctgagccagggcrgaggcyggtcagggcactgggcctcaggccctcagtcctttcctggtcactccttgctgtgaagctgggaacttccagagcagtggactctgcaccctgcacacgcctgcagccctcccctcgcccggcctccccactccctgtgaacgcagtgcctttggcctcccagagggtgggcgggagagcgccaggtgctggaggagcatggggagcccttcctgcctggctcccgcccctcccgcctcgggccacctgagctccctgcaagcccagccctgcacagaggtgaggrtctgtgggtcactcacttggccttgtcactgaaggagatgagygaggtccctggaggggcgttcagggccttctgggagcccgrgtacaggatgtcgatgcctgtagatgggtggtttgctcgggacgggtgagtcccacctcagggcaggccagtccagcgggatgcctgcctagctaatgggctggtaggctacgaccctaccacgaatccgtacacgatagcaggggagatgtggaagggagtcctgggttcaaatctgggcactgctgcgtggcagccatgacctcaggcctgagcgttttagcgcagcttctccctctgctgtgctggtccccagggacagccctgccaccccaggcaccgtgtccctggggccctccccaggtccctgctttcagtagtagtttgaggatcagcccagaaatccctcccttcctgcctgagaactcccaaatcaggaggggctctgcagaaacagacaggctcccatggagtgggtgggcaggcaccgcagtggatgcaatgtgcaggctctctcccgtaagcggatgggcacaggaggctccttggcccctcggccggcctggttgaggttccctgcgaggtgaccctgacagtggtgctcactgctatgggcagcctggcagggcgcagggcagatgtgaaactgagcctctggggggttgggcagaggggtccccaacgcctgattgactggagccctggcccttcctcttcccactgcttctgctacagctctggggcatctcaaatgtcccccaccagaagctgtccstcctgccagtccccacgcctggatctgaaagctcagtggaaacactggggtgctgggtagttcatggagccgctcttgccgcagtaaggagtgagtgtttccctgggcctggtggagatggggccgaatcygcagcatcggctgctggacgcacgcttccagcagggcttcctgcacgcggagccccmaggctgcttgggctgggtagggctctcagagcccacccttaccttgcyggtccatgtaaaggggggtcccgcccagggatgccaccgaatycaccaggagcaggcacttgtacctggagaggtgggggacagaatggagggcagcaggtgaggcagggggccactggagggcctggccccmggctggatggggtttctgagcctcaggctggcaaggaaggcagggcacctcccacctccaccccaggagttggccagttgccttctcctgcctgtcaggatccatcaggacctgtggctcttcctttctcagccctgaacattggagyagagggagctgggggagtgagggagcatcacggccctggtgagacccagctgcagggcccggcagtggtgctgaagagggtcagccgggcagtctgtggttcccagggacagcgggtgcctgagggcctgtgtggaccccagggaccagggtggcaccaggctgggcctacctctgccaacagctgctcggcccagccactggccagaatctaggccagaggggacagagtcccagaacagcccaagcagcagcgccacaaactctcaccctcctccgcctccatgttcacgaactctcgccctcctccgcctgcatgttcacgaactctcaccctcctgctgcatgttcacgaactctcaccgtcctcctcctgcatgttcacgaactctcaccctcctccgcctacatgttcacgaactctcaccctcctcctgcatgttcacgaactctcatcctcctccgcctccatgttcacgaactctcaccctcctcctccatgttcacgaactctcaccctcctcctgcatgttcacgaactctcaccctcctcctcctgcatgttcacgaactctcaccctcctgctgcatgttcacgaactctcaccctcctcctcctgcatgttcacgaactctcaccctcctccgcctccatgttcacgaactctcacactcctccgcctccatgttcacgaactctcaccctcctccgcctacatgttcacgaactctcaccctcctcctgcatgttcacgaactctcaccctcctccacctgcatgttcacgaactctcaccctcctcctgcatgttcacgaactctcaccctcctcctgcatgttcacgaactctcaccctcctccacctgcatgttcacgaactctcaccctcctcctcctgcatgttcacgaactctcaccctcctcctgcatgttcacgaactctcaccctcctccacctgcatgttcacgaactctcaccctcctccgcctgcatgttcacgaactctcaccctcctcctcctccatgttcacgaactctcaccctcctcctcctgcatgttcacgaactctcaccctcctccacctgcatgttcacgaactctcaccctcctccgcctgcatgttcacaaactctcaccctcctcctscatgttcacgaactctcaccctcctcctcctgcatgttcacgaactctcaccctcctcctgcatgttcacgaactcttatcctcctccacctacatgttcacgaactctcaccctcctccgcctgcatgttcacgaactctcaccctcctccgcctccatgttcacaaactctcaccctcctccacctccaggttttcttataaagaaaaaagagacacagaaagtatctcgtgctggccgcaggtggggatggcctgggtgttgctgaagctggccaggttatgtttgtgagctttattcatggccacggtccatgcagcaagctgtctgggctgggggccctgtcagaaggaccctccctggccgtggagtttctctcctctgtcctgtgctcagacctgcagacgggactgctgggtcccaaggggctctgtccgcatttctcaggaatcccatctgactccattcaaggccttgccctgtgcacccccatgcggggatgagggaggctggaggagggaagtggagggcatcaggcagctttagtgtcctggcaatctcggggtgaggtggggacaggccctggcaagatatggaagtctgcaccaagccctcttcagccctggggacagaggtcagtgggcactatgggggcgctcggccagggagcacctgagcctgccctgggacctggggttgtctttagactcagcccagagcaaagaggacctgggaggtgcctgcaccccataccatgtgacagaggctggggtggggaccagrggcagaaggaccagagggaccagtgcccacccctccccatagcctggctctgagctgtgctccagtccaccgccctggggccaggctcacctgtggyagagttcccygaagccatcaaggggctgcagcacgccggtggacgactcccygtgggttaagaacagcagcactggcttgtgctgggccaggccctgaggaagcagggacggctgtgggtggagctcagaggggcaggggccagaacacccccacaaaccccccatgggtggcacagctccaggtagcaggggctgggcctgcctctactcctccctgatggtgtgcatgggaggaggaggctggggcatctccgctccgggacaagggcttttccaagaacaggactttggtgcagagatggaggagggtgcccccagcctgttgcctggcctgtgagggctgttgctagatggactgagtccccacactccgggtaggctgaggttgacttcagcccacagggtggggtatcctgagtgtcagggacatgttctgcagcctagactccaactcggcctcctgcctccagcctctctggccctgcctacaggaccaggctcctgactcagtttccctgccagacagaagcctccttaccagtcttcccaccattcccaggtaatggaaccctcccctgtggccgctcaccagatgctaggatgggctgagggtcagccaccagcctcccggccatgatcccaccctgctggctggccaattccaggcagcccctgagccagcatgcccactcccacctcctcccggccctgacccccaccccgggtcccctacctcctccacctcctgcagtgtgtagtggcctccagggtccttggtcatcgggtgcactcgggctcctgggtgcaggacagagtgggccgtgagtgtcccgcacacactgtagaagccagtgttgggcacccgtggccctgctgagcagggccctgtgagggctggaccccacccaccgtggcaccctggctgcctgcctgaagaggagggtggactctgcccaatgaragcctctctgtgtgtagagccagggccatcttgacccccctgctgttggagccaacgctcctggggcactcttgacagagctcagctcaaatgccctttctcaggccacactgaccagtgcctccccaagcagagagtgagctcccgggagtcagggctgcacctggcccagggctggcacaaagagtgtacctggtccagggctggcacaccacaggtgtgatggatgacagactgaaggatgaggggtgagtgaggcagcagccttgacctctgttggagctggggactccaggaatcaggccctcaccccctccctgtctctgccctatcctgtgtgctgttcagggccaggttgtgggaggggaagaacctgcggccaaggggacagaatggggaaaagggaagccatataccacaggcatctgagcctgcgtgccctgatgtccacttggggtcctggcctctgccgaccctgggtccccttgaaaagtttgtggacttggggttgggaccctcttggctgttgcggtcgcgtattaaccagcatggccattgtggagctcaccaagctgatgtccctcaatgccacaatcaatcattaaacccagggcacactcctgctcctgtgtctctcccagaaaagtgtactccggaggcgaatactctgcccatacctccatattttgtgtatcacatcaagattccagaaggaaggctgctgagatttgaggggaggcttcagcttctgaaaccccaccctgtcacaaagcagagctggtgcctggggccctggacagcggccggggctctcaggagtgtgtgctgggaccagaggcttccctgtagttccgtcctgcacatgctccagaaacagctcaaggagactggggggatcggggcacctgtgctgctcccagccctatcagagtcaggcctcatgagtgcccgacacmgcctggaggaggcagtgggctggcaggaggttcgtgcgcacagggccacaaggtgggtaagcgctcacccaggaacgggggctgccagcttcaaacagagggaggccttgaaggatggatccagggccatccccacctggrcctctcccttacctatgcgctcccygatgtccacggctcgctgcccccaaatgccattggccccaaccaggaaggagtccccaggctccagcacattgaccagggcggcctccagggcacagtgtyccgagccagagatgaccagtgtgagtgggttcctggtctggaacacgtactggatgccttccttgatctcgtccatgatctgcatgcgggtggtatagggtgagacccaggctccccgcctccccaagtgaggaggcagtgacccccttccctcgtccacgatctgtgggtgggaacatgggtgagacccaggccccccgagtgacccccactcctacctggtacatatccttgctcatggacccgatcatctgcagccccmyggctgccatgatgcgaggaggcaggttggaaggaccaggccccagcaggagctggytggggatggagaggggcttgagcagggccttgrggggggtcaccagcagcttgtgagaggccatggtccgcacccaacctgccgctygggaacctggggctgcactggcyttggccaaagcctggaatatttcccagcagggcggacacagaggtgagaggtgaggattggtggatgggcttccgtggcagccctgccttttgttccctgaggcttatctgtgcttgtgctgcgggtcacggccaggcagcaggggacgaagccctcaggcagagggagcccccagggctgagtgacagaaaaacagagtgtgacaaagctgtcctcaccccagccctcctcgctcccactctgagtcctgcacgtccagcccctcttattctgyttagctcaggggtgagagaagtgtttcttaaagggtcggagcacagataattgaggcttggcaggccctgtggtctatgttgcaacaactcaaccctgctgcgtgcttgcaaagcagctgccagaggtgtgggcgtgttcctataaaactttatttacwaaaagcaggtggcaggccagattgggcccatggactgtggtttgctgaccctggcgcagctgatgggaaggcttgtaaaccaaaaataaaattcgaaggccccccagcaaccatctgaatggggttccctgtccgccagggtgctctaaactttaacccggaagacgttcaggccatgccacatcataacccccagcattaacatcgacatagaccttaagtctgataggaagcatttaccatctattttctctctaaatcccgctacctgaaggcatcatctgctccctgcaacccctatttcataacccagacactcctttctgctgataataattcttcagtcagttgccaatcaaaatatgtttaaatctacctatgacctggaagccccccaattcaagttgtcccgcccttccagatggaaccaatgtaaatctcccatgtattgattgatgcctcatatctccctaaaatgtataaaagcaagctgtgccccgaccaccttgggcccttgtggtcaggggtgcacccttgagcttggcaaggatgtcctccctcctgaggctgtaccacgggtgcatccttagccttggcaacaaaaactttctaaattaattgagacctgtttgaggtactttttggtttacaggctcaatttagcaagcaaacctgcatggtatacagacacacacaaggcaggggttgcacagtgagtttcagcatgctgcattccagagatgtatagaaattctagttatgtataagttttaggttgaaaagaggcctggaaccaggtgccaactttagataatagggaagtctaattcattctacatttcycaaataaagaggctcccctccacccaccccacctggggcctgcttgatggtctccaggtgatctttgctgtcctcattttccctctgacaaatatcttggtgaaatctttgacccttccttttctgccatgctcatgtccacctgcttcctgttggggtctcaagaaaggggaaacggcacagtgaagaggggtgtccagtgcgcctgactacttgctgctgaaagggagttcagggggrtaggtcacgtttttccctttcttgctctcrgtcatgaagggaataaagggtcatgaaaacttgtgcacggaggcacgtgatgggattccatcaagaagccccacgtaaatgggagctgcagttgcaggccggtatttccatcaagaagccccatgtaaatcgagctgcagttgcaggccagtgttgggaatgcatagccttctgcaggtggaattgttctcatgtagaacatagaaamgcaatcagagcattaaaaaggcagggaccaaatattaaaagaaaaatgacagaagataaaggtctaaggaatgggggaagccaagtgattttttgaaaaccaatcagtaaaagttttggcccagtcttggttgctttgggaaagtgtgtgtagccatttggcttgtttgatgatttyttgggcatcggtttccacttctccagacacataaatgtaggtgcaacgggtcctgttgatgacagcacagacccctccttgttcagctaggaggtaatccagaactcacctgttaccagacaccaaaatcctgcttgtgagtctaatgacttgtagagctgatagatgggtgccagcttttgctatttcaagggaggcggtaggttctcttacttgtgatttcctggtaagtaaaacctccccaaggggtaagagttgtgatagttcccacaactccggccacagtaagtcccagggcccttttccttctagaagggaattctgaattagaagtgatgtttaagacagtgatttgggtgggagctattgttcccaggctacaatcaccatagtgaagagaatgatcaaggtgggatagggccaaagcttgaaaagggtttaaatagtttttagyggggctgctaagccataagagcccaggaggggcaggatgattattttaattaaaatgttgggaaaaaaggaaatgggccttttgacarttttaagaggactcatatgggggaaagactatgtttatgtactgatggaggaggtttaaaagcaggcgggtgccagtgcatggcataggatgtaaaccaggtggcacggtggttatttcctgcactggttgcatcattatagtaacatacatgaaggtattaggagtgcaggggtgctgtatactgggagccccactatactggtccagtttaacggcttataaattggcagtgatgagatagagtcagatttttttttttttttgagatggagtctcactcagttgcccaggctggagtgaagtggtgtgaccttggctcactgcaacctctgctcctgggttcaagcgattctcctgcctcagcctcctgagtagctgggattacaggcacctgccaccacgccctgctaatttttgtatttttagtagagacagggtttcaccatgttggtcagactggtctcgaactcctgacctcaggtgatccacccacctctacctcccaaagtgttaggattacaggtgtgagccagcrcacctggccagagtcagagttttgattgtaggaggcgaaggcctcaaatgagtcaaagttagctgcatgagtgtcattataacaaggtgtacctcccaaaataacattacaagttaaggaagtttcagtgatattgtaagtgtggatggtgggggaagtaatatgatagcacgaagagggaggtggtttccaatttaccagcacagaaggaaatggtcggggtgggaaggagtggtgagaagaataatgaaatcccaacagtacagtttgattggagacagggtgtgcttacgaagaagaatctacatggcttggagtagcaggttgtggacggcaaagccagccacacagagtattttctcctctcacaatagcatgtgagatgctgaagatgatattgtcaaaccaagaggattgggaagtttttatatgagagataaagagaaaaacatgaaagaaagaaaaaaggagtctcattgttctaattcaaggactgttacaaaagttgctccaagtataattagaaaaaccaccctgcaaataaaaatctagtgcaagctgaataattgtatgtgggtcttgagaaatggggattggataaagagacagtaaattggctrggygtggtggctcatgcctgtaattccagcactttgggaggctgagacgggcggatcacctgaggtcagaagtgtgagaacagcctggccaacatggtgaaaccctgtctctactaaaaatacaaaaaaaaaaaaaaaaaaaaaaatagccgggcatggtggtgcatgcctgtaatcccagctactcaggaggttgaggcgggagaatcacttgaacccgggagatggcggttgcagtgagccgagatcgcaccattgcactatagcctgggtgacaagagcaaaactctgtctcaaaaaaaaaaaaaaaaaaaaaagtaagtgaattgaggataatctcagaaaattggaggacctaaaaacgcttctagagtacataaggaaatgaatgacaagggagggaaaggaaagtgaatgataaacacagcaaaaggcttacgtggtatcctttgcttttgaagagaggttagtgtcacctggttgtttgcaaaacaaaaatcatnnnnnnnnnnnnnnnnnnnnnnnnnnnnnnnnnnnnnnnnnnnnnnnnnnnnnnnnnnnnnnnnnnnnnnnnnnnnttgtttgcaaaacaaaaatcatagatcttccaagggctcaaagtgtaagcaggctggagttctggcggcagtacagactttatgtggcaaaggtggacccmaggggagaatccctgcagttaacagctgtgggagaggctatgaggacttgaaagggtccagtccagagggctggaaggggttttctgtctggaggcaaagtttttaaatatacccagtccccaggttaacaggaggtcttagttctgatgaggaggggtcagattttggacaaaatttatcctggtattcagtagtggcctggatagtttgcccagggaggcatcacattgagacagataatgagcctctggatcaagtaataagtccgtttgtaaaaaggggcatccataaataatttcaaaagggctaaggtgggttgaaacctttgggaattactctagatcttaacagggcaataggaagaaaagttatccaaaacagttgagtttctatagagagcttagtgagaagggttttcaaagctagsttggcccttggatgactgtgggtggtaagcagcatgtaagtgatattttatttggagggcctcactgattcctggagtaatagaagaaataaaggccaggccattgtctgattggagggattgagggaccccaaatcgaggaataatgtgttctaaaagagccgtagttacttctgatgctctttctgttcgagtgggaaggctttagtccagcttgtgaaagtgtctataaagactaaaaggtatctgaatcccttatgagagggcatgtgggcagagtcagcttgccagtacgcccctgggacaggccctctacgttgaataggttggaggagggcagggggttcattgcaccctccggatttgattgacagcaaattgggcaggattgrgaaatgtcccatagagttggggctaggctaggttaggcccttgaaaaagaggatctcttaaggcttgtaaagtttccacccccaggtggttagcttgayggagattttagaggattttccattgtggaacctcagggaggagaagtttattttcagagttttgaagccatccttcaggaatgaatgtgaaaccctgttttagtgccttttgtaaattttgtggggtgtgctggggttttggtgggattgggtgaggaaagagggtggccaagcagttgatttagtttgtttatctgcataattatcccctctggcaggatttgagttatctttttgatgagccggacagtgaaggattttgctatttcaatcaggagatgtatgtcttctagcaaggttgaaatttcagggacatgctgaatgggggtgttatgggctgtgagaggtgcatggttagtggcggtgttctgggctgtgagagatcctctttgcttccagtggcttcatgggcatgcgttacgtgacacacagattgagtcaggatgtaagtcacttgagctttattccagtccccagttagagagctatggtaagggctattagttcagctttttgagccaaggtggttcctctgggtggaggacctgattctatgactttagttaggctaactatagcacagcctgacactctccttctaaaatgaacctgccaccatcagtgcaccaggtagaatcaggaattttatgcacagtgtcctttagatcagccctagcactgcacgtaagatcaatagtttctacacaggaatgtccaagagcagccataggttttatagataattcaggagtttgcaaaaaaagtgattggtacttatgaattctattatctgaaatccaatagaaggctttaaaatttagaatatccaagacctgatgcggggataaaaatcattaaggtttgtcctagagttatttttgaggcttcttggactaacagggccaccactgctaagacttttaagcaggggcgccattcctgggatgccaagtaaaggttttgaaaaatacactacagggaacttagagggccccagatcttgggctaaaactcccaaagtgattccccttcgttcatgtacattcaaaaagaaaggcttggtcagatctggtaaggctaaggctgggtctgagattaaagcctgttttaaagtctttagagcatgcttcatattattagtccatgttagaggttgtccctcagctcctttgagggtttcatgtaaaggttttgctattaatccaaagggaggagttcatattcgtaccctctaaggacccaagctgttgtttagttcctggagttgtcacgtttaagataagatcttatattttgtattttattttttaatttattatttattttattttattttgtttattttttagactgagttttactctgtcacccaggctagagtgcagtggcatgawcttggctcattgcaacctccgcctgccaggttcaaacaattcttctgccttagcctcctgagtagctgggactacaggcacctgtcaccacacccagctcactttttttgtatttttagtagcaatggggtttcaccttgttggccaggctggtctcgaactcctgacctcaagtgatccatctgcctcagcctcccaaagtgctgggattacaggtgtgaaccactgtgccgggcctaagataagatctttacaagtgctagagaggctctttgtgctgggagttaagataagaccccaaaattgaacaccctgtgtggatatttgtacctcagaaggagatactttgcacctataatcagcacgtttgtttagtactaatacagtattttggtctggaacagctttgctaggactacagattatatgtcatccacatactggagtagattgctatctgggagaagctgcagtgtggacaggtctttagggcctgtctaaaaaggtgggagctatctctgaatccctggggcagaactgtccaagttaactgttgagttatttgagtatctgggccttgccattcaaaagcaaacaaatattggctatctgagcatacaggaatgtagaaaaacacattcttaagatcaagaactgtaaaacaagctgtagtggagggaatctgtccaaaaaaggtgtaagggtttgggacaataggatgaatacgaataacagcttcagtaatgactctaaggtcggagccatttggtttctttacagctaaaaggggggtgttacaaggtgagttgcatgggtacactcatccacgggttaaacatttttgttattagaggttttagcccttttcatgcttctggtttcgaggggtattggggggttctggggaacttattggaatttttaagctgaatgatgacaggagtggctgatattgaacggccaggaatagaagttttccaaacctcaaatggcacttgktttagaatgtgaggttctacagattgtagcagctcttttggtgatgtgtgagttaaaacagctagaaggtgaagccttagctataaattagcttgtaattttgtgagtaagtcatgccctaataatggaacaggtcagcttggcaggactaaaaaggagtgcgtaaaggaatagccttccatttcacaagggagtggtggtgtgaaacagcctcrttggggttttccattcacacctgtgaggaaaatgagggactggaacattgggctacagtaaatatttaaagctgaataactggcccttgtatccctgaggaacattgtctcttgttcaacctcaatcagatttcctcagggctcctccatagagatagagaagttaggggcacacggccctgtcagtcatctggagaatgactttcagaggcttggtcatcacccagggagagagtgagaggtgcccgtccttgccctcatccttgtccttgttctgcaggacccccttgttgggtaggttggcaaggttgtggctgtgatggcacagaaggaagaggtgccccatgccctgtcatgggggagagaaggaaaaggcactcttccaatgaccctcttgtttgcaatgaggacagggtcccgggggcagcttataacccagaggtttgggatattctatactctagtgtcctggattcttgaaataatgacaggcccctgttctgttagtgttatagggacaagccttggggttaatagcaaatgaaaagaatgtgccaatgctgtcgccatgtcagtagcttgaccacaccatttttcctcctccaactgagcctttcttatttttaatgtttcctcctggttactgaaaaccttaaaggctgcatttagtaaagtaggaaagggagtttgtgggccttgctctaattttggagtttttgtctgatgtcttagggaaggctgacataaaacgtgtggccagaaaggattggccctcaggggttccggggtctaaattggtatatttatgcatggcctacaccagtctagcttggaaaagggcagcggttctcagatggctcctgagtgatttctcgtaatttagaaaaattaacggggtttattagagctttttcattccttccaacaagtaagttataatctcatctgcccctgcctctgtctgggccacattggcagcctggtattgccagtgggttctgttttggagacagatttttcccggctctattatcattaggattatgagcatgagctttatgtgccccagcttgagctaaagaccataggcttgatttttcttcatgggaacaagtagttaatacacgaatgtgtcttcccaggtcaaatcaaaggcaagaattaaagctcgaaattcttgaatgaacttagtgggatcctggctaaatgaacccagtgtggattcragaaagatcagacattggaaaagggacatgaacttgaattgttcccaaatctccatttgccaccttgtggagaggtaaaacccttgtgggatcttctgaggactctttgctagtggcatatgtgactcctgtgtgagtatgtgagggggatagagtatctgggtatgggggcgggagattgattgggggatggagcagactgaaagggggcaggtgaagtgggagcaggctgcagagagtgtgatgggcaaaaggaagggtcatctaagacatcagaatcagggagggaggaagttccttagaagcatatgtgacaatttttgtgtaattttgggttttgggataaagccaaaaagacttgaacacatgggacctctgcatcctttctgaggttccagcaaaaygagtctagctgtaaaataatattccaatccagggtcccattcagaggccaatataaattattggggagcatatattgaaccccagatatattacaaaagaaaaccatatgcttctttttaaaagtttgtgggtcaaaatgagaccagttttgaagaatgccatccaagggcgagtcagatggaattgaagaatgaaatggacccatgttgggttcagatcaggtactacaagatccccgaggtgtccctgagggacttggacctcacctcttcggctcactctattcgggggcgtctaccacaaatggagggcctgcccttgcctggacgaccactccaggtgtgcccgtgtttgagcggtcagctcagacctaaggtgaaggagaactcacccataacttgggatgcggttcccacttgaagtggaatccaaatgtgggtccgcaaccagtggaatgtgtctgcgcagagtggggatcactgctgctcatttccaaggcatggtttacagggcatcaagtgaaagtggacttgccaccccaaagggcaatagtaaattccctcttttgtcttggccttcgggtaacaccaggtagtgcccttggccagaaaccttcaattgccaaagagtactcaagctggttccctggcagttcaaaaacggaaaagaaccctggctaattcctcacccctaagggcagtgatggaaagatatctcttctctagggcttcaggatcccactgaagagtggtcttggacagagccctcagtttccgagtaaagaaccagaccatcaagggaagcagggagggaaaagaagggagaaatcccagtaaagtcctgtacgcacaaccgaggtgcctggcgaggtgtyggagccccagcctcgggaaggggccgactcgagggctggtaagaacttaccaatgacagtatgggtttggaagaggaaagttttattaggaagaaagaacgctgcagagaagtgcagtgggtgcctctgccggaggactcggcaccaccagggattttccttaggagcatttctggaccccacggcgggagctgaagggtgatttgcacaacaaatgctacatttgtagacattctggtgccttagtgatggcagggggtgcacattgattttcatcagccacgcattctggagatgtctagaaattctagttacttataaatgttaggttgaaaggaggcctggaaccaggtgccaactttagatgatggggaagtttaattacttccaaattcctcaaatatggagctttgccatggatggcctgcctgatggtcaccagrtggtcttagctgtcctcagccagctcacggggccttcccagctctgcctcctgcccacccccaagcacactcccctctgctccagtcaaacccatgcgcctgtgccttggcatatgctgscctctctgccagcagtgcttgctcctgtctttactcagctccccctcactccccagggagtcatcccaattgtccaatgtcctcagctgccaccaggccactcaccccatctgttgcatcatctgttgactgcctgtcctccctggggcgggaccccctttaygcagctctgtgtgcctggcatggcatgtgcgagggcatagaagatctggacacagagttggctgactggtcccggagggtgggtgggcagcccttggaaagccaaggaggtgtgtgtgctttgttccagaatggaaggtgttgtttgctcatcctttgtcaaggtaaccaggagaagctgttgcaaccaccaagggagggtgtttcctcaggccgagagcttattgggagcttcggagctacgaaccacagcaagctgcagggcaggcaactgacctttgtcacccaggagtccaggggataagggccacctggccacgtggccaggccgttccagccaaggccagcagcagcagyrccctgggagtggcctctcgcagctgtgaaacgggagctgagggcaccacctgctcagctcagcygcctttctgggccctggggtgggcctgggctggcaggatggggcgtgaagtccgggtcaggacccgggactggcctgccttgccctcctgggcaggactgacctggggttgtcttagttccccagatgaagtcaccagcggaaccagccggcctgctacctgacacacaaggccaggaactgagtatcttttaaaagtttaacttgttttgttataactgatataaaataatgcaaacaatttctttgggtctggtgcctgtctcactaaggcaggcgagcctgtcgcccttaggtgctgtagggagatgctgtgcggtctgccagtcacacgtccccaccatgcaccattttaattgaaccccggctaaaccagcctattgggacatccaggctgcaggtggccatcagggcatttgtccttcaacaggcagcagctgggtcccaaaaaggggaggattggtgtaaaacccactgccttaactggagggcgggacccctgggccgtggggcctgtgcatgtgtaatgcagtggtgccttgagggtgtccggcacaagttgccccctccaggtcacggcctgaatggcaggagttggttctggcaggtgagggtcctgcagaacggatgccacccagtggctcctgatgataagccgtgtcctggggtacctgttctggtgctgtgtcctggggtacctgtttgggtgctgtacccaggtctggtgtgccacgagggctgccacccatgcctatgctgtgaccccatccctggaacaacccctcccatgctgagcctgctgctgcatccctgctcggcacaggtacctatgcccaggactgggygtaaaaccaagtcctgtgtggacagcctgcccgtgcaaagccaggagtccagccaggtggaggcagggctgtccctggacctcttatctgtgaagtggaggcaagttctcccctggggtgacagggcagaggtcaggggccacaggtcatcacagtaacgagggttgtggtggaaaattccggctccgcctctcccacctgggccaaggccgccctgacgcactctcccctccccatgcgaccccggccagcccgagggtcctccccgacaggagtggggggtatgtggagcacctccctgggagtcggcacagcctcctaaatgctggaggactcaggagccacgacatcagggatttccaggcagcctccagggctcctttccccaggcgcctctggctgtggcaagttcttggcattggtgggtggggtgggggcaagaggtgggtatagaatccagcactgccttcctggcgttcactctgggttcctagaggagaggaagccttggcccctgaagaccttcccaagcccatgccacagagatgtgagcagagaccccgtgtggggttggacaggacaggcctggccccctttctggaggtggctgcagggggcaggacaggtagggccacctcaactgtgtggccctggcagctgcttgtcccactgggaccccacgtcctcatctgcacagcagggacacgcactggggcagcgaggcccacggtgacttgtggggagagggcaacagtgacttgtggggagagggcaacagtgacttgtggggagagggcgactgtgacctgtggggagagggcagctgcccattgccgcagtttctgggctttgctcctgggcccccgacctgtcccccaccaaactggagggccccagcaccccaattccaggacagcccatcaccctcttctcccaagtgactgtagaatctgaaccggaaagtagaacagatgatgaagaagatgcccgggcaggtgtggcctcagactctgctggggctggccccatctgccrcccctgccctgccttcatgaggccagcattctggatactggggagttctgctggggaaacagcaccctccacacatctcagyggtgatcagtgggtgcggggtgcattgcagctcccagaatatgtgtgtcctagaactaacctctgtgaaactgaccttgtactagggtctttgccaaygtgatcaggttaagggcatactggatgagggtgggccctagcccagatgaggtaggaggccagcaggagtcatactccggactggactgaagacaggccaaaagcagcaagcagcatggaggacatcctctggccaccctcactgcccatcagccaaaacaccccccaccaacaccaggacagtttacaatggcacggcaatgcacggaagtcatggcccatttccgtggcaacaactggaagttaccgcccattttctagcaatttctgaataacctgccccttcatttgcatgtcactaaaagtgggtataaatatggctgccaatcacccccacatgtggctcactgcttatgggtaagcctgcagcactgccactgcctccccgaagctgcttccttccactacctgctggctcttgaattctttcctgagcaaagcaaagaatctcccctgcatcatagtgactggtgttccacagaggctggcatggatgccattgaggagaagggggtctgagcgagctgggttctcctttgtgcatagcccgcacccactcacgagcctctccacctggaattctgccctgtggaggggggatgtccacgcccaccctggcctgcatctcagggattttatgagcatcattgggcataacgtgccacagtgaaacctgcccaattgtcccatagaacggatgtcgatggtttcttttgaataaacacagaaattggccctcccagtcttaaaacttgagaaagctacatctgtcttatctgagttcctttctcaggaaattggccctcagtcctcccagatagtctgaaggaatggagactcaccagatcgtggcatctagacaaagggatgccagacccttccccygtcatggctgcctgtccggccacctgcttcctcctgaccaactcctcttcctcactctccctagttcctgttttcctgcatatagttacatttctgctctgtaaacctctaattttagttgatcagggcgatggatttgagatgcatctcccaccttcttggctgcagctccccattaaagccttcttattggctttctgtgtggcaagcagcaggactgataccagactcctggtgtttyggtaacaagaggacacttgggaaactacagccacgaatcagctcagccccagtgctgatgagaagctggtggccttgcccttctcaaggattttctcaggaaaatcaatctgatgcctacttgagatgcactttttaaattgattttttttacaataaaagtattgtgtgctcattgtaaacacttttaaaacatcaaaatacattgtttwaaaaattaaatgcctttataccctctatttagatgagcccacttttatttttttttgagatggagtctggctctgttgcccaggctggagtgcagtggtccgatcttggttcactgcaacctccgcctcccaggttccagctattctcctgcctcagcctcccaggtagctgggactacagatgtgcaccaccatgcctggctaattttgtatttttagtagaaatggggtttcatcatgttggccaggcttgtctcgaactcctgacctcgtgatccacctgcctaggcctcccaatgtgccggggttacaggcgtgagccaccactaccagccaaagcccacttttacaacggtgggggtgtgtgtcactttctcatgttyattttgccacgtttttgtccgtataactgaaatcattcaatatacactgatatttgaatggagtaaacaccagaacaatcttgggccccagtggaaggtaamagaaaggacagactggtgctgtgcactgtgtgatctaccatcccacagaacttttgaaagaaacaactgaagtcatctgacagcacttaaagaggcagcgtcgctacccgtatgcatcggagtgacttggccacagcttaaattgaacgttttaccaaggcatttccagggtgaatctcctttctttggatctgctggatgccaggaaagcggtttatcactctcgtgtagggaagggtgacaagcaggccagggtgctccctcggcactggatctcgggggtcctcaccaccctggcagatcagagaggccactgcacctaagctgtctgtgcagacaagcggctccgctgggcacctgctttcctcccagggatctgggatctgcaggcatgccgggcagagggtgcagcatgaccagccccagaacagccctggcactgaggctctgaggcactgaagggcttccatggttgggacatgtcacacgcgtcaccaaaacgtggtgctggggaatggcatgcgtcccgcgggctgcagctggagaggacgctagaagctcgcgctggtttcctccatgctctgccccgtgccctgccctgtgctgactgtgtgtgtgtcctttccttgtaaaaaaatcaaagatcagcaagccctcctggagaactgtcagcctggagccctggcaaacctgcacagccacctgtttccacctcaggcagtggtgtggtttccctccacacggttgattcttggttagagccacagctactgtcctcaatgctgacaaccttgttttcccatcctgggcaagttctgaggttttgattcattaattcatgtttttgtttattcaccatcatttattgataatcttctctggattaatcataagagaataaatgatcatgaataaaacagtgagaaaatgcacaggctcactgctccaatgtgctggcccagaagtggggacctgggcaaccgcatggtaagacctcagaggagaggcggccgcggcagggagtgagcaggagggaaaggaagactttctggcggaagccacatctgagccaagatctgcctggggagaatggttaatctgggcatgaagatggggcccagagcagcaaggcctgctggacagcacccgcaagacccccggtaggaggggagggtgcagccaggatcagaggaaggacagtgtggccagggggaggttgcagggtggccaaagggtgtgtggggccacaggaaggatttgggtttatgctgagagccccgcggaatcatgggaggatggactctacctacagcaatggcagatcacagcagagagcctggagggtctgctcgggaaggcagtgccagctggggctgggaggtgttttgaactaaattgtgccatccaaaatgtatgtgttgaagtccttgcctccagtccctcaggatgtgaccatatttggagataaggtctttaaagagctaattaaggttaaataaggctgttaggatggaccctaatccaaccccactgtgtcttaataagtagaggggattaggacacagacatggggggcagccatgtggaaacacagggagaagacggccatctacaagcccaggagaaaggcttcttttgcttaaccccttcacaactcttcccctggttccccagcgtgtgtgctctaaatagtccaatctccaccgctcccgaagtgggtggccctgccactcccaggcgaggtcaggattacagggaacagcaggcagaacgtgcggggcctgcgggtgtgcgaaacactcagcacacaaagctgttctcagcatgagagttaagagctctgggcagcgcccggagtgcgggcatctttttgacctgagcatcctccctgtggggtcctggccaacgtctgagcccctgggagaccccaygaggctctgcccagatcagtggccycaacgcggcagctcaggcttgacttacatatcagcaggaagcccaggggacggagctcccggtggagccaggaccagctcaggggggacgggtctggggtcagaggtcaccaccctgcccaaggagctgccagccagggactgcagagagaaagcatagggacaatgtgctggtctctgaggaaacagtgacacctagcggccgactgtggccccaccacagggcacacaggattcttgttcttcctgatggtgcaagtgacagctggcatgtccatgtggggcaggaggacctgcagaaaggcccaaagaggacctgtgcctcccgcgccgtccctgcctggagcaagctcggccygcggtatgtaggcacagactccgcagcccgcctgggcctgcagctcagggaagcggctggacaccgacctgccttgggaatcctgacgggtgtgcttggcctgggtgacgtgacagtggccacctgcagcacagtccatggggctgaggatggtgagagacagtgacaggtgacctggctctcggggagggacccagccagcgggccagggctggtggaggcttcctgatttgaaggaaactcaggggacagcgaggggaagggtaccgagtcacggagggaccccacgggtccctggccttcgaggcttctggggtgggagcagcctgcacatggggtggatgcagtgggggacggcagcaatgggggacggcagcagggggcccggagttcagacgtgaccagaggatggtcaggaggcagttggtcaggtttaagcagggagggacttgtttgtggatttgtttttccacttgaatgactcagagggtacccaggtggctctgacgggggttccagtggaaatgcctgtggggttcatgtgcctcttgccttctgtagcccagccatcctgtcttcatctccccgtccagccttggtgctcccagtgccctctgacccccatctgccaccattcgtcatcaacaagcagtgggtggggctttctcacgcagggctctggcccctagaccagcctgactaccctccctggctgggcctgccctgggcagcgcccaccgcccttcactgccctggctgggcctgccctgggcagcgcccaccgcccttcactgccctggctgggcctgccctgggcagcgcccaccgcccttcactgccctggctgggcctgccctgggcagcgcccaccgcccttcactgctcctgcccctgcactgtctcttccccgtggtgagtgagctgctatgaaggcccctagattggtccttctggccgtccttaggggcttccacagcccggttcctgatggcacttggcgtagccatgggccctgaacttcggggctgcttctcggccttctcgacaagctcagtgcctggctctgccctcaacctgcagtgtgtccttgggcaaaccccatccctggcccagcctccacttcttctcaggacagctctgtaaggtctgtggggtgagccctcttgttcctccctcagcttagccctggggtaatggggagaatcttctatggggaaggaagccaaacctccttgtgagggaggagggagcctcccactgaagcacacgtcacagctgtcccattttaaaatatcttctaagtaatgaggacgttctccaatggcacagacatgaggacagtgaaactgttggcgccagcaccggcctcaacagccggcagcgtcctgcygtccagcttcttttctcaggaccccctctgtattacttgtttaattttgctgaagatttaaagcaaaccccgacagtgtgttcttccacccagatcttccagtgcacacctaaaaagatggacctttttcacacagcctcaatgccattgtcacacttaaaaaagccaataacaattccttyctatcacctgggagcctggccatagacatgtttgcccagtcatctaaaagacatctttttaaagaattgagatgtaaacaagtcccagtatcacatgctgtggggcccaggactcaagctttagtgtcagcggtgctcctcaccctctgatgtgacttggttgtgtccccgcccaaatcccatctggaattgtaatccccttaatccccgttttatatatatagggagagacctggtgggaggtgattggatcatgagggcagtttccccatgctgttctcatgatagtgagtgagttctcacgagatctgatggttttataaggggctcgtccccctttgttcctcactcttctgtctcctgccgcctagtgaagaaggacgagtttacttctccttctgccgtgattgtaagtttcctgaggcctccccacatgcagaactgtgagtcaattaaacctctttcctttgtaaattatccagtcttgggtattccttaagagcaggtgagaatgactaatacaccctttaaacttcaatagtgctctcagcctctaatgtacagcggtgctctccaccctctaacacaacagtgctccccaccctctaacacaacagtgctccccaccctctaaaacacagcagtgctccccaccctctaatgtaccgtagtgctccgcatcctctaacacagcagtgctccccaccctctaatgtacagcggtgctccccaccctctaacacaacagtgctccccactctctaacacacagcagtgctccccaccctctaatgtacagaggtgctccccaccctctaacgcacagcagtgctcctcaccctctaacacacagcagtgctctccaccctctaacacaacagtgctccccaccctctaacacacagcagtgctccccaccctctaatgcacagcggagctccccaccctctaacacacagcagtgctccccaccctctaatgtacagcggtgctccccaccctgtaacacacagcagtggtctccactctctaacacaacagtgctccccaccctctaacacacagcagtgctccccaccctctaacgcacagcggtgctccccacccactaacacacagcggtgctccccaccctctaacacacatcggtgctccccaccctctaatgtacagtgatgctccccaccctctaacacaacagtgctccccactctctaacacacagcagtgctccccaccctctaatgcacagcagtgctcctcaccctctaacacacagcagtgctctccactctctaacacaacagtgctcttcaccctctaatgcacagcagtgctccccaccctctaacgcacagtggtgctccccacccactaacacacagcggtgctccccaccctctaacgcacagccctgctccccaccctctaacgcacagcggtgctccccaccctctaacgcacagcggtgctcttcaccctctaacgcacagcggtgctccccaccctctaacgtacagcggtgctccccaccctctaacgcacagcggtgctcttcaccctctaacgcacagtgatgctccccaccctctaatgtacagcggtgctcctcaccctctaacgcacaatggtgctcctcaccttctaatgtacaacggtgctcctcaccctctaatgtacaatggtgcttgtcacactctaatgcacaaccatgctcctcactctctaatgcctaatggtgcacctcaccctctaaagtacagtggtgctcctctccctctaatgcccaacggtgttccttacctcgaatgtacaactgtagtccttcttcacatggtggcaggagagagaagtgcagagtgaagggggaagagcctcttataaaaccataggatctcatgataactcactcactatcatgagaacaggataggggaaactgtccccatgattcagttacctcccactgggttcttcccatgacatctgggaattatgggaactacaattcaagatgagatttgggtggggacacagccaaaccatatcacctgttaagcttcccaaaccttatctatacaaatagcccccagaacttcggagcaccaactcccactctttggagtctgtgctcccaggtggctgtccttatgctctgtgctcaagttaactgtccatttcatcctgttttctgaatctctttatttagggttgacagggaagggattggccatggtgcctggcacacgggcagctcctggcaggaggccagctgtgccacaggtccggccagtgctctctgcagggctgtgtggctgccctgccctggctgcctggccagcccactctctcagattctctcaccagggtccagactccctgtcccaggagtttctgggcagcggagagggagagaaggaggcaggcctggaggctcaccttcccccaggatctgagcttccaccagaaaggaaaccaaaatatatcccccacaaataaacttctttgacatattttgagatggctgttcagagggcctgaaaacagaagcagccctgcaaagctttcttttgtggggaaatttgcatctgtatagaaaacctgcattgatgcagccaggcttttgctgaggccctcatttttctgtatttaggaaagataagctgagagtctgtattagcctgttctcacgctatcataaagaactgcctgagactgggtaattttttaaaggaaggaggtttaattgactcacagttatgcagggctggggaggcctcaggaaacttacaatcatggcagaaggggaagcaaagacatccttcttcacatggaggcaggaaggagaaagagtgccaagcaaatgaggaagccccttataaaaccatcacatcccatgaaaactcactcactatcatgagaaaagcatggcagaaattgcccccatgattcagttacctccacctggttctgcccttgacacatggggattattacaattcaaggtgagatttgggtggggacacagagccaaaccatatcattccaccccggcccctcccaaatctcgtatccttacatttcaaacacaatcatgccctcccaatagtcccccaaagtcttagctcatttcagcattaacacaaaagtccaagtccaaagtctcatgtgagacaaggcaattcccttctgtctatgagcttgtaaaatcaaaagcttgttagttacttcctagatacaatgagggtacaggaattgggtaaatacacccattccaaaagggagaaattgaccaaaacaaaggggctacaggccccatgcaagtctgaaatccaacagggcagtcattaaaccttaaagttccagaatgatctcctttgactccatgtttcacatccaggtcatgcttatgcaagaggtggtctcccatggccttgggcaactctgcccctgtggctttgcagggtacaacacctcccctccccccacctggctgctctcatgggctggctatggagtgtctgcagcttttccagatgtacagcgcaaggtgtcggtggatctaccattctggagtttggaagatggtggccttattctcacagctccactaggcagtgccccagtggggactctgtgtgggggctctgaccccacagtcccttctgtactgccctagtagaggttctccatgagggctctgccctacagcaaacttctgtctggacattctggaaattccatacatcctctgaaatctagggattgggagctccccaaacctcaattcttgacttctgggcacccacaagcccattagcacatggaagctgccaaggtttagggcttgcaccctctgaagcaatggcctgagctgtatgttggctccttttagccatggctggagtggctgggacgaagggcactaagttccaaggctgcacacagcaggggggccctggacccaactcaggaaaccctttttccctcctaggcctctgggcccttgatggaaggggctgctgtgaaggtctctgacatgctctggagacattttcctcattgtcttggtgattaacactcagctcttcattacttatgcaaatttctgaagctggcttgaatttctccccagaaaatgggttttcttttccattgcatcatcaggctgcaaatttttcaaacttttatgctctgcttcctcttgaacagtttgccacttagaaatttcttccaccagatacactaaatcatctctctcaagttcagctttccatagatctctagggcagggtcaaaatgcccccagtctctttgcacagcaagagtaacctctattcccattcccaacaagttccccatctccatctgagatcacctcagcctggacttcgttgtccatatcactattggcattttggtcaaagccattcaataattctccaggaagttccaaactttcccacatctttctgtcttctgaaccctccaagtctctaggaagttccaaactttcccatattttcctgtcttcttctgagccctccaaactgttccaaactctgcctgttacccagttccaaagttgtttccacatttttgggtatctttacagaagcaccccactctctgtggtaagagtttacgatattactcccttcccatgctgcattaaagaactgcctgagactgggtaatttacaaaggaaggaggtttaattgatttacagttccacagggctggggaggcctcaggaaatttacaatcatggtggaaggggaagcaaacatgtccttcttcacatgatggcaggaaggagaaggaatgccaagtgaagccccttataaaatcatcagatcttgtgagaacccactcactatcaggagaacagcattgcagaaaccactcctgtgattcaattatctgcacttggttccacccttgacatgtggtggttattaaaattcaaggtaagatttgagtggggacacagagccaaaccatatcagtctgtcacccttaaaggctaaaagcagcatttaccatttgctagctgtgaggtcccctaacctggtgagcctggcctcctcttctccccctcccaaaacctgccatgccactgggatctgtttttggccgtgcttgagcctccattctttctgtaacctgttcaaagaaaaaccaaactccataaaatatttaaagaggtttcttctgagccaatatgagtgaccatggcccggggaacagtctcaagagttcctgagaaagtgtgcccagggagtcgggtcaccgctcggttttatacattttagggagacagacgttacaggcaaagacataaatcaatacatggaaggtgtaaattgcctaaagagatgggacatctccaagttggggtgcttacaggtcacagatggattcaaagattttctgattgacaattggttgaaagagctagactttgtttaaagacttgaagtcagtagaaagaaaggcttgggttaagataagggggttgtggagagcacggttcttgttatgcagttgaagcctcccaggtcgcagtcttcagagagaatagaaggtgaatgtctgttttcagactttgaaagtgtcagaccctcatttaatctcccttagatccgggaaaggactagaaaggaaggcctggctgcattaatggagattctctacagatgcaaatttcccccacaaaagatggctttgcagggccatctcaaaatatgtcaaagaaatatagtttggagtaaaatacttttatttccttcagggtctgccatctgtcgtgtgaggttacaccagagtcaagctggaatttggtgtcttattgccacaaggagtctgctctatcactctcatgatctctactttaaggttagtgctgctcagctgtgcctaaatcccaaaacggagggagaataaggaggtatgtctgaccccacttcctgtcatggctgggaattcagcttttcaggtttcagtggagtctccttggtcaagaggggattgttagatataagttctaaatttctagtcaaagaatcaatatgtcagtatgttcaattctttgccttctactgttaaacttaacttcctcataaagcaacattttcaattacctacttcacccagactcattccgatcacctgctccccctgactcattcccatcacctgctccctctgactcattccaatcacctgctccccccgactcattctgattacctactccaccctgactcattccaatcacctgctcccccgactcattctgattacctacttcacccagactcattccgatcacctgctcccccgactcattctgattacctacttcacccagactcattccgatcacctgctcccccgactcattctgattacctacttcacccagactcattccgatcacctgctccccccgactk

SEQ ID NO: 96883 - DNA, 30455 bp, Homo sapiens
gggtcattttctgtttttaaaaagattgtttaaaaataaaatagactatgctatgaagaccttatgtggcctgcaaatccaaaaatctttattctctggacaacccccaggttggatttagcactcaggagagacttgctatttccatgtggcttcatagtaatgaacagtatgtttcctctcgaggatctgtggttctacaaccattactgagaatctgtcgtgtaccaagaagtggtggggatattcgcaccttcaggtagctcataaccaggcagaaaggtggtaatagttctcatttacatagtacctagggccaagtaccaaggatttcacaaaggaggaaactgagaaggagtagtaccttgcccaagggcacacacctacaaaatggcattaaacccagaatggcactagacccaagggtctgctctgtctctgaactctactgggtctctttatgtgacccagtgattgcagatggaagcttcagtgctgcagaggagcgggtgtgtgtagagttggggtgggagttccaatagggcaaccaaggactgaggccttcctttgccttccagtgaaagagaaattcgtggaataagtatagatgcatcttggatgaactggatagtcccttgcagtggcacgatcttggctcactgcaacctctacctcccaggtttaagcgattctcctgtctcagcctcccgagtagcggggactacaggcacacgccaccatgcccagctaatttttgtatttttagtagagatgaggtttcactatgttggccaggctggtcttgaactcctgacctcgtgatctgcctgccttggcctcccacagtgctgggattacaggcgtgagccaccgtgccctgccaaatgtgttaggtttttgtttgtttttgacacggattcttgctctgtcacccaggctggagtgtagtggcacaatctcagctcactgcaagctccgcctcccaggttcacgccattctcctgcctcagcctccctagtagctaggactacaggcgcccgccaccacacctggctaattttttttttttttttttttttttttttttagtagtgatggggtttcaccatgttagccaggatggtctcgatttcctgacctcaggatcttcccgcctcagcttcccaaagtgctgggattacaggcgtgagccaccgtgcccggcccctgatgtgttggttttaaggaaacacccttgtcttcataatacagagatagaactaggaagaaaaacaagttgtaaattgttgccttttttctcctgtgatgtgccaggctccatgccagcccctgaacatggtaatgagatgcagaatatgtctgcatagtttatgtgaatgtgaaaaaatggcttcactggatcaggaagtgagttttctggcctggtgcggtggctcatgcctgtaatcccagcactttggggggccgaggtgggcagatcgcctgaggtcaggagttcgagaccagcctggccaacatggtgaaaccctgtctctactaaaaatacaaaaattagctgggtgtcgtggcgcatgcctgtagtcccagctactcaggaggctgaggcaggagaatcgctagaaccaggaggtggaggttgcagtgagccgagatcatgccactgcactccagcctgggcaggtgcagtggcgtgatctcatggtgcagtttcaccatgttggccaggctggtctcaaactcctgacctcaagtgatctgcctgcctcgacctcccaaagtgctgggattatagtgtgaactactgtgccctggcctccctcagcagactcttgaggctggtcctgacagagccttagtctttcctttgatctcaaaatggagaagaaaccttgggattatttaatctggctcctcttgtggttatctttgagaaggcaccgtggtcctagactctttgccctcaataggacatctgctaaaagctttttaaaacttatcattagctgggtgtggtggcacacacctgtagtcccagctgttcaggaggttgaggcaggaggatcacttgagtccaggaggctcagtgaggctgcagtgagctgtgaccacacctgtgaataaccagtgcactccagcctgggtaatggagtgagaccctgtctctcagaaataaataaataaatctttgcagggagaacaggggagacgattcctttcttaaatgcatctccttgacgcccacaggcccacccactccctggccctccatagtctcctcctgggcccaaatgtgaggacagtacagcctcagccaggagcccttctgattccttgttctcagactcccattggaatacgatctggggccgttcagtcatttggagtggtttttcgtcacttgacttctcggaatgtgttatctcttatttttatctctggaaattgttggtgtccgtggtcccaggatgctggaggtggaaattccttgggtttctttcattatacttgctcgggctggcccatctggtgagtctgccagctgtgtgaacccaggtgctgtttgaagcccttccccagtaaacaagtgcgtcaagtctgagtgagacacttggcaccgtcacaccgctctccttccacatcccctcttgtacgttctccagcgacacatccccagggttggacagggcaccctcatattggcttcagggacataggagggccagtcctgaccccacgttgtgtgtgtgactttggtcacgtggcccaacctctctgagtctatcccccctcccctcctttaaggtaaagacatgaagtgcttgttgtgaagattaaataagctaataatgtcaagtaaatgttagctttgcagtaatctttcctgtccgccacgttactgcttttttcgagacccttttctggagttactcccagcaagctgttactcagacgtcctgttggttaataaagctgtccctgcagcagttctgctattgtatagactcagtcttaaaatagtgggcttgatgtgacatatttcttcataatattgtgtatgtgcagcctctgtgtaattgcattatgcacctttattgcatagttgaagcagtggcaggaaaggatgccatatgtgttactgggagattattcagtgggtattttttctcactcttccgtttcagtaccagtgaaggacaagaaacttctggaggtcaaactgggggagctgccaagctggatcttgatgcgggacttcagtcctagtggcattttcggagcgtttcaaagaggtcagagccttgtggatgtctgtaaatgaaagcaaatctctgggtcttcagatctcttttttgccatgaattaatttgggcaatgaaggccttgttgtctgaaagcagtaagttatgtagaggatgacagggagggatgctaggccttggacttctgtggttgattggccctttcaaaggctggctctgagatattacagccaagaacatgtttcctgttgcttggaatcagtatgtctgcctctgtcttagagaaatcctaagacttctttaagaggaaaatgaattggaaccgtagtgggcattagtctataatatgatgctctcctccctgccagaacttcaggacaaatatttgaaatggcctatcttggcctggtgtggtggcttatgcctgtaatcccggcacttcgggaggccaaggctggaggattgcttgagccgagtttagaccagcctaggcaatatggagagaccccatctctataaaaaaaaccacacaagaaaaattagctggctgtggtggtgcatgcctgtagtcccagctactcaggaggctataagctcacagccaaaggggagaggtggaatccaggtaggcctagttcaggagctggtatgtgcttatagttcaggctatggggatgagagaccttactggcatttgtgcttgtcatctttatcagccagtgaatgcagggcgaggggcttaaacagccagagcaggactaggtccctgaatgtcagccagactcaactgtgtgctcaacttcactcaaatgtgaagcccagcagggcagtgagcgcctcttgcgtttgcaggttactaccggtactacaacaagtacatcaatgtgaagaaggggagcatctcggggattaccatggtgctggcatgctacgtgctctttagctactccttttcctacaagcatctcagtgagtgcctctgcggcgtcttgcctttagttcccatgagagggtggtggtgactgatttcattagatacagcagcccaccttcttctgaggctgagggacctttagttaaagttccttatgtttccacctaaaagaattggagggacctatcagagtacagtatgtgggatattgtttgaaatgagaaaattgtgacaaagagaacacaggaaaatcaagatgaagccagggtaaagagagtacttagaagcattctttaaaatacagcacactgtgaaaatttggctcgattttcctagtagccaatgcagaaagagaaatgagttgagtgggataatctggtaccccagaaaagcatggctgttccggctctgaggcttgagaggagcttgtctggtgggagattggcgggaggtgtcggtggcagcctctgactaggctgtttctgacagtgtagtgtacaccccctacccccacctcactcccattctgtggcaccagggcggtcctgcctctgaaggacgggttctctggggctgtttgtctgagcgtgtgttccctctgttccttctggaaagaaagtggttggccaggtggcaggttggctcctgaggtgtctttgtgccccccgggtctgctgattctgcagagacaccggcaggcgggtcatgggtcatctctgaagggaattctcaggaaggctttgtgtgatctcagcctgcttcctgccatgctgtgccttcactgtaaccttttaagatacttaccatcttgccttcctgacttcagagcacgagcggctccgcaaataccactgaagaggacacactctgcacccccccaccccacgaccttggcccgagcccctccgtgaggaacacaatctcaatcgttgctgaatcctttcatatcctaataggaattaacctccaaataaaacatgactggtacgtgtgctgattgcctgcctgtctgccgtagccattatcccatgttccaggggctcctgtggcacaaggtggggggaggtcgtctttccaggccgttgaccggtgaaggcctttgtggacttcccagaccaccactctggtcgtgtcccagctccctggagggcagggtgtcatccagaccttcccgaagcagcagtgccgaagtccgtcccttgccatgagtgctgtgggcaggtgcatttgcagacattctggcctttagttggctggccctttatggtgtaacacaaaggcttgcgtacctgagagcgccagatcccaccccggctgtcctgtggctccaggcagggatggcccgcatcctgtgtttctgcatcaccctggggcatcaagggctacagggtgaggtgacccggcactgtctggagagacctcaggcagcactcacgcccaggctgcagggattgtggccctccggctgaggcggcttctctaacaggaggcttagtgggttgggggtgatggggaaaagtgaggggctatggcggcccctccctgcttcctcttcatcagagcctcattgggggtgggatactgtgccccagaaataggtgccaccagacatctgagctgaggtggaggacctgcctgctggctccacagatcagactcccagacttgaccagctgcttgcaggccttctgggcagctgcacttccctttgtgaggctgacatttgttgaaagggacaagaaagctacgccgtgattgcagccagtgtaaaagggttggcatgagacccttaattaatgagacatggcttaaaaaacaagctttaatccatttcataaaaattgttcttgcaattgaacacagccaggcccacatgcccagcakgttgcaggagacagtttcacattttccaggctcaggacagggcagtctcctccacatgccacaggtgtctgagtgacagtgtagacgcctgatgggcaggaggtaggcacagatgatctgaaggggtcatctatttaaaagtctgcaactccagttcaacggacaccttaaacactgtcaggcacgtaccccaagagaaaattaagcccagagaagaaaacctcaggcttgagagccctgtacccctcctcaaccgctgccacctgggaccagggccagcctgaggcaatgkgggcacctgaatttgccccaaagggctccctcattcaaatcacagatataggcacagctttaggattcagcagggcagggagggaggaagcaggcgtgagctggccacagctttgaatgacctaccagcccctggcgtcaccaagaactggtgtttaatgaggggaatgaccaccgccacacagaactacctagccaagcccctccccagcagctgcctccctccctggatgaggggagttgtgccgggagtcccagaaaggaggcatcgatgcccagccaaacatgatgtcgactgcagggacccacaggacacatgtccctttttcaaaaaatactamggcaaaatgataggaaactaacagacgtggcccctcagagtgatgaaacccacgtgtctgcgggccagctcgagccacagtcgcgccaacaagcgcatgaaacagttaaatgcacactcccaacagcggggcccccgggctgctcggagctggctccagctgctgtcactgtccactgagaaaggccaagtgccctttggtgcatctgttggcgtagtgtcctttctcgccacactgggaacagcaggaagtgggggaagaggagagacagacaacaacactgttcaaatgcagttttcaactaagggagtgcccaccaaatcccaaatcatccaccaagtccccagtcgggacatgactctgaaattctcagtggtacagagtttctttcaaattagagggtgagggagctcaggatggaaagtgcagtggtgcagaaactagccagcaactccgcagatgcaagggagaayaaggccgccagaaggcgacctgctagcgacctgctctttcaggcccacaactctcccacctggacacatggcctgcccagggagggactcccaagtgggtagcaggacaaagagaagcccgtggcacctgagctccgccaccccgtctggggaccaagcccttctgcaccacaggccagtcacttacctctgagccaaggtctggggttccctggcaggagatgggagggaacagcatcagaagtgtcccagcctcccctcccttggggagccactgctggggacagagggtgggctgtacccaacgttttccctcgtggctgtgacacacctaagctaccttggggacaggttttgattacaggatcagagagatgggacgatgcttagacttgggtaaggggagcctgcagagccacatgacaaatccagccctgaycctgcctcatcccagtcctgattatccaggcccttccatagcttctctttactctatgactcstaaaacggcagcctcaagcactgaacaaaagggtcaggaggcagctgggggcactgactctgtactgacacccacccctgagtccctgctgccctgaggggctctgcccagttggcacccaacactcttgccagctctattccctggctctgcaattcctgttttctttcttctatgttggccaggatggtctcgaactcctgaccttgtgacctgctcccctcggcctcccaaagtgctgggattacaggcgtgagccaccgcacccagctgtccctgtgttttcaactttgtctgatctgcaggtgtgactctgtatggagaggctgccgatgggctgtagggctaacatgatggctgggggagggaccacacaccctgctcacggcatctggcatgtctgtcggaccccacagctgactctggggaatccaggacttacatgaagtgtctctgacattaatggggtgacaggctgtggacaggggcggtcagccctacctttctaaggctccaggacttaagggcgcttgctgcacagaagtggccccgcttaacaggcctggagggtggcaagataacagctaagtctgctctacacagtgccccacttccatgctcttttatttttttggagacaaagagtctcagtctgttgcccaggctggagtgcagtggtgcagtcatagctcactgcaggcttgacctcctgggcccaagcaatcctcccatctaagcctccccagtagctgggactacaggcgtgcaccaccacacccagcctgttttgtgatttttaatctggactcattcttcagaactccagctgtaggaattgtgtgcgccttgggttgagaacatactcttcaaagagtactgggggttrctcctgccacgtgccagggacacaccaatcctggggcgattttagattagaaaacttagtttgtaactttccagccttaaccaaggacatgaatacaggcctagactcacataagggcccattaataacgtcaaactatcaagagattttcctcccctttccccgcttcccacagagccaggagtgaacaggacagttttcgaggaggtttcttgaagctcacccttcctgagtcccattttatgtactgggggaggggatggggacaggggtgctgtaacccagtgtcctgttttctcgggtgtgccctgcaggatccaaggatgcccccaggacagccagcggctccaagggctcacccttccctggatcagtgtttctattttgttcccggcctcttgggggcttccctcacctgcctgcaggccccgtccattcactaggcaggcgttctcaccatcctttaccgtgcctcagtgcagtgtggtaggaaataggacagtctctagcccaccacagtggatggtaactagactgtaactttatgcttacaatcagcaaaaatgaatgtkttcatttttctcatttcaccaaacacatggggcatgagggaatggccactgacggtaagggaagaccccaccctgtcccccagcccagggactcaccttgtaacaggtgacctgctccagtggccggggtccccggttgcccgcgctgctgttttgactctgcatgaccccgatgacctgcggggttctctgctgattgggagaagagttctgactcgttaactggatcaaggaggacgacctttgtaatggcggattgttactttgctggaaagagttacacaacacggttttactgtggaaaacacgtgcacgcagactaccgatggggacaggaaaaaagagggcgggactcgtcccgcaaacggcaggaagcagggcttccacgacggcccacctcaggacagtgggcagcagagaaacatgtggtgatgatggcagaagccactgcccgaaaaacaccatgcagacacacaaaaacgaaaaataaaatagaaaacaaaacatcaaagagacaagaggaggtctctggggcagtggggcgagggcatgatcaggccttactttggtttctgaggttctggcttcaggtcaggatgaacgcttggttcagccagatgtttagcagcctacacggcgagcaagtcacagaaaaacagttggagcctgacacactgagctgcgttctcgggctgagaggaccctcctctagggagccccaccaggaggagggccagggctcctggggtagggattccacagcagggcctcctccccaccaggtgggctcctggctctggcccgtaagtgcagaacccgagctagaaaacccccaggttggcacggctgcacctacacctggaattcccggctttccccatcaagagttcaatgtgattggcgcctccacgcagctacatcctccgcatcctctcctggctgttcagcctctagcactgagcggggctggtggggctttggcagccagtccagagcccagcagggtaggaggtgaggcattgggctcaggaggtggttgggcttgatgggcctgttgggaaccctgcctgatgcccgccctgccttgacgccagcccttcctcttggctcaactcccgactcccataaccaaactcagggtgcccttggcattgagaggctgctgcagatccccatgtgtctacagcatttccccctctccttgtgcttgaggggacggaccagctgcttggctgtggggcccctcatctagaaaactggagccagccgggcctgttctcgcgcctcctcccaacctccactccacaggagcaggggcggtgctggccagagtggtcagttctgctgccacacctgctcctgcccagtggtgtcacctcaggcaggtccctccctctggtagtctcggtttccctatttgcaaaataaagggtctgacccaggagcaagagcagcagacacggtgcccaggccgccctccatgccagccccaggggcagacgctgctgaaccaggttagccccatctcacaacgggtggccagttgcacggcgcctggactgtgtctgctgctgcgcttggccttgctgaggttctagggcaagaggccctccgtctctcgagggagatatacacggctttgctcctgacttttcttcgggaacttgggagactcccctcctctcccaagttgtccagcggggtctaaggcagaccacacccctgggggacactgaggttctcgctgtagaaaaggcacttccttcctaccgaggaaggccaggcacggtacctttgctggaggctgtgtctgctgyggcagtgggggctgctcggtggttcccatgggcagttcaaatcgagggctggtcaccagcagccagaggggatgagaacaagagaaggagtggggtcaggggatgagaagagaagccaggccatgctcttaaattccagccctaggaaaatcacactcagctrccccagcacaaagtgactgacacaagctgcatggatggggtggtggctggcactcagctctgctcctgggaggccacaggagtggcggggagaacagaactgacttgcctgggctcagacccaaccctgcctacaccgagctgggagactcatggccagtgcttctcggaaatgacaaaggctgtgctggtgcgtgcctgctgcgccacaggagctgtacacagggaagcccccctccccgcagggtcttactctggcgtcagcccctcctcccatcacttggtgacggtctgcccctgagccacctgcaggtgcctgcactctcattcagggagtgagacccagtgacagcaccggccacttccctgcagtgagaagcagggaccagggttcccacagacctggagactgttatcctgctgtaggttcagcagtgtgggcgaggcagccgggaggaagggaggcttgtctgyggccccagtgccaycccaggcagaagcccaggtccacaaccaaagtgacagatgggcactgggctccaaggacaagaaaatggagccacaagaggggtgctaaccccacagagcaagaattaaaacccgtcttcggaggctcacagacttgctatttatttattttatttatttagagatggagtcttgctctgtcacccaggctggagtgcagtggcacgatgttggctcactgcaacttccacctcctgggttcaagtgattcttttgcctcagcctcccaagtagctgggactacaggcacgcgccgctacacctggctaatttttgtatttttagtagagacggggtttcaccatattggccaggctagtctcgaactcctgacctcgtgatccgccttcctctgcctcccaaagttatgggattacaggcgtgagccaccacacccagcccagacttgcctttgaccaggtgccaccacctgctaccatgtgcccttggccagggactgagccctgtgcctcagtgtgctgctgtgtgaaatgggtgcgttctctcctaccctcactgttagacgactacttattctatgtgaaaccccaagctcagggtttcctgagcctccacatgggaggctctgaaattctttcctttagggcacaggttcttaactggaagtccccaaattccctaaatgatatgcaaggctacatgtttgtctgtatcccacagcttccattacattaccagatggcccatgacccaagaaagatcagctcctggtctaggcagagccacctgcgggctcaggaagcattggtggccataagcagggattacttccccatctcctgcccccacccttggccctggtactgacatcacccagtgaccaaggcccagttggcccagggaagatacggagggcagcagggcctgggccgggagctggggtagagggcggagcrgctggctactcactgcatgaatttacaygagggcccctccgggcagaatcccacgaggtaattcacacagatgactctccgtgtgtgccggtgcctgcagaggggacctgcagagccaagtgtccggtyacttagatgtcccctctaccagttagagagctggagcatggtttcaaatgctggctgtcccccattcatgggagacggggcagggacctcacctcccaacactggcctccttatcaaaaaagcgggtggaccaccacccacccagcattcttgggagagkcaagggagatraggagtgtgagaaagccgctagctgcagaatgtcaggttttgctgggacaggtagaccagctggcagcctccagggtcgtgggcagagaagggaggactggcttcttgcccggggcccagcccaccctggcacctaccgtgcttgcagaagccrcggtcataccaaggacagtccttgatcttggactcggggtcgatgtgcaggaagggacattccttgttgctgcactcccctgcagggaaactcagacgtgagaccactgggaaggccggggccaggcccaccttggcttcatccaaggaaaagaggttctggtgtccagttttggcctgacgagccctgagagccagggaagagtgtttctgagccccagcttcctgtgcagcggagctgtgatggaaatgcacccattgagaccaggaagttccattctgattggctcttcacatctaagagctgggacaagggtaggggaagcacttgtggacctggccctctccaaagcagcggaccccagggaccaccagcaccaagaaccgccttcctgagtagttgcccgcttccaggctcaccttctccaatccatgtttacaactgtgctcaaaatccagaggaaatgcaaactccttccccaggcccctccgcaggctcagcctctgccaccccccagccacatgggtccccctgtaccaggaccagccccttcttagtcttccgcttccagctcaggaatcccctcatccttgaccactcagcctagagaaggttctggtcacggtttccttccttcaaagcacttgtcacaagcaatttcttctctgttcgtctcatggcctatcagctacctctttccctggaccacaagagtgaaggcttcacagggcaaggacctcttcaccattgtccctccagtgcctggaaagggggccctcaacccaatgtctgtggtgcaggtgacagaagctgcagacagtgcgtcctgcaccagggctgtcagcaaggaaggagcgaccctcaggccacttgtatagcggtgccttaagagcctgcccaggagagccagctgctgcctctggggacagatgggaggccactgccccatcccagtgctgccccagtgctgctatgggcaaggcatcggggggaacatgctacattgcacaatgacagggacagcacttggggagctgggaagcttgggtcctatttcttctcagcttatgccacctccacaaaacaagccacagctctcattgataagccagcaggccacgcctgatgggatgctgaaataattaatgtctcctccaacagcagtgctttgaaagcatgaagcataccctgcactccctggctccctgcaggattccagcctcctgccgggctccctgcacaggaccagagccagcctcacgctgacccacagagctgcttcccgggaaacctggaagtgcagacctgagcggggaccctggggactccttccagcagggagcacatctctgccagactccgtgccagccccactgactccacccgggctcccgcttctccacgcaggccactcaggacagctgaggccacgcattctctaagcagggctcaaggcaagtttgttgctaccagaagacacatctgaggctgttattttgaagggctatttaggatggctgagatgtcaccaggatcatggctcctggagagaaggaaccagctcgggcctgagaggcaatgcccacgctggagggagaagtgggtttcagggagaaggtggacgtggacagaaaccaaccacggacataatgcagccagctgcacaactcgctgcttccgggtcaccctcgttagcctcaaatccgagtgattgaaagagctccaaacactgaagcactccaaagtgatgcgcggggccaggcgtggtggctcacgcctgtaatcccagcactttgggaggctgaggcaggcagatcactcgagcccaggagttcaagaccagtatgtgaaacatagcgagaccctatgtctttaaaaaaaaaaaaaaaaaaaaagagatgagcagaaaatagccacactgtcccctaaaagctggctgaggctggcaggttctgccagagttctcctctgagaatagaaagatgggaaaagcaggcagagacagtgtgggcactgagcagccagcggacccctctgcaccctggttctcagcagagcctccagggctccaggcgccttaccgaacttggagtagaagtagcactcgggcatcttggtcatgtcatactcatgcaggaactcacactggtcccctttcttgcataggccacgcagccagtgtttgcacacaactgtcttctcaccactgatgtggcgaaacggacacatgccccctgccggcaagatagggacagggtgtcagcagagaggccaccctgagcctgggggacacggcctgaagaagctgaggtaccttcacttcctaactcctggagccacctgaaggcatcacgtcctggaaaggggcagaggtccccctcacagaaggcaacatgatttgaggtactacactgacagacattttacattttaatagttactcatggccgggcgcagtggatcacgctggtaatcccagcactttggaaggccgaggtgggcggatcacaaggtcaggagatcgagaccatcctggctggcacggagaccatcctggctgtcacggtgaaatcctgtctcttctaaaaatacaaaaaattagccgcgcatggtggctggcgcctatagtcccagctactcgggaggctgaggcaggacaacagcgtgaacccgggaggcggagcttgcagtgagcagagatcgcgccactgcacaccagcctgggcaacagagcaagacaccttttcaaaaaaaaaaaaaaaaaagttactcatgatctcacagatattactgtaagatggaggaattaaaaggggggaggtgctgggaggctgaggtgggtagatcacgaggtcaggagttcgagaccagcctggctgacatggtgaaaccccatctctactaaaagtacaaaaaaaattagcccggcttgcgggtgggtgcctgtaatcccagctacttgggaggctgaggctggagaatcgcttgaacccaggaggcggaggttgcagtgaccggagatcacgccattgcactccagcctggatgacaagaacaaaactctgtctcaaaaaaaaaaaaaagaaaaaaaaaaagaaaggaacttggccgggtgtaggagctcaaatctatgatcctagcactttggaaggccaagacaggagaatcacttgagccaagaagttcgagatcagcctgagatcttgtcttcactacataaataaataagtaagtaagtaagtaadccagccaagcaagcttggggaccaggcacagtggctcacacctgcaatcgcagtagtttgggaggccaaggcaggtgcatcacctgaggtcaggagttcgagaccagcctggccaacataatgaaaccctgtctctactaaaaatacaaaaaattagctgggcgtggtggtgtgcacctgtaatcccagctactcaggaggctgaggcaggagaattgcttgaacccaggaggcagaagttgcagtgaaccaagatgacaccactgcactccagcctgggcaacaagagcaaaactccgtcaaaaaaaaaaaaaaaaaaaaaaaaaaaaaaaaaaaaagctgggtatggtggtgtacacctgtagtcctggctactgaggaggctgaggtgggaggatcacttgggcccaggaggtcaagcttgcagtcagctatgactgtgccactgcactccagcctgggtgacagagtaagatgctgcctcttttttaaaaaaaaaaaaaaaggaaagaccaatttcagaattgaggaaatgtgatgtatacacatggagggacgtgtcccttctgggacaggacctgatgggacagagccagcctctggggatgtgtgagacttctaacgggtggcctggcaagaccaccatggaggtccgaccagaatgaggccgctgtacacttctgctgtccaatatggcagctgctagccccatgtgactactgagcacttgaaatatgactagtgtgtctgagaattttgttttaaatgtgatttgattttacttaaatttgaactgccacatgtgactagtggctactgtattagtcaacagagagacagaatgccctgtgttagggatggctgtgctaacagaaggtggctggtcagaagggcagaattactgagcaaagacatgggaatgagaccagaaactcagtggaggtaatgacgttctgactggacagtgtgaaggtggcctggctgatctgccagaaagtctcctacctcagtggtaaatgactacgttatagaagcaaaactcaccaaaaccattcattaaaaccagccctttgctctgattctctgctctctttttcaagcttctgattaatatttaagtctcctaaataaattttcctacagggagaaaaatgcccagaccatggaaagtttaggttgtacctagtgatacttctttctttcttttttttttgttttgttttgttaagacagagtctcactctgttacctaggctggagtgcagtggtgcgatcttggctcactacaacctctgcctaacaggttcaagtgattctcctgcctcagcctccccagtagctgggattacagacgggcgtcaccatgcccagctaatttttgaatttttagtagagacgatgtttcaccatgttggccaggctggtctcaaactcctgacctcaggtgatccatccacctcggcctcccaaagtgctgggattacaggcgtaagccaccacgcctgacccctagtgatacttctgatggattagcccggcccacatacaattattaaaagagcacagccagaggggtaacaagatggcgaccaagacagtggagctccataagctgaagcttgctgaactaaagtaagaatgaatgtcttgctcgtggtttggagaygagcaaataaagcaagattttttttttttttgagatagagtcttgctctgttgccaggctggagtgcaatggcacgatctcggctcactgcaacctctgactccctggttcaagggattctcgcacctcagtagttttgtgtagtctgtgttgagggctggttatcgagaacaagaccccgcaagatgggttatcatggggtgtttcgatgggaggccacagaaaaccatgagccagtggaaactatggaatgagaaagacctgggttcagacactgggctctgccgcttattaactctgtgacattgagaaagttcctgagtgtctcaatgctgggggcttctctccatgtcacaggtcagcttgtggccacggggaatgcgaagtgataaggcagccttagagccaggttcagtcctgcgtttaggtttcaggtggaacaccccatcagggtcctagcctgtccaaaccagttttatctacagagatcgttagtctgtagaaagcaatgtaagccagagacctggcggcctccaagtctgccggggagaaggaggtgggagggcgcctccggaggcacatcagggagcccggagtttcttacctttgccgcaggcagctttcaaaaagaattcacagacagcagcgcccgactctgtagaaaggagagaaaaggagaggaatcaaagaggtgcaatttgctattgacaatgtctgaagacagtgggagggaacccttctgacctctgacccaccaagggttcagggtacaggaaataaagtagcaaaaatttgcaaagcccaaccaagcaaggaagaagctgcttaagttagtcacgccctacaaaatgagacacatacattgagaacagtcattacccagtgctttgagagcctcctgtatataagatcctttcaaggagttaagagtgggtggggaaaggaaggctggagtacgagatcacagaaataatttttttttttttgagatggggtttcgctctagttgcctgggctggagtgcaatgacgcgatcttggctcactgcaatctctgcctcccaggttcaagcaattctcttgcctcagcctcccaagtagctgggattacaggtgcctgccaccacgcttggctaatttttgtatttttagtagagacggggtttcaccatgttggccaggctggtctcgaactcttgacttcaggtgatccacccacctcggcctcccaaagtgctgggattacaggcgttgagccaaagtgcctgacacacaggaataaattaacggcccctagctcacaccttcctccaggagggcgaattcacagataccttaacatgaggcagagggaaggaatgatctcacagacgtacagacaatcagggcctctgaggagggtcaggcttcaaggaagaggcagtgcctctgagatgctagtccagggggaagcacattaagtgcagaaacagaggactgcttttaatatgcaacatccgtacacaattttttttttctatttttttgagacagagtctcgctctgtcgcccaggctagagtgtggtggtgcgatcttggctcaccgtaacctctgcctccttggttcaagagattctcctgcctcagcttcctgagtagctggaattataggtgtaccatcatgcctgcccaatttttttgtatttttagtagagatagggttttgccatgttggccaggctggtcccaaactactggcttcaagtgatccacctaccttggcctcccaaagtgctgggattatagacgtgagccaccacacctggcccacatacaattattacaggctggtctcgaactcctgacctcgtgatccgcctgccttggcttcccaaagtgctaggattgagccaccgcaccccaccccacatacaattattaaaagagcacacccggaggggtaacaagatggtaactgagatggtggagctccataagctgaagcttgctaaactaaagcaagaatgtcttcttgtggtttggagaccaagggaataaagcaagatcttatccacagactccaggcatatcttgaagaacatgctgaagaggaggcaaatgaagatgtactaggagatgaaacagaagaagaaaaaaaccccttgtcaaataggaagaaccccctgaaaaaaactgttgatgtggcagcagagaagaaagtggtgaaaattacatctgaaataccacaggctgagagaatgcagaagagggccgaacaattcagtgtacctgtgagcttggagagtaagaaagctgctcaggcagctaggtttgggatttcttcagttccaacaaaagtctgtcatctgaacacacctatggttaacttggataagccgaaggaaagagctcaaagatttggtttgaatgtctcttcaatttccagaaagtctgaagatgataagaaactgaaaaagaggaaggagcgatttgggattgtcacaagttcagctggaactggaaccacagaggatacagaggcaaagaagaggaaaagagcagagcgctttggcattgcctgatgaaaggttcttgatactttctgttctccagtgttttccacttctctcattcttcttggtcacatatatactaaatgcagtcttgccttgcaatgagggagcaggtaccccaggtaaaactgtgaactgccgcggcagtttgacttattgctgtttcagctttaaggttgttgtgtttttgtttttgattatattgcttgttttttgttttttttttttttttttttgagacggagtctcgctgttgcccaggctggagtgcagtggtgtgatctcggctcactgcaggctctgccccaccggggttcacaccattctcctgcctcagcctcccgagtagctgggactacaggcacccgccaccttgcccagctaattttttgtatttttagtagagacggggtttcaccgtgttagccaggatggtctcgatctcctgacctcgtgatccgcccgcctcggcctcccaaagtgctgggattacaggtgtgagccacaacgcccggccgattatgttgcttgttaataaaaaagaaaagaaaagaaaaaaaaagcacagcctttcattcccacagtcggagtgtgctggaattcagtgggctccagggaccagctgttctgatgagtccaggaattcaccagccccagctgccagactaaactgaccttggcatcagaaacagtttcctctacaagtaaccattttagaattgctgaaaaaccaatgacagcatctctgaagcccacttaacatgcctccccttgctaaatcacaaaagattccttggcttcttggaagcaagcagattttgctaggacacagctgaggttatagaacttatggctgtcacagggaggtcactccatttgcatctcaaaaagtctgaaagtggccaggtgcggtgactcacgtctgtaatcctagcactttgggaggctgaggcgggtggatcacttgacatcaggagttcaagaccagcctggccaatatggtgaaaccccatctctactaaaaatgcaaaaattagtcagacatggtggcacgtgcctgtaatcccagctacctgggaggctgaggcaggagaatcacttgaacccagaggcagaggttgcagtgagccaagatcgcgtcactgtgctccagcctgggtaacagagcaagactctgtctcaaaaaaaaagaaaaaaaaaattctgaaagtacttctggtctctctctttagaggttagagttgcttctgctcagaaatacacagttctgggaactgagtctcatgtggataggatgagtatgccttatgggcaaagtgacagttcttcccaaaactcagatggggatgaagaggagggatgggtgaggaagggctgtggcctcactaggctttaactgaacaggatatggacaagcagcgagtgtggagggtgcctaccgactctgaagccctggctggagcaacacccatggctaggtgtgtcccgggcctcaggaacaggtatgtgggcccctcgccactgtacctcccctcacaggcttgtggatgtgtcagatggcagaagggtgggaggaaaagagctgccctgcgtgggtggttccatggtctcaagctagtgccatcaagacaggaaaaggccggctgggcacagtggcttatgcccgtaatcccagcactttgggaggccgaggcaggtggatcatttaaggtcaggagttcaagaccagcctggccaacatggtgaaacctcatctctactaaaaatacaaaaattagttgggcgtggtggtgggcgcctataatcccagctactcaggaggccaaggcagcagaactgcttgaacctgggaggtggaggttgcagtgagccgagatcgcaccattgcactccagcctgggtgacaaaagcaaaactctgtctcaaaaaaaaaaaaaaaaaaaagacaggaaaaggccacatgtgcagggatgatcacaagagtcgaggggtaggtaagagggggtgtgtgtgtgtgaatttgagcagctgctttttagggagtgtacagtggtgatggtgtttgtgcctgtgtcaaatagggtggtctgatgatgtctccttataagcactatcttgtcttcttgaagacttaattaatttccaatgaaactatcttgtacagaactatcaccatgtaaagttgtgggacaggcaggaaaaaaaaaaaaaaaaaaatatatatatatatatatatgccaggtgcagtggctcatgcctrtaatcccagtacttccgaaggccgaggtaaaaggatcacttgagcccaggagttcaagaccaaccctgggaaacatgatgaaatagtgtctctaccaagaaatacacacaaaaaaatttgccaggcgtgttggtgcatgcctgtggtcccagctacttgggagactgaggtgggaggattgctggagcctgggaagtcgaggctgcattgagccatgattgcgtcactgcacccagcctgggcgacagaggggcccctgtctcaaaagcaaacaaacaacaacaacaaaaacacataaagggacagactcagaggtcacatgtgcatgagaaggtgtgaccgcctgaggggagtgaggctgctgggagcggtgggagaccccgctggtagttgtgggcgacagcacacaacactggagagcttgcccgcctctgctatgcactgagtgattgtcagcaagtcccttcccccgcttgggtctcagtttccccatctgtggattgaactcagtgacttccacaagcccccaaactttaaggttatagcattagatttcaagtatgtccagataggaaagaagacacaaagaaaactactggtttcttttaaagtacaagatatcccaccgagtaggaggtgggaagccaggagccaccatatgaaggggagcagtgaagggagttcaggccaagggtccacaccagctgctgggtgtgatgaataactcagagttggggtccagaaaaaagtagggacgggccaaaaactagggatgagctcccaggagagtgagtcctagaagggagtttgagagtctagctggggtctcctacagaaaggtggtccttccctcagcacatctcctccaaccgcctagttttgatgaaatcaagaagagacgctcaacgtagcgggtgtgatatcctagtactctcctgcagttgggagagtgttgagggagagttccaatccaggataacccacccttattcaagaattaagcgaacagacaaggtctaccctcctacagattacctttgaacagccgcagagggccaaagatccgaggcagtgaactcctgagtccgagtgagggtaaaaggagtccccagacggtggaaatgggggcctgggagtcaggagtcctgaaaccaaggggagcgtcccgggatccagaagaggaggtctcaggatggagtgggaagagtctcgggaccacagatgagggagttcggtaactaaaggggaggatcccaggacccggaggaggtgggagggactctcaagacctagagggaggagtcctgcgaccaaaggggaggggtcccaggatcyagaggaagccgggggaggtctcaggaccgaggcgagggagtcccgggatcacagaggagcgggtcccgggttcgagtcgctcttgccctcccgcccgggccccgcgctcactgtccatgccggggaagggcagcggctgcgcccccagctgctgctccaccgcgatctccaagtcaaacttgatgtggtccacgctggcgatgatttcctgcatggcggcggcggcggccccaccggcccggctccccctcggtctcctgcagccttctcgcctttacccgccgccggccccgccgcacacactcctccttcgcttcgcctcgccgccgccgccgccgccgcccgagggatgccgggagcgcccggagcccgcgccggcccttgcgcctgtccaggcactgccaatcgagactccgccgttccgctagtcccagctagccgccagccgaacaccggcctcgccagaaacctgaaaccagccgcgtgagtcggcgacgcggattgcgcctgcgcgcttggggagagggggacccgaggaagagactggttcgccgcggggaccgggcagggctccccgtcggagtgcactgcgccggacacttcaagtgagttcctgtgtgatcctcgcaggagccccgggacccgggccaagacacgccagaggggaaggaagtgcccgagccgggattggagccgggggcgtctgaggagggaaactgaggctgcagaagtccgtgtggagaggggtcggcgttggcctgagggtccgggtgggcctctgaggaggggcgggtctctccgaggaaggacggccgcagcgtgtctctaattcagggttttttctcgctctgtggcccaggctggagtacaggggtacgatcatagctcactgcagtcaacttctcagactcaagcgatcctcccacctcagcctcccgagtagctggaactacagacgctgcaccaccacacttggctaatttttaaaattttatttttaatttttgtagagacggcggggttgggggggcgggtggcgggtcttgctatgttgcccaggctggtctcgaactcctggccccaagcccaaagcgatcctcctgcctgggcctcccaaagtgctggaattgcaggcatgagccactatacagcctaattcagggttttttttaaccagggtggggtaatgagcttgtgtaggaacaaaatgcacccctatttttctctatgtgaagtatagcatttcctttcctgattgctggagcagccttagcagtgcctgaaactgtgagggtgagtgtaaatgatagttccagataacagtttgtgcagggccaggcatggtggctcacacctgtaacctcagcactttgggagtctgaggcgagaggatcacgtgaggtcaggagttcgagaccagcctggacaggatggcaaaaccccgtccctactgaaaatataaaaattggcctggagtagtggcgcgttcctgtaatcccagctacttgggaggctgaggcatgagcatggcttaaacccgggaggcagaggttgcattgagccgagattgtaccaccccactccagcctggtgacagagtgagacgcaaaaaaacccagtttgtgcagcaactacaaggtggtatcttaagctgtcacttacatttattactgctttgaaattatgatagagtcggccgggcgcggtggctcacggctgtaatcccagcacttcgggaggccgaggcgggcggatcacaaggtcaaaagatccagaccatcctggccaacatggtgaaaccctgtctctactaaaaatacaaaaattagctgggcttggtggcatgcgtctgtagtcccagctccaggggaggctgaggcaggagaatcgcttgaatccgggaggcggaaattgcagtgagccgaggtcacgcctgaggacagagtgagagactgtctcaaaaaaaaaaaaagaaaagaaaagaaattatgatagggtcttgttatttcatgcattgaaaataagcatctatactagtatagcagaaatttgtttttaaagcattttgatgccatttcaatatcattgctttttgttttgtaattctgtgtattgtaattaatgcacgtaaggcagggcatggaggcttacgcctgcaatcccaacactttgggaggccaaggctggaggattgcttgaggccaggagttctagaccagcctggcaacatagggagactccatctctacaaaaaaatacaaaaaattagacaggtatggtggtgtgcaccagtagtgctagttaattgagaggctgaggtaggaggatcacttgagcccaggagttggaggttgcagtgattgtgcatttgcactccactgtgccatcgcactccagcctgggcaacatgaagaccccattccacaaaaaagaaaattacataaacaccatgcttgtaagaaggagtggcagggcttgccagatgcagaatgataaaggccccctgcactagtttcacaaaaggtgctggtcaggacaatcatcaatgcgttacatggacctgagttcaaagccagcccagcccaagctggccagtctcacccactgcactgctgcaggaccccagcaagtctctccccttgctgggcctagttttttgtttgttgttgttgttgttgttttgagatggagtcttgctctgtcgctcaggctggagtgcaatggcgcgatcttggctcactgcaacctctgcctcccacgttcaagtgattctcctgcctcagcctcccaagtagctgggattacaggggcacgctgtcacgcccagctaatttttatattttcggcagagatagggttcaccacgtcaggctggtctcgaactcctgacctgaggggatccacccaccttggcctcccaaagtgctgggattacaggcgtgagccaccgctcctgacctactgggcctagtttttaatctgttcaatctgccatcacttgtaagacttttccaatcgcaaccttctaatataaccagactctaaaatactttaggctgggcatggtggctcattgctgtaatcccagtgctttgggaggtcgaggcgagaggattgcttgagtccaggagttcaagaccagcctgggcacatagcaagaccctgtctctaccaaaaaataaaattagccaggcatagtggctcacacctgtagttccagctactcgggaggctgaaatgggaggatcgcttgagcacaggagggtggggctgcagtgagctatgtctgacctgaacctaggctttctaacctctgggcccatacttcttattttatttattattattatttttttttttttctgagacagagtctcactgtcactcaggctggagtgcagtggcgcgatctcagctcactgcaagctccgtctcctgggttcaagcgattctcctacctcagtctcctcagtagctgggattagacgtgtagcaccacacccagctcatgttttttgtatttttagtagagatggggtgtcgccaggctggtcttgaactgatctgcccgcctcggcctcccaaagtgctgggagtgcaggcatgagccaccgcccctggcctgttctttttctttctttcttttcttttttttttcgagacagagtctcactctgtcacccaggttggagtatggtggcgcaatctcagctcactgcaagctccatctcccaggttcaggtgattctcctgcctcagcctcctgagtagctgggattacaggcgcacagcaccaagcctggctaatttttgtatttttcatagagacggggtttcaccatgttgtccaggctggtctcaaactcctgacctcaagtgatatgccagcctcgacctcccaaagtgctgggattacaggcatgagccaccgcgcctggcctgggcccatacttgtaaccacttctttctttctgccttttgttactaggaactgagttgactctcttatttttcctgatatattccaggccctggagggacaggaaagccagaaatggacttcgtgagactcgctcgactgttcgccagggcccgccccatgggactgttcatcctgcaacacctggacccctgtagagccaggtgggcaggaggcagggaggggctgatgcggccaatgtgggcgcccttcagcagctcctcctctcagctgcccctcggccaggagcgtcaggaaaacacgggcagcctgggctctgacccgagccactccaactccacggccacgcaggaagaagacgaggaggaggaggagagttttgggaccctctctgacaaatactcctcccggagactattccgcaaatccgcagcccagttccataacctgcggtttggggaacggagagatgagcaaatggaaccggagcccaaattatggcgaggccggagaaacaccccgtactggtacttcttgcagtgcaaacacctgatcaaggaagggaaggtaaggggcactttgggttctgtggctcctggcttctttcccctggtggctcagtgttttgcaaggggtcacctgactttcccagcctctaagttttgggcctaccctgttgaactgccagccttatggctgtaagtatcgcaaccctttgccatcctccaccgcagttttattttattgtatttttttttttttgtagagacggaggttgcactgagctgatcttaccactagactccagcctgagtcacagaacaagagtctgtctcaaaaaaaaaaaaaggaaaaagaaaagtgaatcctccacacccttctagcactccctgctttaggttttttttataacaggatctcactctgtcgcccaggctggagtgcagtggcacgatcttggctcactgcagcctccgcctcctggggaattcaagcaattctcccatctcaacatcctgagtagctgggattacaggcatgtgccaccacacctggccaatttttgtatttttagtagagatggggtttctccatgatggccaggctggtctcaaactccagacctcaggtgatccgcccgccttggtctcccgaaatgctgggactacaaacatgagccattacacctggccgctgctttagttttgttcgtaccacctgtcatcacttgatatactgtgtgtctttcttaattatcccatttcatgtctgtctggtttgtttttttgttttttttttttttttgagatggagtcttgtaccgtcacccaggctggagtgcagtggtgaaatcttggctcaccgtagcctctgcctcccgggttcaagcaattcttctgccttagccttccaagtagctgggattacaggtgtgtgccaccatgcctggctaatttttgtatttttagtagagacggggtttcaccatgttggccaggctggtctcgaattcctgaccttgtgatctgcccgcctcagcctcccaaagtgctgggattacaggcgtgagccactgcgcctggcctcatgtctgactttccacaccaaaacatgagctccaagaaggagctctctcttgttcccagccgtatatgcagtggatagaccttgtctggctcattgaagcactcagtaattattgtttgaatgaacagatgaaaataatgaaggaataaaggaatgaactgaggcttcaccggggaaatggtgtgaggtgagggatggggcagaaacagctgggggcccagggggtttgcagtcacccagggccgccgttctccaccattttaggagggtccctcagcttcaacctccctctctctgctgagggtctctggggccattctgagcccctgccctgttgcctcttccctgcagctggttgaagccctggacctgtttgagaggcagatgctgaaggaggagcgattgcagcccatggagagcaactacacggtgctgattgggggctgcgggcgggttggctacctgaagaaggccttcaacctctacaaccaggtgcatgtgggcgcagggcagccggggtgaggctctgaaaagctgggggcggatcccaagtgtgccacttgctagtgctttacactgggcaggtgacttcacctccctggcctcagagtcatctccttaaaatggtggtgattgtgggtgataaacgagatgacatggaaagccctttagcacctgcctggactgtggcggtccccatgttccctttcttttcccttcaaaaaaaaacagagggagcctcactctgtcacctaggctggagtgcagtcatagctcactgcagcctccaactccttggctcaagagttcctcctgcctcagcctcgccagtagctgtgagcacaggt

SEQ ID NO: 96884 - DNA, 15527 bp, Homo sapiens
  misc_feature (1)...(15527): n = A,T,C or G
ctttggacaccttaggctgaagaccaacatcgtcctcattgtcctgagttgctacggtcaatgctacacaactggggtgggcagtccacagagctccctgggcgtctagtcttcccgcatgcggcaaggactgtcagtggacaacccagtaatggccatgcgtggtggcgggaggccgaggcaggtggatcacctgaggtcaggagttcaagatcagcctggtcaacatggtgaaaccccatctctactaaaactacaaaaaaaaagttagcagggcatggtggtgcatgcctgtaatcccagctacctgggaggctgaggtaggagaatcgtttgaacccaggaggtggaggttgcagtgagctgagattgtgccactgcactccagcctgggtgacagtgagactccatctccaaaaaaaaaaaaaaaaccttagccaggcatagtggcaggtgcctgtaatcccaccttcccagctacttgggaggctgagatagaagaatcacttgaaccctggaggtggagggtgcagtgcgctgacattgtgccacggcactctagcctgggtgcagagtaagactccatctcaaaaaacaaaacaaaacaaagaaacaaacgaaaaaaacgatgactcagtaagaacagggacagtaagagctcagactgaaaggggaaaagggctccacaataagcagagtggctgtagagcagagggtggggaatccggggtggcaagtggcagagggtggtgacccatcatggcctcagaccagctgcagcagcagggttgtggcttgctcactcactctcatgcctcagtctttcaggagagcttaaccaccttggaggggatgctgtgacaactgaacttgggcccctgcagcagaccacatttccctagcccgcctgctcttcctacagtctaatattgacactcctcccactgaagggtggggtccctgtcctcatcccttaagcctgggcagatctgtctgactgccttgacccacagagtgtggcaggagggacactatgtgacttctgaggttaggtcctaaaaataccatgcacatgttgtccaccttgttgtcctggaaggctacccttggaacccagttgccatactgcaaggaagccctggttgcatggagaagccacatgtaggtgtgctgcctgacaggcacagatgaggtcctggcccgccaccagcatcagccaccaaagatgtgagggagaaagctttaggatggctgcagccccagctaccatctggcagcaactgtaggagagatcctaagtgcaaactatctagctgagcctagataaccccagattgcagcacataataatagaatgatttttattatttgaagccgctgaggttaagtggcaagagataaacagacatacaacccctctctggaaaggatgaggaaatctgcatcctcaaagggaaaagggaggcccacctgactgcagtgtggaagctcggtgtaaagggagggcatgagaggactggagaggtgccaggtgtggaccatcctgggacaccagcctggtcactttcctaggaccgctcaatgccttctcctgtcagtgtcgcaccccactgggttcatccttccactttcacacttggggcgcggggaagggctgaatgcaggcaccactggtcacgagggcgtgactgggcaattcctccttcggcgggcgcccacctcctggcacccgtggcacagctccgggaacggctgcgggcccagccgctgcttccccgatagcgccgccgcagttccccggagacagaagtagagccggaccgccggaaaccgtagatccggggaggtcggggccgcggtgaactccagttcaccaggacaggaagtgacagcggaacgccggaaaccgcagatccacggaggtcagggccgcggagagctgtagttccccggaaccggaagtgatggcggacctccggaaaccgtagattccgggcggtcggagccgccgggagctgtagttctcccgcggctcagagaagtaggcagagagcggacctggcggccgggcagcatggcggggctggagctcttgtcggaccagggctaccgggtggacgggcggcgcgccggggagctgcgcaagatccaggcgcggatgggcgtgttcgcgcaggctgacggctcggcctacattgagcagggcaacaccaaggcactggctgtggtctacggcccgcacgaggcgagtgggcgcgcgggatggggaatcgtgtggccgtgggagctgcggggcagccgggctgagcgctggctcggggacttgaggggcaacggccggcgcgcctcagtctacacagccgatgctcagcaccgcatctcactcggagtaaacgcaagtccttagtgtgctgcgcggtggtcctgcctttctcatcggcctctgtccctgcgccctccttcctctttgcggctcttcaacgtgctaggcactcccccactcgctccctctcctttcagctctactccgacgtcactccttcccagacgaccttattatccacgcggtacttctcgccctacaataaaccctttgttttgtgcacctacaatctcaaatgcctattttgcttaagcattttcccctttgtttcctcgctggaacataagcttcctaaagaaaggaactttacataaaactatctggtttcattactgtgcttccagcgctgtaactgcctggccagcgaaggtattgaaagagtgtttgcttagcgcatgagtgtgggagctctgctttccaggcggagggaaccagaagggcgaagaccacggtggtgaaaacaagcaaggcacttatgcagagcagaaagactgctggtggggaaagaggggataactccaaatcaggttgagggttcccggggaggtgaggacttagggttttgtagagtagggaaatgatttgggatcttatttcatatgtaatgtgaaacctttgtaaggtagttaggatttgagtgtgtaggtgagacagaagcagcgttgatgtttgtaaacttgggttggcagggaatggggcaaggatggacacaaggaagccaattaaaaggtgccagagggcgacacatgcaagacagagagcgcaaaacagggggctttgttttggaggtaacgcagttgccccttgctgaggcattgaaagtggagggagaggcagacccacagaggacagtggagtgtgagctggaaggagtgggcctggctcatgtgtctgtcctcttccagatccggggctcccgggctcgagccctgccggacagggccctagtgaactgtcaatatagttcagcgaccttcagcacaggtgagcgcaagcgacggccacatggggaccgtaagtcctgtgagatgggcctgcagctccgccagactttcgaagcagccatcctcacacagctgcacccacgctcccagattgatatctatgtgcaggtgagccagctgcagccgtcaatccagggagggaagggtgtgatggggttggggagggagtctgatagactgacaccctgggttccctgcaggtgctacaggcagatggtgggacctatgcagcttgtgtgaatgcagccacgctggcagtgctggatgccgggatacccatgagagactttgtgtgtgcgtgctcagctggcttcgtggacggcacagccctggcggacctcagccatgtggaggaagcagctggtggcccccagctggccctggccctgctgccagcctcaggacagattgcgctgcttgagatggatgcccggctgcacgaggaccacctggagcgggtgttggaggctgctgcccaggctgcccgagatgtgcacaccctcttagatcgagtggtccggcagcatgtgcgtgaggcctctatcttgctgggggactgaccacccagccacccatgtccagaataaaaccctcctctgcccacacacccctcactgtacgttatcacctaacagcacttcagagccatgtgaaggctggcagagcctggtctggtgctggctcctggggatgattagggaccctcgcccacacatgaacggcctatctctgtgtagcctgattcaaaccctgaagagaacagtggattagggggtttctgtaggggaggccctgggtggaaaaagcagcatgtcccagtaaggactcaaggcagctgagcaggaggcagggcctggcaagatgagccaggccattagactgaggaatctgttacccttattccagcacatcgggggccctgagcaaagggctgaggaagaactcagctggctctgggtacccaccctagggatgtgggggccatgtcccacaacctctggactatggtttggagccccctgggcttttcctgctgcttaccttgggctctgaaagtacaacagccaggcatggtggctcacgcctgtaatcccagagctttgggaggctgaggcaggcggattgcttcaggtcaggagtttgagaccagcctggccaacatggcgaaaccccgtctctactaaaaatacaaaattagctgggagtggtggcacatgcctgtaatccaagctactcaggaggctgagacaggagaatctcttgaacctgggaggcggaggttgcagtgagccgagattgtgccactgcactccagcctgggcgacagagcaagactccatctaaaaaaaaataaaagtacaaaaattacctgttnnnnnnnnnnnnnnnnnnnnnnnnnnnnnnnnnnnnnnnnnnnnnnnnnnnnnnnnnnnnnnnnnnnnnnnnnnnnnnnnnnnnnnnnnnnnnnnnnnnnnnnnnnnnnnnnnnnnnnnnnnnnnnnnnnnnnnnnnnnnnnnnnnnnnnnnnnnnnnnnnnnnnnnnnnnnnnnnnnnnnnnnnnnnnnnnnnnnnnnnnnnnnnnnnnnnnnnnnnnnnnnnnnnnnnnnnnnnnnnnnnnnnnnnnnnnnnnnnnnnnnnnnnnnnnnnnnnnnnnnnnnnnnnnnnnnnnnnnnnnnnnnnnnnnnnnnnnnnnnnnnnnnnnnnnnnnnnnnnnnnnnnnnnnnnnnnnnnnnnnnnnnnnnnnnnnnnnnnnnnnnnnnnnnnnnnnnnnnnnnnnnnnnnnnnnnnnnnnnnnnnnnnnnnnnnnnnnnnnnnnnnnnnnnnnnnnnnnnnnnnnnnnnnnnnnnnnnnnnnnnnnnnnnnnnnnnnnnnnnnnnnnnnnnnnnnnnnnnnnnnnnnnnnnnnnnnnnnnnnnnnnnnnnnnnnnnnnnnnnnnnnnnnnnnnnnnnnnnnnnnnnnnnnnnnnnnnnnnnnnnnnnnnnnnnnnnnnnnnnnnnnnnnnnnnnnnnnnnnnnnnnnnnnnnnnnnnnnnnnnnnnnnnnnnnnnnnnnnnnnnnnnnnnnnnnnnnnnnnnnnnnnnnnnnnnnnnnnnnnnnnnnnnnnnnnnnnnnnnnnnnnnnnnnnnnnnnnnnnnnnnnnnnnnnnnnnnnnnnnnnnnnnnnnnnnnnnnnnnnnnnnnnnnnnnnnnnnnnnnnnnnnnnnnnnnnnnnnnnnnnnnnnnnnnnnnnnnnnnnnnnnnnnnnnnnnnnnnnnnnnnnnnnnnnnnnnnnnnnnnnnnnnnnnnnnnnnnnnnnnnnnnnnnnnnnnnnnnnnnnnnnnnnnnnnnnnnnnnnnnnnnnnnnnnnnnnnnnnnnnnnnnnnnnnnnnnnnnnnnnnnnnnnnnnnnnnnnnnnnnnnnnnnnnnnnnnnnnnnnnnnnnnnnnnnnnnnnnnnnnnnnnnnnnnnnnnnnnnnnnnnnnnnnnnnnnnnnnnnnnnnnnnnnnnnnnnnnnnnnnnnnnnnnnnnnnnnnnnnnnnnnnnnnnnnnnnnnnnnnnnnnnnnnnnnnnnnnnnnnnnnnnnnnnnnnnnnnnnnnnnnnnnnnnnnnnnnnnnnnnnnnnnnnnnnnnnnnnnnnnaggcgggagagggtccgtagccgcgccgccctgccccgccatgggcctcctgtcggacccggttcgccggcgcgcgctcgcccgcctagtgctgcgcctcaacgcgccgttgtggtgaggacagggcccggggaggcggggacccgagggccctgggctcgcgccggcggccccatgcgcggtccccatcgagggccggggccgctccagctgctcgcgcccctccgrctgctcgcgcccttccgctcctgccctctggaagcactgagggtatcaggcccaggcttagggctcgggtccggcgtcccgatgcaggactccgggtttaggtctcccagacccgcgcgatcgaccccgggtgcggaggttgtggcctcgggtcggcgtctgaggacccgctgacgctccggtgcccctccgtcctctctcacagcgtgctgagctacgtggcgggcatcgcctggttcttggcgctggttttcccgccgctgacccagcgcacttacatgtcggagaacgccatgggctccaccatggtggaggagcagtttgcgggcggagaccgtgcccgggcttttgcccgggacttcgccgcccaccgcaagaagtcggggtgagcggcagagcagggcgtatggggcgagcagtggtggctaaggccggggagctctgctcagaggctcccttcgtgtctgcagggctctgccagtggcctggcttgaacggacgatgcggtcagtagggctggaggtctacacgcagagtttctcccggaaactgcccttcccagatgagacccacgagcgctatgtactgggggagtggggtgtgcctgggcccagaaagcaccttggagggaggggtctgggctgggtatcaccttgcgggggtgtcatggggccaggaagctcagtgggagggaaatccctggtgggcactggagggctaggaaagttgtggggggcccttcagccccctaccacaaagttacactgaggctccccccaccgatgctgcatacagatggtgtcgggcaccaacgtgtacggcatcctgcgggccccgcgtgctgccagcaccgagkcgcttgtgctcaccgtgccctgtggctctgactctaccaacagccaggctgtggggctgctgctggcactggctgcccacttccggggtgagtctcagggctgctggccgtggaggggtttggtcagtgccccagaccctgctgatcctgcttctggcctccagggcagatttattgggccaaagatatcgtcttcctggtaacagaacatgaccttctgggcactgaggcttggcttgaagcctaccacgatgtcaatgtcactggtaggttctcttgtcctgcctgccctggtccccctctcagggtcactgtcctcaccacgtcctccattagcactcattcacttgctcctacaggcatgcagtcgtctcccctgcagggccgagctggggccattcaggcagccgtggccctggagctgagcagtgatgtggtcaccagcctcgatgtggccgtggaggggcttaacgggcagctgcccaaccttgacctgctcaatctcttccagaccttctgccagaaagggggcctgttgtgcacgcttcagggcaaggtggggctgcctgcctgcctgagggctgaagggcacagggtctgtgggaggggctgtctcatcctgtcctgcacctctaaagctgcagcccgaggactggacatcattggatggaccgctgcagggcctgcagacactgctgctcatggttctgcggcaggcctccggccgcccccacggctcccatggcctcttcctgcgctaccgtgtggaggccctaaccctgcgtggcatcaatagcttccgccagtacaagtatgacctggtggcagtgggcaagtaagtagtctctggtcccccctttccatgcccaggatggggtctagctggagcggagtgggggatggcctggtggctctggccagccgtgaacctgccccacacctgacagggctttggagggcatgttccgcaagctcaaccacctcctggagcgcctgcaccagtccttcttcctctacttgctccccggcctctcccgcttcgtctccatcggcctctacatgcccgctgtcggcttcttgctcctggtccttggtctcaagatatcctctgccccttgccatctacctgtgaccagcctccagtctcctcaactctaggctggggagagtcttccatcctgatggggggtggggtacgggggtgagccctgggtccccctctgggcagatcccgttacacctcttgttggggtccttgattgggctacgctctggaactgtggatgcagctgcatgaggctggaatgggccttgaggagcccgggggtgcccctggccccagtgtaccccttcccccatcacaggtgatggcacccccttctgttgttggaatgggcttctggggtctgactggtgtttagtgttgcaacttagcctcagctggtgggatggtggtggtctttggggatcccctggccccagggtccatctccaagagcctgtgtgccctgcagggtgtggggctggcctcgctcgtggcacctattgctgatctcacaggccatgggactggccctctatgtcctgccagtgctgggccaacacgttgccacccagcacttcccagtggcagaggctgaggctgtggtgctgacactgctggcgatttatgcagctggcctggccctgccccacaatacccaccggtaagaggctgggctggttgttgggggcaggggtagaggtcccctggacatgcagacagcttgtgggttgcctctgagtcctttgtcttrcagggtggtaagcacacaggccccagacaggggctggatggcactgaagctggtagccctgatctacctagcactgcagctgggctgcatcgccctcaccaacttctcactgggcttcctgctggccaccaccatggtgcccactgctgcgcttgccaagcctcatgggccccggtatgtatggatcagccccacttcccccaatgcctgtgccctcatcacagaccgcaccctcattcagtagccctttcccccaacctggtgcccatgcccccaccatggagcctaccttgatgttgcttctccacccaggaccctctatgctgccctgctggtgctgaccagcccggcagccacgctccttggcagcctgttcctgtggcgggagctgcaggaggcgccactgtcactggccgagggctggcagctcttcctggcagcgctagcccagggtgtgctggagcaccacacctacggcgccctgctcttcccactgctgtccctgggcctctacccctgctggctgcttttctggaatgtgctcttctggaadtgagatctgcctgtccgggctgggacagagactccccaaggaccccattctgcctccttctggggaaataaatgagtgtctgtttcagcagctatttgagctcctggcccgctgtccgtgtagggccccagggcatgggggtgagaagcctctgtctgcagggcttggcattcctcacacctcctccctggcaagggctgctgtagtccacttactgggtagcattcctgccgaccagggctctgctgctgcatcaggtgcactctcagccctggcgggtgccatgcaggctcagaggctgtgtgcattgctctgtggtactgtgccaggagcggtgctgggaaggagaatacaccatagccatggtttgagggcctgccaggagctgaggcacccagaaaccacctaacaccatctttactgctaggactgaggctggagctggagccctgcagaggaggcccagggtgcatggcatggggcccaggcaaggccatcgccttggtgtgggattgggatggagcagggaggagcacccggcctggcttcctcagagttgagtcagcccaggtgagatgcccacgaggggctgggcaggcaacacagtggagccaggacccaggggcaggcggggcacggggacaagagccccacgggagagggcactgacaggccagcaaggagagaagcaggctgttatactaggactctgaaaggaactgggaagaccactgtctgttccaaaagaaaggaaaaacctgtggcctttaggtgatgccagggccatgtcagggaccttggtgctgcggctagagagccctctggtcacaggaaggcaaaggtgccgcagccacacaaaaccatgcacaggcctcaggaatcagagccgtgctgcctggagaagccacagcatcttagaatcaactgagggccagggtcctttcagtacagtgtccccaaatggcctgttgtctgggaggttccaaggagggtgccctccctgtgccctactctgtaggccactgcctcttcactgggttatgtcttcctgcgggaggctccccttgacatgagacccctggtgttgggggttagtctattgatggggctccacagttgggggatgggtggagggctcccagggtgagcacctaggcgacttccagagtttctgcagaggaaacacatgtctgctgggtgggcttacgttctctgtgtccagcattattcgaggcttagtggggatgagggggtatcaggaaccccactgtgactggtagcctcataattaacttgcctgtcttcagcccccttgtcccagaggttggagtctctagtcactttctccagtgaatacttcctctgaggttgggtggacgcctgcagtccccaccctagcctggctggtttcccctgcctctcagtacccctaggaacacctcctaggtgggcatcacgtgcctcccatgctaaatcagcaagggagactcatctgtcagtctcctattttccaagaagaaatctctgttgtggtctcctgttctctttgtaagatgacatctgatacaaaatcatcctccaggcattttagctgggctttgacctcaactgttttgtttttgagatggagtcttacactgtagcccaggctggagtgcagtgatgcaatcttggctcactgcaacctccacctccctggttcaagcagttctcctgcctcagcctcccaagtagtgggattacaggtgcgcaccaccatgcctggctaattgtgtatttttagtagagacggggttttactatgttgtccaggctggtctcaaactcctgacctcagatgatctacccacctacgtctcccaaagtactgggattacaggcatgagagccaccacacatggcagcctcaattgttttttaacaggactttggcagtcacttaaagcacaaatcatgaaaatacatacgtcgggggaaaagctaaaggataccttgcttgtgttctgagtagtttgtgcagaattctccctgcctatacaagtgttaaaagggaaccatgggaatggcaaggttgctttgttagggaggtaggatttctgttctgattttcagtaatgacatgggctgaggctccacgtttccccctccctgaatatttttttttttttttttttttggacagagtctcactgtcgcccaggctgggtgctatggcgagatcttggctcactgcagcctccatctcccgagttcaagtgattctctgggctcagcctctgttatatgtaaaatgtttatttagaagcagaatgttccctggtaccataaggaaagatcagcattcagacaaaaagttctcagcaagtcaattttactttctgcagaaagggtgctccttgcagatggaatgatggcgagagcatacctgaataaaggagggaagcatttttatctcttaatgcagcttgtccctgctactgtgtcctgtctgcattggctggaaccagacctgaacccgatgggctaacagcttaaacccttttttaaataggtaaaagcaatggagaacagaagaaaagaggaagttgcttactaaaggacttagaaaagtaataatattcccaaataaggaaggggcataggctgcaagctgggacatgcctgtaagcacgtccagcacaaatattttggttaaagtacaaggacatagaatgtccttattcctttatatctaacagctccataggatagggcttaacaaagagttattagcacgaagcaaggaggcttgaaggaagttagtctttaaaagaaacacttataatttattttttaacaagaagggaaactttgaagaggaaactttttactttctacaacctcccgagtagctgggatacaggcatgcgtcaccacgccccactaattattttatatttttacaaatattttggcttcttccaatgtccacgttcttaccaacacttgctagtgtccatctttttttttttttttttgagttggagtttcactcttgtcacccaggctggactgcaatggcacgatctcggctcactgcaacctccgcctcgcaggttcaagtgattctcctgcctcagtctctcgagtagctgggagtccaggcatacaccaccactcctggctaattttgtatttttagtagagatggggtttctccatgttggtcaggctggtctcaaactcccgacctcaggtgatccacctgcctcagcttcccaaagtgctgggattacaggtgtgagccaccacacccagacctgctagtatccatcttgtagattacagccatcctagtgggtgtgaagtggcattgcattttcattttgatttgcatttacctannnnnnnnnnnnnnnnnnnnnnnnnnnnnnnnnnnnnnnnnnnnnnnnnnnnnnnnnnnnnnnnnnnnnnnnnnnnnnnnnnnnnnnnnnnnnnnnnnnnnnnnnnnnnnnnnnnnnnnnnnnnnnnnnnnnnnnnnnnnnnnnnnnnnnnnnnnnnnnnnnnnnnnnnnnnnnnnnnnnnnnnnnnnnnnnnnnnnnnnnnnnnnnnnnnnnnnnnnnnnnnnnnnnnnnnnnnnnnnnnnnnnnnnnnnnnnnnnnnnnnnnnnnnnnnnnnnnnnnnnnnnnnnnnnnnnnnnnnnnnnnnnnnnnnnnnnnnnnnnnnnnnnnnnnnnnnnnnnnnnnnnnnnnnnnnnnnnnnnnnnnnnnnnnnnnnnnnnnnnnnnnnnnnnnnnnnnnnnnnnnnnnnnnnnnnnnnnnnnnnnnnnnnnnnnnnnnnnnnnnnnnnnnnnnnnnnnnnnnnnnnnnnnnnnnnnnnnnnnnnnnnnnnnnnnnnnnnnnnnnnnnnnnnnnnnnnnnnnnnnnnnnnnnnnnnnnnnnnnnnnnnnnnnnnnnnnnnnnnnnnnnnnnnnnnnnnnnnnnnnnnnnnnnnnnnnnnnnnnnnnnnnnnnnnnnnnnnnnnnnnnnnnnnnnnnnnnnnnnnnnnnnnnnnnnnnnnnnnnnnnnnnnnnnnnnnnnnnnnnnnnnnnnnnnnnnnnnnnnnnnnnnnnnnnnnnnnnnnnnnnnnnnnnnnnnnnnnnnnnnnnnnnnnnnnnnnnnnnnnnnnnnnnnnnnnnnnnnnnnnnnnnnnnnnnnnnnnnnnnnnnnnnnnnnnnnnnnnnnnnnnnnnnnnnnnnnnnnnnnnnnnnnnnnnnnnnnnnnnnnnnnnnnnnnnnnnnnnnnnnnnnnnnnnnnnnnnnnnnnnnnnnnnnnnnnnnnnnnnnnnnnnnnnnnnnnnnnnnnnnnnnnnnnnnnnnnnnnnnnnnnnnnnnnnnnnnnnnnnnnnnnnnnnnnnnnnnnnnnnnnnnnnnnnnnnnnnnnnnnnnnnnnnnnnnnnnnnnnnnnnnnnnnnnnnnnnnnnnnnnnnnnnnnnnnnnnnnnnnnnnnnnnnnnnnnnnnnnnnnnnnnnnnnnnnnnnnnnnnnnnnnnnnnnnnnnnnnnnnnnnnnnnnnnnnnnnnnnnnnnnnnnnnnnnnnnnnnnnnnnnnnnnnnnnnnnnnnnnnnnnnnnnnnnnnnnnnnnnnnnnnnnnnnnnnnnnnnnnnnnnnnnnnnnnnnnnnnnnnnnnnnnnnnnnnnnnnnnnnnnnnnnnnnnnnnnnnnnnnnnnnnnnnnnnnnnnnnnnnnnnnnnnnnnnnnnnnnnnnnnnnnnnnnnnnnnnnnnnnnnnnnnnnnnnnnnnnnnnnnnnnnnnnnnnnnnnnnnnnnnnnnnnnnnnnnnnnnnnnnnnnnnnnnnnnnnnnnnnnnnnnnnnnnnnnnnnnnnnnnnnnnnnnnnnnnnnnnnnnnnnnnnnnnnnnnnnnnnnnnnnnnnnnnnnnnnnnnnnnnnnnnnnnnnnnnnnnnnnnnnnnnnnnnnnnnnnnnnnnnnnnnnnnnnnnnnnnnnnnnnnnnnnnnnnnnnnnnnnnnnnnnnnnnnnnnnnnnnnnnnnnnnnnnnnnnnnnnnnnnnnnnnnnnnnnnnnnnnnnnnnnnnnnnnnnnnnnnnnnnnnnnnnnnnnnnnnnnnnnnnnnnnnnnnnnnnnnnnnnnnnnnnnnnnnnnnnnnnnnnnnnnnnnnnnnnnnnnnnnnnnnnnnnnnnnnnnnnnnnnnnnnnnnnnnnnnnnnnnnnnnnnnnnnnnnnnnnnnnnnnnnnnnnnnnnnnnnnnnnnnnnnnnnnnnnnnnnnnnnnnnnnnnnnnnnnnnnnnnnnnnnnnnnnnnnnnnnnnnnnnnnnnnnnnnnnnnnnnnnnnnnnnnnnnnnnnnnnnnnnnnnnnnnnnnnnnnnnnnnnnnnnnnnnnnnnnnnnnnnnnnnnnnnnnnnnnnnnnnnnnnnnnnnnnnnnnnnnnnnnnnnnnnnnnnnnnnnnnnnnnnnnnnnnnnnnnnnnnnnnnnnnnnnnnnnnnnnnnnnnnnnnnnnnnnnnnnnnnnnnnnnnnnnnnnnnnnnnnnnnnnnnnnnnnnnnnnnnnnnnnnnnnnnnnnnnnnnnnnnnnnnnnnnnnnnnnnnnnnnnnnnnnnnnnnnnnnnnnnnnnnnnnnnnnnnnnnnnnnnnnnnnnnnnnnnnnnnnnnnnnnnnnnnnnnnnnnnnnnnnnnnnnnnnnnnnnnnnnnnnnnnnnnnnnnnnnnnnnnnnnnnnnnnnnnnnnnnnnnnnnnnnnnnnnnnnnnnnnnnnnnnnnnnnnnnnnnnnnnnnnnnnnnnnnnnnnnnnnnnnnnnnnnnnnnnnnnnnnnnnnnnnnnnnnnnnnnnnnnnnnnnnnnnnnnnnnnnnnnnnnnnnnnnnnnnnnnnnnnnnnnnnnnnnnnnnnnnnnnnnnnnnnnnnnnnnnnnnnnnnnnnnnnnnnnnnnnnnnnnnnnnnnnnnnnnnnnnnnnnnnnnnnnnnnnnnnnnnnnnnnnnnnnnnnnnnnnnnnnnnnnnnnnnnnnnnnnnnnnnnnnnnnnnnnnnnnnnnnnnnnnnnnnnnnnnnnnnnnnnnnnnnnnnnnnnnnnnnnnnnnnnnnnnnnnnnnnnnnnnnnnnnnnnnnnnnnnnnnnnnnnnnnnnnnn

SEQ ID NO: 96885 - DNA, 28325 bp, Homo sapiens
  misc_feature (1)...(28325): n = A,T,C or G
ttttttttttttttttgagatggagtttcactcttgttgcccaggctggagtgcaatggcaagatcttggctcactgcaacctccgcctcctgggttcaagtgattctcctgcgtcagcctcctgagtagctgggattacagctgcgtgccatcatgtctggctaattgtttttgtatttttagtagagacagggtttcaccatgttggccaggctggtcttgaactcctgacctcagatgatctgcccacctcggcctcccaaagtgctgggattacaggcatgagccaccatgcctggcctttgtttgtccatttttatatcaatagtattttgattacaatgtctttatagtaaatataactattcataagagattccctactcactctgtgtcccgttacaagagtagttgctaggcagtggctcatgcctgtaatcccagcatgttgggaggccgaggtgggaggattacttgagcctgggagttccagaccggtctggacagcatgatgaaactctgtctctacaaaaaatacaaaaattagctgggcacgatggtgcatgcctgtagtcccagctacttgggaggctgaggtgggagtatcacctgagcccaggtaagtcaaggctgcagtgagacatgatcataccactgcactccagcctgagtaacaaagtgagaccctgtctcattaaaaaaaaaaaaaaaaaaaagctgctataattgatactttttttttctttttttcgagacggggtatcgctctgtcacccaggctggagtgcagtggcaagatctcggctcactgcaacctccgcctcctgggttcaagcgattctcctgcctcagccttccgagtagctgagactacaggcatgtgccaccatggccggctaattttcttgtatttttagtagagacggagtttcaccatgttggtcaggctggtctcaaactcctgacctcaaatgatccaccagcctcggccttaattgatagtctttaatattattttggtagtccttgccaaagcaaaaaggaaataagatgtatattttacaaaaggagaaatcatcattatttgccaaagctgtgattgtctgcttaggaaatacaagatagtcgagatattgtttggacgaataagtaggttcaactaggtaaccacatacaagtctagcatccaaaagaacaacagctttcccaggattcaccaggatcccctagtcagaaatatagtgaccacccttttgacagacagaatttaattcaagaacttgattacacaggtgacagatgaataacagaaataggaaccagcaagggaaaaattagagggagcagctgccaccggtaggcctgaagaacaaaaggaagaggccaacttatcacggcaggcattagctccacctggatatttccccgtcacattccctctggtgccatctggtcactgcaatggtcagctccccctgcagagcccctactgcttggggaccacttgggtgggccaggtgttggcgcagagcagtgttccagagctgtggctaagagccacgtgttctcctcaaggtactagttttcttgtttacattcctctataatgtagcgtagccttataaacttggacacgcattcttcctgtgtcttattaaattcaagcactctttttcgtcaggttagacttccatgatatctaaatgagtttccataaaggagaggtaatcacaccacaggaagtttttctcttttttcttttttttgagacagagtctcactttgtcagccaggctggagtgcagtggcgcgatcttggctcactgcaacctcagcctcccgggttccagcgattctcccacctcagcctcctgagtagctgggactacaggcgtgtaccaccatgcctggctaatttttgtatttttagtagagatagggtttcaccatgttggccaggctgtttttttgttttttttttttggtgtgtgtgtgtgtgtgcggcgggagggggcggtttgagacagagtttcattcttgttgcccaggctggagtgcaatggcgcgatgtaggttcactacaacctccgccttccaggttcaaacgattctcctgtctcagcctcccgagtagctgggatcacaggcatgcgccaccacacctggctaattttgtatttttagtagagacggggtttctccatgttggtctggctggtcttgaactcctgacctcaggtgatctgcccgcctccacttcccagagtgctgggattacaggcatgagccaccaagaccggcccttttttttttttctttttttgagacatggtcttgctcttgtcacctaggctggagggcaattgtgtgatctcggctcactgcaacctccgcctcccgggttcaagcaattctcctgcctcagcctcccgagtagctgagactacaggcatgtgccaccacacccagctaatttttgtgtttttagtagagacagggttttatcatgttggccaggctggtctcaaactcttgacctcaagtgatctgcctgcctcagcctcccaaagtgctgggattacaggcgtgagccaccacacccggcctaaactagataatttttttttttttgacacagagtctcgctctattgccgaggctgtagtgcagtggtgtgatctctgcttgctgcaacctccacctcctgggttcaagtgattctcctgcctcagcctcccaagtagctgggattacaggtgtgagccaccacgctcggctaaactagataatttttaaggaacaagtctcttgcctgatgtgtgggtgtgatattatgatatctgtcattggtttccatccacagttcctggcttataactcccatatcccttgttataatgttggggaacttaggcctcagaggcaagactcagacaacagcatctttctctttgaccttttcccaccctcctttttctccccaaggcaggactttcccctgcctttgctgtcttggagatagccataaagaaggctgggcacagtggctcatgcttgtaatcccagcactttgagaggctgaggcaggcggatcacctgaggtcaggagttcgagaccagcctggtcaacgtgatgaaaccccatctctactaaaaatacaaaattagctgggcgtggtggcacatgcctgtaatcccagctactcaggaggctgaggaaggagaattgcttgaatccgggaggcagaggttgcagtgagccgagatcacgccattgcactccagcctgggcaacaagactgaaactccatctcaaaaaacaaaacaaaacaaaacaaaacaaaacagatagccataaagaaatcctctgacctaccttgtctgattgtaagtcatgtggggtccctcagatccccccctgccccctgctatctttctgtgtcctgaccaaaaatcagagggccttggccactctgtgacccagcagctgcaggactgtcccagcaggcttgaacccaaactgggggccttgacatcgctagacactgatcgaggtatctaggtttactcattttttttataaaaagtgtcaagtcctctagtgacagactcagtcctcagtctcatcgcacacctgtgaaccttggccttctgcagtgggaggatgcggtagtgcctggaggtgaagaggcaggttcagctgggcccagcaacttggctgtcccgcacggtcctgcgcacccatgctcttgggatggtggcaccactgtgtcaagcaccggcctgggaaagagcagccatttggtggccccataacaagagccaccgcacagtttggggtgacagggaaggtgtggagaagcgattctaaccagagccatcaagaagaaactagtaaagtcagaggctacagatacaggagggaaatcactgctcagacaacacaaaagacaggtgtaaaagccggggattccccccagagctgccccaagaactctgtgcacaggtcttgcgccctgccaggccacacagggcagaggagcccggcccagaggccgagcccttccggaccaagcccctcccctagggactttcaggctaaaggggtcagaggatgctctgcgttgccgctcagaaaaaagctcctggtgcctttgtcaattcttctcttttccagaataaaagtaacgaaagcaaggtctgcaaactcctggtctcacctgcatcgacccggaaggctcatcctgggaccgcccaggccctcccggactcccctccacaccaggctgtgggctggcccaggacacgttctctaaggtcagcccgcatctcaacacctagtacttgagcagaaaacgtttgctcagtgcccagcggatggtaccccgctatgggtctcctctgccctaggccggccacccctccgggaacgctggtgcccacgatggccacctccgccaggcctccggctcctgccttccgccgccactgtgggttcaggccgcacgcccacacgccgtgcgcaccccggggccctccaaagcaggcggcatcctgcagaaagaaattctctggactttattcccgatgcaggccttggccaaataccaatgacaggccccagagccaggcgggctgaggccaccagcccggtcagctgtaggtgtcagggtccgcgtccgctggcagaaagtagcgctgcagggccggctgcaggagccgcgggggcagcgggcgcgggggcataggccagtccagggggaaaggctgcggctccacacgcggcaacggcagcttcagcgtccggatggggccgtccagggtgcggcccgcacagagccgggacggcatggggcctgggggcgggcggaggcttatgaggcccgggggctggggtgggtggggtccagtctccacccctggctccactcacccctcagtctcatcgcggacctcgcggacctctgcggcttggcctcctgcagccggaggatggggtggtacctggaggcaaagaggagggttcagctggcccagccccacgcttggctgccccacgcaggccccgccggcgcaggccccgcgcaccagtgctcccgcggaggtggcaccaccatgtcgggcaccggcgccaccgtgtagggcactggcgggtgtgggtgcgcagccttctcctggagcgaactccgctgctgcgcccgcagctgctcacagaagaagttgagcgcgtcgatggggcccaagtccagcagctgcgagtgcgaccagtcggtctcctccagcggcggcggctctccgggcagctgagcaggcccggcagggtgcaggcgggcctcgggctccaggcagaagctcttcagcgtctcggagagcactctgagacggagctgaggggtcccccagctgcgcgtgggtgccagcatccgctgggcctggagctccggggctaaagagtgcggctccgcaggtgagaccaccatcaaaggcacctctgagacctgcgagagcctcccgaagatgccggaggccgaccaggaggtgcccgagggtatcacggaggcgcgtgtgggtgccccagagaccactgacgtctgcgatggggtctccttgggaggagaggaaagtgctaaggtcttagagaccttgggcagcaccaccagcaacttggctgcagacagtggctgcgagctttccatctgtcaggaggtgacccatggccaagcaccctggctcctcgagcatccacatggccactgaaactcccttctgcccgatgctcagcccaaggcaggggctgccactcccctgacaaggaggtcccagggctgtccctggttcgggccagacaccccctgctgacttccagctgcacagggaaatccctagagatgctcagggcagggaggctggaggcccaggactgggcaaggcaaggaaggagcctgtggcctcagctggctttgaccccaggacttgcagaaagccagagaaggcaacagggttcccaaggcccccccggcccctgccggcccaacctgaagctcctggatcatgtcctccagtttctggtggcagcaagtgcgcaggccggccttggagtccaggtctgggccctggacccaggtcatcatctccttgaataggaagccctctgggtcctgaaggcccagcccgtgcagcagcttcttgagctctggcctgggacaggtgcatgtggcttgtccagaggccttcccagtggcagggagggctgggcaggagcgcaactcaccggcagtgcacgggagagtagaggaagtaggacatgagctccagcaccacatcccgggactccagggagcaggccaggagcagctgcagcgccagtatcacgaacttcttctgtgtctggtcctgaggcaggcggtggggatgtggttgctgagggccggtgggcggggaggaaaactgggggcaggacaaggggcacacctggaggctggggggctggtccaggttgagcaagtgtacgagcaggccctgcagctggccttggagatcactgctcatgttgggcagcagtctcagtagcacctgcaggatgtgcacacggtcgacccacgtggtcttctccagcagggccaccaacagcgaggccaggccctcgatcgtgcccgcctccgggtatgcctgcagggtagcatgctgaggccctgctcccatgtcacacccaagccagcccctaccttctcccctgtccctcaccctaacccatgcttctcatgcatccccagttccctccaacctgcaggctgaagatggggaacaactttttgaaccaggtctggtagatgaagaaatgcagaaacttgggcagatgcccgtaatgctcatccaagagcaaactcccatgacggtgccagggatgagggtgggtcctggcaaccttgcagctgcgccgccggggctcctgggtccagtccacagcactctaggggagcagcagtggctgcaggtcccacctgtctgggtctcagtgtaagcccgcctcccgtggtggcctggggcctctgcctgagcctctacctgatcctccagttcccaggaatccagctgctggttggagtgcgggctcagggaagccaaggcccagtccagctcctcgtcttccttctcctcctcctcttccttcttgtcttcctccccctcctccccaggcttctcccccatccattggagcagcttcctctgccactgggcttgggatggcctggggcgccacaaccacagggcatcctggcttgcccctggctgcagaggggcaagagatggtgcctgatgggttgcaaggacagcagagccctcccctgccggyaaaacccccagccctgccccttgcctcgagctttctctgggaggcgagctgagtcggggatccgaggctgctgacctccgcatttagccacatctgctgtagcaccgcggagttgggcacatagccggggaagcagatgggcctcaggcagtgctggaggtgggcacagcagggaatgctgaggacctggattcccccagcctggacaccacccttggtcacctgtataacctctcagagcccctcagccgccagtccagctctgcctgccaggcctccgagagctggctgagctagcaacccctactctcaacacagatggcaggagaaccctgagataccaggggcgaggccctcagtgagcatcagctctgacaaacgagaagggaaacctggagaagtgctggcttgtaggggccctgacaccctgcaagctccttacaggacttggccccagccctgggacaagaaagtctaaaagaagcacaggggccagggaggaaggaaggagcttggagaaagggcaatgaagagcatgatggtggcacccaggcccaaagagtcaattacccacstgggcaggtgacagtgccaggaatatgctgggggaggggctgaggcctgcctgggcacctggtgtacgtgagggtgggaagacagtggattctaaagggccaggttcccttgactttgctcctctaaagggcagggattctgatcttccaggaaaagtccctaggggacctgccctcccagcrcctccacgggggaaaggggtgtgtggcataaccggctggggggactggctttgcctgatgtcagctcccagagcagcaaggagcctgtggccacaaacacagctgtactggaacagggctagacagagggtgaagggtgaggggtgaggggtgcgtgggaggctacagcctggccctctggttgtaggtgggcatggcccttgggtcagatttggacacaaagatttgtagcaaaggggagatggcaggcacaagagtgatgcctggagaggagtggctctccaggagctgggagggggtctcaccttgtggggctgcacggtggcaggaaagaagcccctgaggctagagagaggttccttgtcccatctctttggcagcagtgggatctgggggatggaatgggggctcagaacaacacagcccctagcaccccggcagctctgcccctcagtaggtggtaccccacctgcctgggtccctcaccctgcactgcaagtgggaggatggcaggtccagggccatggtcgtcctccctcggagctgctccaactgcagctgcagatccagactgatgcccaggtagtggctcagtgaggagcgggccagaagctggggcataggaggagtcacagggtggcagaggggtcatgggggcccagcaggcatgtgggagggtgggaagcctcacctgggatgccttgctgtgcaccctacggtgggtgggtgggatcggcactgtgactcggggagactgggagaagtgctggcccagggctcccaggtcctgtggggacagggctgttggcactgtttgggctgcagtgctgacctcagcccgggcaagacagtgggcagcttggggtacagcacacacatcccgggtctctctctccactctgagggtcccggcactccactgctgggacccccttccagactgcatgccctgggaggtagcaggagcagacagaccatcagagaccaggtgggaggggtgggtggagaagaggggccagggtcagggctgggctgggggaggccctacacctaccagcaggccagagccgtagatcagacggaggtaattgtcaaagccttcctggcgctgctgccaggagggtgggggctgggctgctgggaccactagccccagcctcaactgctgaaggtctcggtcccgggccactatggcgtccaagtcctgagtcagggttcagggatcagcctgctcttccttgagccttgctatgtgctgcccgggcaaccatggggatcccaggcctgccccagggctgacggctggggcctgagccggggcagggcgggctaaggaggacccaccccacctccttcggcaccaggtgctgagatgttgccctccgacgatggatgagagacaaggcctcgctgcaaacagggacaggcacaggtgggatgctgggtggcatgccagtgggctggggcagaggctgggacaaggaccaaccccaaacgggtgtgccagggctcaggcaggcttgtatcaaytccagagggccccacaccgccaggcccccacccagagtgggaaaggagggcctccaggagggctgagcaggcctscatgggacctgaggctggctgccccatggaggttggtgagcctctgcagttgggcggaagtcagtgactcctggctcatcagtggcagcggagggtcgtccaccaygtctggggccttccggcacatcttctgaataggggaaggagcctgtatccctggctgggggaacctgggtctgccccccaaggtgagcaaggggggcccacyttgctcactctgtcctcaccacacaccttaactaggtaggatgtaggcaggtagagcctgtgggacaccaggcagaggcgggatcccagcgccagcaccaggtctccactgttgctgcagaaagccagggcctgaggggcaccattcagctgcaggagcctggagaggyacccagggcagccgaggctcagcagggacaaggccttctccactcagtccagccagtgggctctggtgaggagcagaggtaggagaccccagccctccccacctcctagcctaccgcaggaggcggttctcagcagtccagatgcgaacggtgcagtccaggctggagcaggcatacagtttgagcgtggggcagcagcacaggcctggcggcagggttcagggtcaggaaccggagctgggcggtggctgggcttcacccatgctgccccctcaccagtgatgtggtccgtggggtcgtcctggggccggtggtctaatcgcggactgtcgcccaggccaaactgcaccaggccgtaggtagcgctgtctgggtcctcaaagcccgcggtgacgcgtctgcctagcgcacagagcgccacggccgggtagcagcaggagaaggtgcgcagcaggctcaggctctcttcggcataggggaagacgcgccacatcttcaccgtcaggtccccacctgtgggcagcggaatctggctgggccttgtcggaggggagggggctctgtggcggcctggcctttggcaggggagctactgacccgaagacacaatgctgttccaggtggatgcgatggcgacaaccgggcccgggctgtgcgcctccgtttggaagacagtcttcgacgagagccactccagcaccgacagcgtgccgtccgtgtgccccaccactggcaggtacctgcgagtgggaagagcctgttggcgcggaccctgccgctccttccgcccgccagaccctcgccggctcccgcacccaccggttcttgttcttccaggcgcaggccacagagctgcagcgcaactcgccccagtgctggcgcacgatctcccaggaggagaaggcgcctccgagatccgtgaggtggctgtacaggtgcagacagcaaggctgcggcgcagggggcggcggcgggcacacgcggtgcagcacgctcatggggcagcgcgccgcgttggcgcggaccaggtgcccagccctggtcagcagccacagcgcctcgcgcggcaggcagtaggccacggctgccgcgcagtcctccggctccagcagcagtgagctcactatgcgcccggtggcmgccgacaggaggtagaccgagccgtcggcgcacgcgcacacgaggcgcgtaggcagcgactggtgcgcaggcgcgggcaacgcgggcgccacctgcacktggagcaccttggcgggcagttgcgccaacggcgagtagagctcgcgtacgcgccacagctgcatgctgctcgcgcacagggacagcaccggccagcccgggcgcaccggcgccagcagacggcccacgcgccgggacagcttgtcctggccccagaagcccagcgctacctcgcccacctgcgccgccgcctgcaggtcccaggtgcgtagcgtcccgtcctgcgaggccgacaacaccagggtcgtgttcgggagcacagtcatagccgtcaccgggcctgtgggaggggtgcaggtcactcggccgactgaaggcaggggagccttcagcctgtgttgcagtcagcgcagcaaggcctggccggagctgcggagatgctggacagcctagagcggctggaggcaaagggccgaggctcggggtgcagagaactcagagcacctgtgtggcccacgaacaccatccggatctgccagtcagcctcccacaccttcacggtgctgtcccgggaagctgtcaccattgcctctacttcctcgcagtaagccaggtccgagatggtgctacaggtggggaatgggagaatcccaatggacttaacatcgccttgtgtgtgagggccgtgtgcccctacatgcctggccctccctagggggatccccctcacgttttgtgcaaatcccggcgcacatctacgagagtccaggcatgcagatcgaaggtgagcacggccgagccataggccgcgaagcagcgcaggacgtggtggggaggaaccggcgccacagccagacgcatgagcctgcctgttgggctcgggggcgggtgcagtgctgaccctcgcagcaccaggcggcgaccacctgarcggaactgccagagcgccaggctgctgttcatctccgcaacgagcagcagcctgaggtcgggaaccggcaggcagcaggtgggcgcccaacccggggccctgcccaccccctgctcgctcagccacagcaggctgaggttgggcctcagaattgccagccccgcggggccccagcctacaaaacggcccacggcacccagcgggcccagcacggtcaccagccccgtaagccsgacaggcgccagcagcgtctcctgtgcccagccgtcttccttgtgcaggtgcaggcggcccgcgccgtccagcaccacgaagcgtccacccaccgggtcctgcgccaccgagcgcagcccggctgccacctccaggcggcgcagtggttccagcccatgcgtcaggcgcgccgcgcgcagctcggctctcttctcctgtgggccggggtgggcgggcccgcaatcaaaggttggggctactccggcctaggggacccctaagggaaggcccagatccggaaagaggccaggaggcgcaggacaggcacaccgcaccttttccacgacttcgtggaggctggtgcgcagaagcagccacagccggcgggcgcgggcgcgcggggtcaggctttgccactgttggctgctggtcaaaaagggcaggacctgcgacggctccgtgaaagtcaactctgcgggcaggaactggaagttctgccacctacagcctcaggtcctcgaccctgacggttatggggagccctcctccaggggccctgccctaccagggactgcccaggggagttttgttccaggggacggaacccaagcccgaatgagacccacttcctagcgggatgcccggagggcgaggccaggccccctcaccattcttttcggtgagcagcccagggtctgggacatcatagccatccgcatcatacaggtccgagtccagaactaggttgtagccttctgcctcccacacctctgcctccatttcagcaactgcggtcccagagcccaacagctcccaggacttagcggtcacggccsgcagcggcagttgctaggataccagatgccgccggccactcccacaccgcaggccccacccccacaccgcatcaggtccacactaagtcacagaaacttttattggaaagaaacgagctgcagcaaagtgacactcagtgcacgcggccaaatgggcgaggtgggggtacaggtgggcaccggggccggcccaagaccagagccggtgactgctggggcctgctcrtggggcctccggccacagaccctttgggctggagtgtgcaggcccagtagaaatacaaaaataaactctgcggtccagctgtccctgctgtggcagttcatttgggcagggcagtcgctcctcccaccaggccccctgctgacaagtccggccacagcatgggcagcaggagtctgaggggtgagtgggcatccacaggatggagccaaaggrctaggcaggtatggccttgggcagtgccaggactgtggcagcgccagggtctggccagcagctggggaggccccaggggcctctcaggtggacaggtccaggcattggttgaagctggatgaagctggggcctcggctcctcctcatcaaatacagatcactgggaccctgggcggaggttggcacacagtgggccttcaggagccaccacttagaccaagtagaggaggcccccaccctgttgtacccactccaggcttcarggacccgggtcatggcccccatcacacacctgtcctcctccatggtgctggtctcctcggccccactgccccygcttctgctttcttcctccacctcytcctcccccagctccatgtccagctcgttgcctgcctctgagggtgtgtaggtggagccactgaggggaggcagggaaaccagtttcaggacccctacccaggcctgctgctggccccagggaggatgttcagggagggcaaagctgggtggagatggcacagctggggaagttgtatcggcccaacagggaggtgggggaggaggcggggggtgcccacctgatggaacggcagctaaagaagacgattcgcttgagccgcttgttgtagaagaagtagttgaaggaccagaggctaccatcctccccgaagggatctgagtccaagtctgggttatagctggggagtatagggtgacaggtggtgtgaggcgccaagtgccccacaaacctggaggcctggaggccatctgcagggatgcyggcccacctgtagatgtcacattcagccaggcagatctcctcgtccaccgcgttccacagctgtggtttcagatccttgaagtcctcccgcacagctgagaacagactgcagttgactgcattcaccacctagggcaggtcacagtcagggtgacaggagcccagggctacccaaagtggggaaggacagtggggtggctgtgggtcccttccctccacctgaccctcacccagctaaggctgggctcccggctgaactcatggctgcgggctgtgctgaagtcatagtcaggcctgaaggactcattgagcgtggcaatcaggtagaagagggtcttgcggctgcacttgtcactgagggggccctcctcctcaccgccttggcttttgctgagtctgcacagacagaaccatcagctgggcccatcacctcccctcaacccccagccccaggtaggccccaccatggctcacctgctggggctcagtcctgaagtctggggtggagaaagtgcctccagcacgtggggctggccctcctggcagaactgcttgaacatgtgtttgtcgtctcctgccatcttacatgagtagctctcaatcctataggatgcagagagaaccatgaagcatgcttcccccaggttccactgaagggcgcggcagtgtgacctccgagatgccagcccccccagcctgccwcacctgccaatgatgtgggcatctccrgtctccacagtcagctgtgagttgatggcttcaaagctcgagttctccaatagcttcatgtctttggggaaggagctccgtgctccagaggggctagtrttgcctggggagtgagagaccagaccatgggtatctatctggccccttggggccctgccttcagccctcctacccactaagtggagccgctaggaacaagctgagtctggcctctgtcyaggctgcacatcaggagctcccctctctgcccggccaggagaggtgacagagatcctgttttacctgagggtggtaagtccaggctccaggtcagccataccccctgcagaacacgcgagttctgggactagactagaccaccggggaccctgctcaccctggggctgctggctgagattgttgctcaacattcccattccccatctccacgcccactccaaaagaagagctccagccaccatgggggtaactcttgagtccgcaacgggacgtgactcctgcagtctccctcaggctggctgggctcctcagccaaggtaagaggctgcatcccggttaggaaccaggacacctgggactccgggccctgcggtcacctgggcgggcgctctttcgttttggctactttctggcccggggagaggaaaactacaggttcctccactctacccggaaaaattgcctagtttctccagacgcctaggagggcggtccctcggccccgctggggcgctgcagtcaccaggcagcgcccgcctgggccacgtcgggcaccagccaagccgcggtggaactacaaatcccaggaggcagcgcgccgcgcgaggcctgctgggggctgtggttccgggtacgcagacggcgcgggacgcagggcggacacccacctgcctggctgggttagatcaggccgcgccgggccgggtctggctgggctggtcgctccgcgtcggtgccggtgcgcaggcgggggcgggctccgcgcagcgcgggctcttcaagatcggagggcggcgccgcggcctccgctcgggccgcactgtatccgggggaagaagctccgcggcgacgtcccgttactcccggccctgccggcccatccgggctgccaccgcgacatagcctcgcccccttccacagagcccgctctcgcgaccgacctgccgccgaccgccacagagcgctccggcgagtcagcgagccgagcgagcgagcgagcgacctccgcctcccccggccggacaacaacaagcgtccgccgggcccggccccgcgcctctgaatggcccgctccagtctccgagatcgagagctcgaatagccatcgggtgccgtacccgccactcagttctgccttctacgtctactggttatggagcctgtctgtcactcttctcgtcgtactaacccgcttacccccggcgttcattggccgtggcctctctagctccgccccctaggggggtcgaccccgtaaccagtgaggcgcgggccaacctagtgcgacgtgtgggcgtggcgggggctggggtctgcgggcgaaggtggtagcccattggaggtcccgggagcgaagtccagctgccgttaggcgctgggatagtcgcacgctggatgcatctacgtccgccgagcccctggggcgaagaggccgcgtccgccttcagttgtggccggtgcttcgccccctgacccttcgcccccaaagaccagctctaacgtgagcgcctcggccgccctgccccagcctcgtacacgccgccagcctcgcccagccggtgtccggagaccctcgggccgtgtccatttgtgggcaaagccagcggggcaggcttggccagagtgcaccactcggcgccgtcccaggcccgacgctctgggcgcgcccggaaccccaggttcgcggcccgtgtttccgaccggcggagggggctcagcggcccgatcccacggaagcgcgctcggaggggtgggacccggccggaccggagatggcgccgccagcgggcggggcggcggcggcggcctcggacttgggctycgccgcagtgctcttggctgtgcacgccgcggtgaggccgctgggcgccgggccagacgccgaggcacagctgcggaggctgcagctgagcgcggaccctgagaggcctgggcgcttccggctggagctgctgggcgcgggacctggggcggtgagtgggrgcggagggcgcgcggtcagtcctcttggcccgggcagggcacggagcccaaagttaggcccctccgcttgccacctgggtgcccttaagcagttatgtttctttgcttctgttttctcgtccgtgaaatgggggtgacgctcggacctactgggacctacctggacctactttacagggctattgtgaggatttgatgataggcgtacagggcttaggaccgtgtaaatggtctataaatgttaccttgtatttctttgytcctcgtgcgatgtagggcggggggacgccctgagcctggactctccctcttctcaggttaatttggagtggcccctggagtcagtttcctacaccatccgaggccccacccagcacgagctacagcctccaccaggagggcctggaaccctcagcctgcacttcctcaaccctcaggaagctcagcggtgggcagtcctagtccgaggtgccaccgtggaaggacagaatggtcagtgccctgtaatggatacaattacaatttggaatagccttggccccccagtcctggttggggaagttggatccaccttccccactgctggatgtctgggaaggcttccaggagggagtaggtggagcctggagtagcttggagtacttggagtggctgctggagtcagtctcctacaccatctgaggccccagccagcacaagttgcagcctccaccaggaagccctggaacctcagcctgcacttccttaaccctcaggaaggatgagaggcaagcatgaagaggcagagcaggcagggtcaggacctgtgtgagaagacatcatcccaagagcagcaggagagtgacaggagtgggagagtgacagactcagatacctcctgcttaagacagagttctgcagtggcaagggttggtgcagatagggttggggagaaggatgtttctagagatgcttagaagatggaattagtggccgggtggggtggctcacgcctgtaattccagcactttgggaggccgaggtgggtgatcacctgatgtcaggagttcgagaccagcctggtcagcaaggtgaaaccctgtctctactaaaaatacaaaaattagccaggcgtggtggcgtgtgcctgtagtcccagctacttggggaggctgaggcaggagaatcacttgaacccggaggcagaggttgcagtgagctgagatcttgccactgcactccagcctgggtgacagagcaagactccatctcaaaaaaaaaaaaaaaaagaagatggaattagctgagtttcatggctgcttgggaggttttttgcagacaaagactccctctctcacccagactggagtgcagtagcgtgaccctaactcactggagccttgaactcctggtctacggtgatcctcctgcttcagcctaagtagctgttattggcatgagccactgcccctggctcacatggctgcttmaatggaagagttagcagttgagactgagaaacatgaaggactaggtagtatggggctcccagatagagggcagcccacaaacgagataagcagagctgccagaggggtaggaagacagccagacagtgatgtaagagagactcaagcaactcagggtttataaaaggagctaagctctctttagtcattcaccaagcatatgtattcagcagctgccctgtcccaggtactcctttggcatgaacaaaacctcccatccccatcctattggagcttgcatttttagaggggaggaggcagacatataaaataagtacagggctgggcaacatacaaaaaatttaaaaattagctgagtgggccgggcacggtggctcacacctgtaatcacagcactttgggaggccgatgtgggcagatcatgaggttaagagatcgagaccatcctggctaacacggtgaaaccctgactctactaaaaaaaaaaaaaaaaaaaaaaattagctgggtgtggtggtggggacctatagtcccagctactcgggaggctgaggcaggagaagggcgtgaacccaggaggtggagcttgcagtgagccgagattgcaccactgcactccagcctgggcaacagagcgagactccatctcacaaaaaaaaaaaaaaaaaaaaaattagctgagtgtagtcgtgtctgcctgtaatcccagctattcgggaggttgagatgggaggatcacttgagcccaggggttctaggctgcagtgagctgtgatcgtgccactgcactccagcctgggtgacagagcgagatcctgtctccaaaaaaaaaaacaaaaataataaaattactgtagagttttttaaaaaagaaagtctgttagatggtgtgggaatgagaatggtggagctgggaggattgctgtttaaaacggtggcaggggccgggcgcggtggctcacgcctrtcatcccagcactttgggaggccgaggtgggcagatcacctgaggtcgggagttcaagaccagtctgaccaacatggagaaatcccgtctctactaaaaatacaaaattagccgggcgtggtggtgcatgcctgtgatcccagctactcaggaggctgaggcaggagaatcgcctgaacccaggaggcggaggttgcggtgagccgagatcacaccactgcactccagcctgggcaacgagtgaaactccgtctcaaaaaaaaaaaaaaagtggtggcagggaaggcctcattgaggtgacactggagtgaaatttgaaggtcatggcatgaaccatgtgaccaaggaagcagcaaacaaaccctgaggtgagcatgtataagtgatccttgaggttcagtgggggccggggccggggccggggccaggaacagcgctgggtgcgtggaaggccctgcttatcctagtagggagatggtagaatatagtgggcctgagaccacgggagctgtgtcagcactggatggggacccccccattgcagtgggctgggcctcacagggcgggtaagaaggtgagtcagcagggtgctcagctctgaagacacccagggcagtggcttgtctggagtgctggcagcccaggtgtgggtcagggagcccggagaggggaggtccccaagggctccaagaggccaccctgactgcagggccactgagggcctgctttggttctgctgtgaggcatccctggctggcagaaagagccaagagaggtggcctagccaggcacaaaagggtttgaaaaggctctaattcccaaatatgaactaagtgcagctccagcactaacagaagtctggcaggggcctctgagggtcttgccagagccaaggctgggagaaggtgtggctagaagtgtggcctgaggcagggccctggcatggactgaggtgagggagaaggcaaaggtcctggaaaaccaagggcctagaggcctggacagaggccacagcacagcacacccatatcttacctctaggcagcaagagcaactcaccaccagccttgggcccagaagcatgccctgtctccctgcccagtcccccggaagcctccacactcaagggccctccacctgaggcagatcttcctaggagccctggaaacttgacggagagaggtacaggtggggggagggggttggggggttcggggatagcagatagtccccagtggtgacagctgtcctttccttaccctgcagaagagctggcagggagcctggcccgggctattgcaggtggagacgagaagggggcagcccaagtggcagccgtcctggcccagcatcgtgtggccctgagtgttcagcttcaggaggcctgcttcccacctggccccatcaggtgaggcctggggctgcttcttcaccttgtcctygtgaccatcccaggtcccccatccatccctgaacccacattctggcacaggctgcaggtcacacttgaagacgctgcctctgccgcatccgccgcgtcctctgcacacgttgccctgcaggtccacccccactgcactgttgcagctctccaggagcaggtgggcacagggtctggggagccctgccaggggcagaggagcctaggtgacatcacctgccctgatgctctggccacaggtgttctcagagctcggtttcccgccagccgtgcaacgctgggtcatcggacggtgcctgtgtgtgcctgagcgcasccttgcctcttacggggttcggcaggatggggacyctgctttcctctacttgctgtcagctcctcgagaagccccaggtcagtcctcgatgggggtggggtgtgggaggtggggtgcagccccacagtcctgagctccaccccctcagccacaggacctagccctcagcacccccagaagatggacggggaacttggacrcttgtttcccccatcattggggctacccccaggcccccagccagctgcctccagcctgcccagtccactccaggtgggcacgggactgggcagggagggccaggacagccatgggcattggaaagagcagggaagcaacaactgtctctcttcccccagcccagctggtcctgtccttcctgcaccttcatcaatgccccagaccgccctggctgtgagatgtgtagcacccagaggccctgcacttgggacccccttgctgcagcttccacctagcagccaccagaggtaccagaggtggcacaggcaggggaggtggggggcagggcagaatccacaggaatgacccagctcctcccccacaggttacaaggggagagtggcccttccctcacaagtccgacatctccaggcccccactgaactccggggacctctactgactgcttgctgggacagtcaccagggttggggggaagggccacaaaatgaaaccattaaagacccttaagagccagcaagcatccctttcatggtgtctctgcagacctgccccatcctagccagcgatacagggagacaggccctcatcagcaggcggggctccccagccagaccccggtgttactgaagaatgggcccggaccctgagcctcagtggtcaggaaagcatggcatggggatctcttcccagaccccagaggcctacagagccccccacccagctgctcaccactgggctgaggctgctggggtgtgccacatactgagctgcagcccccaccactgaccttgtctcctactgtccaccctggtcccccaggcctgcacctctcttgcctgcaggcctattggtaccacctttctcccattcagctcttgccttccttggactatggccaccactcccctcagctcctgcagctaggacaccagcaatgaaaatgggtgttttccttcccttcctagggacgagggaagctcaggagctgagtcctgcaccaggtcactgggccggtgctgggtcatgtctctgtgaccctcctagatagcatccactgtctccctccctcagcagcatgctcctgtgggaacccagctactgccagcttctggccaggacccaccacctagctaccctgtggactgctaggaggggccactccatgacacacatcctgtctgtctacttgactccttcacctggctgggagccatccccttcctcagcccagcccagcaataaatagcccctgccctagaccaggcctttcccctgttaaaatgcagccaaggttccctgctgccatcagaatgggggccaagtggttcaacaccttaacacttggctgttcattccaacaggtccctgggccacatcctgcctggctaggcccttttcagctctgtgctcagacacaccccaccccaccaaatgctgacttcctctaacatgcagttctccgctttctgtcccacacccactgtctggactcccagctaccagtcagtgcagggcattgctggccacactgcatgggacatcctgggagccttgtgaaggcaagggtcttggtatcagagttccttgcaaacctgcactccttccatataataactcaaatatgtacattgagaaaattaatttattcccatgatgggggctgaaggagggcccagagctagagcctggtctcctgcccccttgcctcttcttccagatgaagagaggcttagctgaggcctgaacaggcctgggatggctcttgggcttgagggcctgttctggcaggatggcaagcagacactggacagggtcacttgggcggccgatatgccagcttccgactcttcaggactgaccacttgtgccgctttatggtgtagaccaggggcaccagcagagccatcatcatcaacatctgcagacaaggaaggctcagagaagggagtggggaggagccctgcccagctcccagcccttctctgatacccaccatggcctcccaacccttttaccttgagccccatgcgttttcgatggtcgtgctctggctcagatgcccagcgcaggaaggtgcacacatccttggctatctgggacatggtagctggggtgcctggccaacgacaagcagtgagggctattctcaggctcatgtccaacctgggatcatgccccccctctgtgaagcagacactgcccctacccaaggcatcaaaggggcagtaccctccaccggacatacgcaaaactgaaggagcccaaaagcctcctgagacatgcacagaagacgccccagacaagaagtgggcaggacctcctggacccaggaacacagggaaagcatccctgggggtaggagactggaggcctcttaccatcgtcaaactctaagacatctgtgtagatgggaggggccatggcaatggcctggccaggaaagtaggggttgaagtagagaccttcccgcagtgacaccccggtgggtggctcgcagtagcccgtgagcagggagaagacgtagtcctcaccaccatgcctaggaccagatccatggctccttagttccaagcacaagtcagcccttcccccatctctccagcaccaccccatgggcagcccgtgtacctagctcgcacgatgtagctgaggtcagggggcaatgctccgttgttggcagctcgagcagcctcactgttggggtatggttttgggaaatagtcgaacagcttccctggccgcatgaacatctccccatcttcattggggccgtcttgaacctccacctgccaccgagagcctcatcacaaccctgccatctcaacagtgggagccctgagccctgggtcccaggcatccccagaccccacacctccgcagccagctccttagcttcatcctccgtgtagcacacgcccaccaggtggcggtaggccacgaagtccatgctgtggcaggaggcgcacacctgcttatatacctggaaacccctccggatgctggagggagggaaagggttaggaaagctgaagattccaccttaccagctccacccagaacctcccgctgccagccagccagccagctgcacacctggtgtggtccaaggaagagaggaggccacggtgagaccacggatagctgggggggtgcagctccaggtcactggcactcacagccgaatgcagagccacggccagccccgcaccccctgccgccagcatgcccagcgctgacagcatcactttccggcctcgggaaaggccagacttcgacgacaaggccactgcctgcaagatctccgctcagcgcctgccaggacaccacccagccctacctggggatctgactctcagcgcccacctctccacccagcaatggcctcctcctgcagggcaccagacgcacaccctgtcccactacccaccccatccctctccgccgctgacccctagaccgtgattcgctctcaggagagggtgttcctggatcctgagccggggatcagaccgaagtgaccaagggtgctgggacaggccaaggtcacaagcagctggccgagatcaggctggggtcacttcaggacgcgggcccagtttggacagccagccgcaagagccgtcctgggcgcgccattcgggaaagccccagccccgccacggcagctagcccgtcccgccaacccccacgctggggacgggctctctgccgttcggagaggtgggcgcccagccctgatcccacacgctcaaggtcggcaggcagctgggaccggggacgctgggtggccggtaccgcttccgcgctgaccaggcccgcgcccgnnnnnnnnnnnnnnnnnnnnnnnnnnnnnnnnnnnnnnnnnnnnnnnnnnnnnnnnnncccgggccgcgcgctgcacagcaggaccccgggcacgcgcgcccggggagccccgcgccccgcgggcccaacactaccccgcgaagcgaagccgcagctgccgccatcttggcctcctccgcgcggccgccactcccgtcggcccctggggcgccacgagtagtcaaaacctcgcgaaagccggggagcgcggggcggggccgggctcgggggcggggcctgtcgggtgggcggggacgaagcgcgctggccccggtcgcgtcagtcaggggccggggcaccgcctgactccccacgctcttcgggttgtcgtggaaactggcggtggggcggggccccgtcgcgtctctctgttgccgtgacagcgccacgctccgcccggcgtttcccacgccgcctccgagaccccgacgctccttttctccaccttcccaggctgcgcgatggccgggtggagggtgcccctgcaggctgaggacctccagagaaagggcggcttggagggcagcccggcagagggtgcgggcaggggtctcggccgcaggcagcgcgtgacagcgggaggctgggcccccaggctgagcaccctgttctccttcattcccttgactcatggcccgacgcgtgatgcgcgccttgggtcctagcgctttgggaagctgaggcgggaggatcgcttgagccccggaggtggagactgcggtgagccgagatcgccactgcactccagcctgggcgatatcgagcgagacctcgtctcaaaaaagtaagtaaatatgatcttgttatgtgagaatatttttattttaaaatatttaaaaagtaagcaaaggccgggcgcggtggctcacgctgtaatcccagcactttgggagggtggggcgggcagatcacgaggtcaaaagatggagaccatcctggtcagcatggtgaaaccttgtctctactgaaaatacaaaaattagccaggcgtggtggcgcgcgcctgtagtcccagctactctgggaggctgaggcaggagaatcgcttgaacccgggaggcggaggttgcagtgagtagagatcgtgccactgcactccagcctggatgacagacggaagactccctctcaagaaaaaaaaaaaagcaaataaaatttaaaaactaggctgggtgcggtggctcacgcctgtaatcccagcactttgggaggccccagatcacttgaggtcgtgagtttgagaccagcctgaccaacatggagaaaccctgtgttatatgtaaaatgtttatttagaaacagaacgcttgttccctggtaccataaggaaagatcagcattccgacaaaaagttctctcagcaagtcaattttactttctgcagagagggtgctcctcacagatggaaaaatggtgagagcacacctgaataaaggagagaagctatttttatcccttacacagcttgtccctgctactgtgtcctgtctccattggctagagccagatggcacaatctaaactaaaagtcgactggctaataatttaaaacttttctaaatagataaaggcaagggagaacagaggaaaagaggaagttgcttatgccaaatagggaaggggcacaggctgtgagctggaacgtgcctgtgagcacgtccagcacaaatattttggttaaggtacaaggacatagaatgtactacctgcctgtgagcatgtttaacagctacataagatagagcttaaagaattattagcaaaaccaaacaccacatgttctcactcataggtgggaattgaacaatgagaacacttggacacgggaaggggaacatcacacaccggggcctgttgtggggtgggggagaggggagggatagcattaggagatatacctaatgtaaatgacgagttaatgggtgcagcacaccatggcacatgtatacatctgtaacaaacctgcacattatgcacatgtaccctagaacttaaagtataataaaaaaagaaaagaaaagaattattagcacaaaacaaggaggcttgaaggaagttagtctgtaaaagaaactattatttctaacacttacgatnnnnnnnnnnnnnnnnnnnnnnnnnnnnnnnnnnnnnnnnnnnnnnnnnnnnnnnnnnnnnnnnnnnnnnnnnnnnnnnnnnnnnnnnnnnnnnnnnnnnnnnnnnnnnnnnnnnnnnnnnnnnnnnnnnnnnnnnnnnnnnnnnnnnnnnnnnnnnnnnnnnnnnnnnnnnnnnnnnnnnnnnnnnnnnnnnnnnnnnnnnnnnnnnnnnnnnnnnnnnnnnnnnnnnnnnnnnnnnnnnnnnnnnnnnnnnnnnnnnnnnnnnnnnnnnnnnnnnnnnnnnnnnnnnnnnnnnnnnnnnnnnnnnnnnnnnnnnnnnnnnnnnnnnnnnnnnnnnnnnnnnnnnnnnnnnnnnnnnnnnnnnnnnnnnnnnnnnnnnnnnnnnnnnnnnnnnnnnnnnnnnnnnnnnnnnnnnnnnnnnnnnnnnnnnnnnnnnnnnnnnnnnnnnnnnnnnnnnnnnnnnnnnnnnnnnnnnnnnnnnnnnnnnnnnnnnnnnnnnnnnnnnnnnnnnnnnnnnnnnnnnnnnnnnnnnnnnnnnnnnnnnnnnnnnnnnnnnnnnn

SEQ ID NO: 96886 - DNA, 76289 bp, Homo sapiens
gctatgtaaaacgatgtgtgtaaacaaaagtacaacagattgctataatgtagtgttgtgtaaaatagtgtggtgtattggcagtgccttggccattcattgtataatcttggacaccagtgtacttaatttctctgtagctcagcctcctcatgtaaaatggaaattatgataacacctaattccaaaggttcttatgagaattaaataagttaatttatgcatgaaacatagtggccttttgtaaaggttacctggtattatcgttttcctaacttttggaactgtagaccttggactcaaactatgtgtcccattgagcttcactagccattaatcatgtgactttcacaaagtcacctaatctgagcctcaattttctcatctattgtgagaattaagagggataatgtacttggcacatggcaaacactcaataaatgctaacaggccaggcacggtggctcatgcctgtaacctagcactttgggaggccgaggtgggcagatcacttgaggtcaggagttcgagaccagcctggccaacatggcgaaaccccatctctactaaaaatacaaaaattagccaggagtggtggcgtgcttctgtaatcccagctactcaggaagctgaggcacaaaaatcgcttgaacccagaggcaaaggttgcagtgagtggagatcacgccactgcactgcagcctgggcgatggagcaagaccctgcctcaaaaaaaaaaaaaaaaagctaacagattacattattaggaatattactaatatactgtcatagttttaaagtacaaaaaaggaatagaagatacaaaatttaataattttatgttcttcctaatgtataaattcttccatttttataacatctaatttttgtggatagagttcccagaccctcttccctagatgatgggtcccatgcaccctcagggcactttgaacagctccttcatggcaataattaattaattaggcaggtaggtaatttccggtttatgtctgtcttcctcaggagaatctaagctccaagatgacaaagatggtgtcagatatgcccaatatctagcacaaggcctggcactttgatgattaacaaatatttatggaatggatgaacaagaaatgaaataaacaaaagcattttaacatgtacattctgaaatagtatagtcatgatattaaaagtaagtattatttcctccatctctctgagaagcgaggaagtgcccatcttgtaagctaagaagacagtaaacattcagattctggggagctatttttggcagctcttccttaggagaatcacactgcctgaacctgtccccaggaatcctttcagttacagcagagctctggaaacccagtacttttccagaacctcctattcagtaaaaggaaaagtactcagtctctctagattatcttcacacagtgtacattagcccttactcactgactcatgaaagggtagggagcttaaaactgtcatttcacgaatgaggaaatgagcccagaaaagtagattgattttccaagcctaacatttgttaataatagagctggtgcaattgggaataggctcattcttacagttctctctctttctcaatacatatgtaatacatatatatttgatttatttaaatgacatttatgaatgattttttattacattggggaaaaagcccttgatgtgttaagtagcaggagctgactagaattatgtataatacatatttaattataaaatatgtaactatatggagagcacgtgtgtgtgtgtgtgtgtgtgcatgtatttctccattacttatctatgtagaaaatgtaaaaagtagtataaaaaatgttaacagtgtttatctctagttggtgggtcatggtgtatttttatttatgttcttctgcattaaaatttttgttaataagcatgtaatactttataaccagaaatttcagttttttaattcctgctctaatattttttaaacattttatttccgtcagctctaccagataaaggaagcatcaagctagggtccaaagaagttttaccagtcatttaacctgatctgtaaaatgggtataattatacctacttcccagggctcttgtgtatatggaataataaataagaaattccttcataactttaaagcttgttaaagatgttacgtggtattgtaatgatgataatgttctgtggtctaaaagagctgggaaagcccttaggatagcgggtatctttgtgctgaggagtttaggttgggaagggaaagaagtctaagtgtcaggagagaagtaagcgcttttttgcacttaagaaaaacaatcagctgggcgggtggctcacgcctgtaatcccagcactttgggaggccgaggcaggtggatcacctgaagtcaggagtttgagaccagcctggccaacatggtgaaaccccatctctactaaaaacacaaaaatttgccaggtgtggtggcacactcttgtaatcccagctacttgggaggctgagacaggaggattgcttgaacccaggaggtggaggttgcagtgagccaagatcgcgtcactgcactccggcctgggtgacagagcatgactccgtctcaataaaaaaaaaaaaagaaagaaagaaaggaagaaaaacaatcatatggttgaccccagttctctccttcccttatacttcgaataaatgcctcaatgttccctcataagattaaacctcccttctgtctcttaagtagcccatgcaaaaagcagcttatagtggacaggatctagtgtattctgagacaatggcatgtcacaaatgccacggaaaatgagatttcacacatagggatgattttacactaaacccaggtgccaagggtggtatgtaaaataactcttcctttttaatttattaattatttttagagacaaggtttcatgctgttgcccaggctggagtgcagtgatgcgattatagctcactgcagcttcgaattcctgggctcaagtgatcctcttgctgcagcctcccaagtagatgaaactacaggcatgtgtcgccatgcctggctaattttttttaatttttaattttttagagacagggcctccctacattgttccggctggtctctaactcctggcctcaagagatcctcccacttcagcctaccaagtagttaggattactatattttaaaatgtaatacagacttatgataaatttacccaagagaaataaaaatttatgttctcacaaaaaccatcacacaaatgttcatagccactttattaataattgctaaaaactggaaataacttaaatatcctttattgaatggataaacaaacagtgacacatccatataatggaatgctactcagccatacaaaaggatgaactactgaaaatcacaacaacatagatgaatcgtaaatgcattatgctaacttagtaaaggaagggagaacccaaaaggctacagactgtattctccatttatatgataatccggaaaagaaaactataggggagaacagatcagtagttcccagaggataagacgaagggaggggttgactacatacaataggacggtaagagaatttggggggtggtggtgatggaattactttttattgtgatgtttacatgtatatgcatttgtcaacattcatagaacagtacaccaaaaagtgaattttactatataaagtttaaaaataaatgcataaaaataatatagtcgagtaaattcaaacaatataaggaatttaataagaaagtctccctcccagatcttggtgataatagatctgtattttgagtgcagtgatggtcatatacatccatacatgtgataaaatgatagagaactatatacacacattacaccaatatcaacttcctgcttttgatattgtactataattaagatgtaacccgccaggcacgttggctcatgcctgtaatcccagcactttgcgaggccgaggcaggcggatcacctgaggtcaggagttcgagaccagcctggccaacgtggtgaaaccccgtctctaccaaaaaaaaaaaaaaaaaaaattagccgggcgtgatggcgggcgcctgtaatcccagctactcaggaggctgaggtaggagaatcgcttgaacctggaaagcggaggttgcagtcagccgagatcgcgccattgcacgtcagcctgggtgacaagagcgaaactccgtctcaaaataaataaattaattaaaagatgtaaacggcgggtcgcggtggctcacgcctgtaatcccagcaccctgggaggccgaggcagatggatcatttgaagtcagggattcgagaccagcttggccaacatggtgagaccccatctctactaaaaatataaaaattagctgggcgcggtggcgcacgcctgtaatcccagctactcaggaggctgaggtaggagaatcgcttgaacccgggaggtggaggttgcagtgagccaaaattgtgccactgcactccaccctgggcgacagagcaagactccatctcaaaataaataaataaataaataaatctcatataagtgtgtgtgtgtgtacaaatttatacataaatacttttaacacaaatggtagcatattatacttgctgttctgcaccttactttgtttctacaattactttggagatttttttccgtatcacatatacaacagatccaccgcattattttttattgccgcatagtattccattgcacagtggtttcacttatttcaacagtttcttattgatggacattcggatcttaactaagaattgaacttaaataatccagaaatgtttacaataatgaaaggtcggctggagttgaggctaaaagttttcacatattcaagacttgactccagaatattcttttgaccagaagggggaatgcaagtggcaggagaagcgaaaagctgggaaatttcccgggccaatggggaagcagtggagccggcagggaattactgccgggtaggagttcgcagaggagcaccttacttttggagtaggaggccatgctgcaaacccagacttttcaggctgcatctcagatataccgaagtgtgtacccgctacgcacagtgcggtgatgcctggccacctccagcctccagcggggacctcctgcccaggtggagtctgaatgcccaccgccaccagcccacgcgcgcagtgggcgtacacgtggtgacctgcctgcggctgggttcccagctccggctcctcctccctccagctctcgctcggcttcctgcagtatcacgtgcagctgcgctgggtgcaggatggcggcggccgcggcggcggcagcagcggtgggtgtcaggctccgggactgctgcagccgaggcgctgtgctcctgctcttcttttccctgtctcctcggcccccggccgccgccgcctggctgctgggcctgcggcccgaggacactgctggaggccgcgtgtccctggaggggggcaccctgcgcgccgccgaaggcaccagcttcctcctgcgtgtctatttccagccaggaccgccggccaccgccgcaccggtgccctcaccgaccctcaactcgggggagaatggcaccggcgactgggctccgcggctcgtgttcatcgaggagcccccgggcggtggcggcgtggcccccagcgcggtccccactcgccccccgggaccgcagcgctgcagggagcagagcgactgggcatcggacgtggaagtcctggggcccttgcgtcccgggggcgtggcaggctcggccctggtccaggtgcgagtgcgggagctgcgcaagggcgaagcggagcggggcggcgcgggcggtggcgggaagctcttttcactctgcgcctgggatgggcgcgcgtggcaccaccacggcgccgccggcggcttcctgctgcgcgttcgcccgcggttgtacggcccaggcggggacctgctgccccctgcgtggctgcgggcgctcggggcgctcctgctgctagccttgtcggccctgttcagcggcctgcgcctgagcctgctgtcgctggacccggtggagttacgggtgctgcggaacagcggctcggccgccgagcaggagcaggcgcgccgcgtgcaggccgttcgcggcagggggacccatctgctctgcaccctactcctgggccaagccggagccaacgcggccctggctggctggctgtacacctcgctgccgccgggcttcgggggcaccggggaagactacagcgaagaggggatccacttcccgtggctgccggcgctcgtgtgcaccggcgcggtattcctgggcgccgaaatctgcccctactcagtgtgttcgcggcacgggctggccatcgcctcgcacagcgtgtgcctgacccggcttctgatggcagccgccttccccgtgtgctacccgctgggccgcctgctggactgggcgctgcgccaggagataagcaccttctacacgcgggagaagttgctggagacgttgcgggccgcagacccctacagtgacctggtgaaggaggagctcaacatcatacagggtgccctggagctgcgcaccaaagtkgtggaggaggtgctgacccccctgggagactgcttcatgctgcgctcagacgcggtgctcgacttcgccactgtctccgagatcctgcgcagcggctacactcgcatcccagtgtacgagggtgaccagcggcacaacattgtggacattttatttgtcaaggacttggccttcgtggaccccgacgactgcaccccgctcctcactgtcacccgcttctacaaccggcccctgcattgtgttttcaatgacacccgactggacacggttctggaggagtttaagaagggtgagcagtagtctatcttctcccccaactcctatccccttcaaaggtattatcctttcctaaccacgtgaggctctaggtacccaaagcaatttctctcctatggtactaaaaacccaaggaagactctacctcttggctccctggctattttcatctcacttctgcctcacttcttgctcctgattgagccccaggcctctttcctctctacttgattcacaagatgcaccatattccttatttgttccattctaccaggtttttccaaggcctaccaaatgtcagatactgtgtaggtgggagatagcccttgaaggtcattgcatagctccccacctattacaggagacacctctgcaggttcccatacaagcagcctttgctttaaactcctcccagggccgaaagctcactatttacagagcaaactaattccattgctggacagctccagtggctgacaatgtttcctcatatagagcagaatttgtgtctccaaatccttctacctcttctgccttttgaatcatgtagactaaacccagacaccttagacgttcttccccatacttaatttcccatcaggtattgattgcacacatatcaagtactcaggtccagggccgggcgcggcggctcatgcttctaatcccagcactttgggaagctgaggcgggaggattactcgagcccaggagttcaaagctgcaatgagctgtaatcccaccactgtacaaaagagcaagaccctgtctttgcccgggggggagggaagtactcaggttgggggttaaaagttgactaaggcagtaggatccttgtaagtctgggaactgtggtcctgtgaaataggatagatctggacctgaagaaatattctgggtagaggagatcctagaaaacttgcatacccaaatgagtggggtttccttcagcgcagtcaccatcttccaactctcctccccaaactcaagcttgatgtcatgcttataacatgtttacttcatgtctgagtttgtcttcagaaagtgccttctggtgactacaaattcactcaagaaaaatcagcctggatacattagagtcacccctcttggcattacacagtttgaccgcccccctagttcaccagatttggcccagaacccttgattgttttttaaaatcaaatctactttcaagagtcaacactgagagcattcaaaagactatctcacaaaccctgaaagcaacaccagacatcataatttgaaaacagggacataattagaataagtgtagaacttcccagaatgactcctttgaaggaggcattcatctgatatgagttggaatgtttattaaaaacaaaaaccaaaaaaatcaatcccttgacttcagattcagccttcagatatagcttcctaatggctagcagtactctcatttaactgcattttgtataaattttttgtcaaaaatttaatgtcatgataatttgagcccgaggctgcagtgagctatgactgtgccactgaactctagcctgggtaacagagcaagaccctgtctcaaaaaagaaagaaagagagagagaggaagggaaggagggagggagggagggaagggaaaattcaatctcactactttaacatcataaataatctttagaactttgaatacaaacaaatctggggtctttttcctgccacaatttttgaaatcatattaaatattaaaatgtagcctggaaggggggaaaaaggtctaaaagctactttcagtctcagatttgagagaacagccctagactttgtgttggtatgatgagaagggagagaaatgtatatatggcagctattttagtccattttcggttgctgtctcaccctgttcagtccatctcgccttaatccttgcattcatagttcccactgcaacttgaggttcatctatccactcttagaattatgcttacattttgtatatcttacagaagtagggtcttagatctgggcattgggtggcataaaccacagaaatttatttcctcaaagatctgggggctagcagtccaagatcaaggtgtctggcaggtttggttccttctgaggcgtctctccttggcttgcagtcaccaccttctaactgtgtcctgacatggtatttcctctgtatgcatgcatccctggtgtctccttgtgtgtccaaattttctcttctaacaaggacaccagtcagattggattagagcccaccctaatggcctcattttaactcagtcacctcttaaaactgatagttaagatacagagcagttaagatagtgtctcattrtcatgtgctggcagaagatgttttaaatgaaactcctgtgaactcattcattcatttgtttaggtttgtttgtttgtttgtttgagacagagtttcactctgtcgcccaggctggaatgcagtggygccatcttggctcactacaaactctgtctcctgggttcaagtgattcttctgcctcagcctcccaagtagctgtgattacaggagtgcaccaacacgcctggctaatttttgtatttttagtagagacagggtttcaccatgttggccaagctggtctcgaactcccgacctcaggtgatccacctgccttggcctcccaaagtgctgagattacaggcatgagccactgcacttggcctcatttagtattttttaaacatctatacagttttaggcaacaagggagacaggaagactgtcctcaggaggttagcaatatacagggcataatgagcagtctttcgaagcaggaattgtcatatcaactcttatatccccagcaccttacacactgccttgtaaatagtaagctgttccaaaaagttgatattgatctgaaatgaatccctgtgcagaatttctaaacctggtcgaaaaaagctcctttagtgttctattaatagctactttgtatttaggtrgagcactaaagagaagcaagccattacagagaatactataccaaggaagatatttccacttcctttcatagccttgctacttcctcaaagtaaggtccgtgaaacagcagcatgagtctcacctgggaacttattagaaatgcagaattttatgcctcaccctaaatccactgaatgaaaatctgcattttagcaagctgccaggtggctcctatgtaacattaaagtttgagaagcattgccttcagagaccccttattaacagtgtttggtagatctacttaagatagaatataagacataatgaacaaggtggatgttctcaggctgcaagccatataacatagtggtcattttctttaggagttatacatttgcaccataggttaggaggtgaaagctgggttgaactgctttcctttacctttaaaaataacgtttttggctgggcgcagtggctcacgcctgtaatcccagcattttgggagggcgaggtgggtggatcacctgaggtcaggagttcgtgaccagcttggccaacatggtgaaaccccatctctactaaaaatacaaaaattagccaggtgtggtggcacacacctgtaatcccagctaattgggaggctgagacaggagaattgctgagacaggaggcggaggttgcagtgagctgagatcgcaccactgtactccagcctgggtgacagagmaagactctgtctcaaaataaataaataaataagaaaaaaataatttttaaagctggtctttaatagctcttccattttccttacttccttgcttctcaagtaacgtaaccaccaacaaatcccttcgaaggtagaagaggaaaatgacgatattaataggagccacagttaccattaattgagcaccaacagttcttccaggcaccatgccaggccctttacatactcagaacaaccctcctgggtagatgtcattaactacattttacagatgaagaaactaaagctcggatcaataacatgacttgtacaactttccataactaataactgactgaactgtgatgtgaactacatctgtaggacccgaaagcctgttctttccctgctacacctgtcttattccttcctccatcctggaattcctgccacccacagggttcaaaggtagccttttcacctctgattgctgcccatggctgattcacctccagtttctgcaggttagtaatgtagctttataattacagtaattgctaacatgcatattgcacttgataaaacatttctatataccttctcttgtccaatcttaaacaactctgcagttacaggtgatgatatgggattttatctttttacttcttatgagttgcaagtctttagaagtggggaagaggaaaatggtctttcacactagagtgtgaggtttacaaaagggaacaatatttctcaccactggactgtaagttccttgaggacagagaatgaatcttacttattttgtattctcaggacaagtatagtgaccgccatggctaggggatgtataaccatttattgaataaatggttttaaatacctaacttctatatttctatgtttgagtgaggtgaaccctaagtacggaataattaatgttgttccttgatcccagcaaatctctcctcttcctcttcatgggcctctgtccccagtaagtggcaccacttgtccctttagtctcccagactagaaagctttcctttgcattcacctcatcctattaatcattgtcgtctgcacaggctgtcattagaaaatagcatagactggtgacctaaacaacagaaatttattttctcgcaattcaaggctttgacatccaagatcaaggttttggccaactcagtttctggtgaggacgttcttcctggcttgcatgtgggtgccttctctccatggcctttcctcagtgcctgtccacagacagcaagaggctctggtcctctcttcttagaaagacatcaatcctgttggattagggcccacccttatgccatcatttaatcttaactactatacttccttagaggcctctctgggtgtcgttagggcttcaacatatgaattttgtgggaagacaaacattcagtccataacaatcaccaaagctggccaaataattggatgccaatattgcatccaactgcagtcatgtcattttggtcaatgatggactgcatgtatgatggtgatcccataagattacattggagctggaaaattcctgtcacctagtgatgtcctagcagtcataacacctaacatcgtcctaaggcaacacattacctttactatgtttagatacgcaaatacttacmattgtgttacaattacctacagtatttggcacagtaacatgctctacaggtttgtagcctaggagcaatagattataacatatagcctatgtgtgtagtacactatatcctctaggttttgtgtgactacattctatgatgttcacacaatcatgaaattgcctagcaatgaatttctcagagagtgtctccatagttaagcagtgcatgacgatttcttaaatctgtacataatttaatccactatttgttccacttaggttattcactgattttattcaacaaatagttgtgttggcacagtggagaacatcatcaacatagtccttgtctcyatagagcttcactctaatacaggaaayagaaattaaacraacaggatagtgattaagaacataagatttggccaggcgtggtagctcactcctgtaatccgagcactttgggaggccgagrcaggtggatcatttgaggtcaggagttagagaccagcctggccaacacagtgaaaccccgtctctactaaaaatacaaaaattagccgggcagtaatggtgcacacctgtaattccagttactcaggaggctgaggcagggaggttgcagtaagccaagatcatgccactgaactccagtggcaacagaatgagaccctgtctcaaaaaaagaacataagacttactagaatgcctgggttgatactggccctgggcaaattacttaactgtttatgtctgtttcattagctgtaaaatgaaaataatactaatatttactcataagattgtgtgaaatattaagactatcgcattatgcttacttactacctgtcatgtaagtactaagtagatgttagctatgattattaaatataaacacaagtctattactcatttatgcaaatgcctcctaagaagttacactttttcacatttttgtctccctcaaattcgttctctctagtgccactaaaataatctccagtaatgtcactgcttaaaacccttcagcagctccccgctgcctacgggagagaggctaagctggtaaggcagccagcaatgcactcatgacctgcttcttgccctcccctccagcctcatcgctcaccactccctgccacagctttaccctccagcaatgctgaactctgtggtgcactgtgctattcttgcctttgtccctttattcacattgcacttctgtcaggaatatgctttgcctgactaattcattgccagctctttgacactcagctcaggggcctcctcctctgggagacttctcctgtaaaccccaaaatacaaaaatagattttttggccagcttcattgttttatgtgcatatctcaatcattgaactaacaagctgtactaccagtgtttgtttataagtgcctcccacccatataatgagcatctccagggcaaaactgtcttatctgtctttgtagctccagcagctaacgatgcatatgacacatagtaaattttcaatgaatgtttgtttaaggactgaatggatgacttaaggagttaaactttaatataatggaagagatctgcagagcactagaaaatgaattaaatcattttggactatgcagcagaacaaatcaaacttataagtttgttagtgttagaagaaaagtgttgcatctattgtttctcagcttctttaggtacatctattaatatttattacaacaatttcttttcacatgtaaagcactgtgctaagagttaggggtatgagataaaatctctgttcccaaagagcctaaagcatagtggatgaatagcacttccctttgcaaagctagaaggcaagctggacactcacctttcccatgacttccagtgaccttgaatttacaagtcatgtctcagtatataagtacaggatatgggtaagacagaccttggtacataaagcattaaaatgaaagtgctatactagaaatgcaaaaatgcaatgggaacatggaggatacaataactatgactaggtggcattttttttttttttttttgagatggagtctcactttgtcgcccaggctggagtgcagtggtgtgatctcgcctcccaggttcaagcgattctcctgcctcagcctcccaagtagctgggactacaggcatgtgccaccatgcccggctaaatttttgtattttagtagagacgaggtttcaccgtgttgcccggggtggtctcgaactcctgagctcaggcaatccgccaacctcggcctcccaaagtgctaggattacaggtgtgagccattgcacccagtcatattttgcttttataaattttttactgaagtttatgtttctataatttatacagaaaaaaatttaaatatagaatagtagaaaaaagaagtatgaaaatcatatgaggataatcatcccactatcctgaaatagtaactcaatattttgtcatattaaaaatatattgcacataataacaatcttaatgaaattcttaaaaagaaaacaaaaggaaaagcccattgtcctgccatcaagcacaaatcaaatgtcccattctaatcttaagagtgattttcttatagggtggtatttttgctatagtttcctcagggttgagtgctataatttgggaagactaattttaaaaatggagccgtagagatttatcatacttcttaaatttactactctattattggattgcttttaggagacactgagttctgtatagacaacaggggaaaggaataaagctttgttctgaagtcaaagcttctgagtaatacagcactgactgacatttaactcaattaaacaattcagctttgctgggctagtaacaccatctttgcaaacaaaaaagcacaacccacgtatgctaggctgctccacctgtacactagcatggctgtaacacagcctactgcacaatccatactcagtctttgcttattcattgattcattcagtaaacattttttgaattcctgctttgggccaggcattacactagactctgggaatacagtggtgagctaggcagacattatggagctaaaaatatcctcttccatctttggtcttcctgcaagtggtctgttgcccaaagcaggggtccctaacccccagactgcagaatggtaccagtttgtggcctggtaggaactgggccacacagtggaaggtgagcagtgggcaagcattactgtctgagccccacctcctgtcagatcagctggggcattaggagcgagaaccctattgtgaactgcatatgcaaggaatctaggttrcgtgctccttgtgagaatctaatgcctgatgatctgaggtggaacagttccatccccaaaccatgccccctcccaccctagttcatggaaaaatcatcttccacaaaagctgtccctggtgccagaaaggttggggacctctggcctaaagtattccaaccagccagtaagtgttcctggcccagacacacaatgtgaccttttcactgcagaataatctagtccaaaatgccagtggtttactttacactccaaatgctgaccgtagctatttttgcaggaagaataaccattccattgcttaattctatacctgccaaaacattagtgctatattctttgtcttccataaaagaaaataaattttttcattcacagttacatttcactgttataaatagatgtattacgtttttaaaatgtgttaaatgttgctaaataataattagtaaaatttgtaatgagatgcttactttctaaacaatagagcaaacagtaaaccaagtgtagtccattgtatatagagagaaagaatgaaaggaaatgaaaaagtgagaataatattcaagatgataaacttgtggggtttttttcctttaaacattttcattgtgattgttataatgttgttatgttcatttttttccagcctggcaaaagaaatgccaggtaacaatagaatctgaactggaaggggcactgaaaaaacctgtgagagaatctcattcacacttttttcagatttagttatctttcccgggccataccagccttcactgtcaaacctgtctttttatctaactaaatcccacaggctgcagttaaattccattttttccatttatcatcctttgtgagtattcttttatttgaagaatatcatagctcatctcaattcgattttttagctaccaaatacatttgattgtgtttctcgctcccttaaagcatttgggtgtctccaaggaaggtctgtgggttttcctagtagtactgtcttaaaacgagttccttctaggcccatgtttggggattctgggaccttcaataacagctctaaattctctttttatttgctactgttatattccttttcaaaatgggattctcctcaattcttttctttctttctctctcttccctccttcattccctccctccctccctctctcttctttctttctttctctctctctttccttctttcttttctttctttcttactttctctttctttctttcttttcttttcttttctttctctttctctttctctccttccccgcttccttccttccttcctgcctgcctgcctgcctgcctgcctgcctgcctgtattgaatggccattctctgtcaggcctgtgttaggcactggrgatgcagtgtggacaagacagacaccattcctgccctcctagggcttgcagtcgagtaggcgacaccaagcaataaataattacaaattgtcctaagtgagttgaagaaaaagtatagggagctctgaacatataatagatagacttggtcttataggtaaagagactctcccttgccaagtggtatttgagctgaatcctaaagaacggtgagaaggagttcatcagaggaagagcttcccaggagacaggaacagacatgcaaaggccctgaggaaggagggccagcatgggtgccatgctgggctcctgggctgtgtgacatccaggagggaaagtgccacctctgccagccaccctcctgttttcccccagtgactctcaacatygtctgggcaggtcagttcagtagcatgtactgagtaccagggctcggcagatagacatggatataaatgcagtgctgaacctgccctccaggaacgagaaagaaggaagggccatgatggaaatgatgataagaggcagcctggggtacaggcaagggaatccagaaaacatctgtgggtgaaaagggaagggagaaatagtccctgggtgatctgagaaaacttttctgagaaagtggaatttcagctcagccttaaagaaggagaaggaccctgctaagcaattatgaagggaagagtgttccagctgaggcaggagtttgagctgaaaaagaaaggcagagagggagccgacactgtgtctgaacgctgggaaagccattatcataatgctgcttttcttccagcaaaatggggagctaggcagccgaagatatttgtcaaacataattttgtttccttcaaatgctaaaactgtatattttaaccatttttgatggtgatatttctaaaatgttttatacccattcctgcctttcttaacaaaggattctaaatataacttaatcttttcttgatgacgcaggatcatgatcatgagagtgtagttattttatgctgtattccctattttttacatttttttctgtcctctggctgacagctgttagttctctttgaatctgcctccagcaaatccctgccccaccgttctccacaaaatcactcttcctgtgtatatctcacttacagtttctgtttcactgataaactaagtgaataccatgttgagaatcatgtgcctgatatgtagtatacttcaatcaatacttgttggttaaatgattagttaggttttgactgtaagcctagggtagggagtcaatggagagacctgggacagttctttctgggaccatattcaaaacagtgggaagtcagacctccagataatgggttgttactctgctatttttacagtgttgcttagcaagccaaaccaccaactggcttagattctrgtgacgaacaactattttttcatgccctagtgatgttggttaccatggtgctctggatgacacagttggcttttttataattgccttttagtggctcaagaatttattttgtgataaaggtgttgattatttctgataaaatagagcaggataattactataaagtacagccttttttttaagctagagaaagggacagttttgtttttccaaatcaaggcggttgctgcaggattggtagaataacatttttgtgtttctcttcctgatttggtagggaatgatttcacttgattgtatagttaaaaacaacaacaacaacaacaaaaatctagtatgtgtcaaggtagctgtttctcatctcattccaaaggaggctttcaaatattaagatacaaagattaggagctcagagccctttataaacacaagaggctctaacagcactgttaaaattctggcatatatcattgcaaagaagtatcctgtaaaaccraactgttttgtagcccagaactgtttagacttataaaagcataaaattttagagccagaaatggaaacttggtgatcacctagtcccatctttttttttctttctttctttcttttttttgagatggagtctcacttttgtcgcccaggctggagtgcagtggcacaatctcggctcactgcaacctccacctcccggtttcaagcaattctcctgcctcagcctaagtagctgggattacaggcgcctgccaccactcccagctgatttttgtatttttagtagagatggggtttcaccatgttggccaggctggtctgaaactcctgacctcaggtgatctgctcacctcggcctcccaaagtgctgggattacaggcatgagccaccgtgaccgcccggcaygtcttttatgattgagaaaactgaggcacrgaaaggacaaatactaaaaagagaaatgataatccctcgtagttgcaaaggcgttaygtttatttattggcaaatgttttttaatgaccatataaacaaatatcacagccatataaacaaaatttccagtttagtaattcattgtgtgcccaccataaatgtgaggtcagcagtttttatcctcattttgtatatgcarcaccagagatctaaagacagaagtgtcctgctcaatgttagtgacagaggtggaaccagaactcacatgtctgacttgccacctcagaccatggagccatggacacagacagagggtcccagaggcctgaactcagatcccagcaccttcgttgactagctacgactggggcaggtcactatatcactctgagacttgtcttccttcttttttgttttgttttgtttttttgttttgagatggagtctccctctgtcgcccaggctggagtgccttggcatggtctcggctcactgcaaactctgcctcctgggttcaagcgattctcctgcctcagcctcctgagtagctcggattacagacacccgccaccatgcccagctaatttttgttttgtttttttttcggtagagatggggtttcaccatattggccaggctggtctcgaactcctgacctcaggtgatcagcccgccttggcctcccaaagtgctgggattacaggcataaaccactgtgcccggcctattccccttttaagaagatggaagataggccaggtgtgctggctcacccctgtaatcccagcactttgggaggccaaagtgggcggatcacctgaggtcaggcgttcaagaccagcctgaccaacatggtgaaaccccgtctctacaaaaatataaaaattagctgggcatgatggcgggtgcctgtaatcccaactgctcaggaggctgaggcgggagaatcacttgaacccgggaggtggaggttgcagtgagctgagatcatgccattgcacttcagcctaggcaacagagcgagactccgtctcaaaaaaaaaaaataggtgggggtgggggggaatagtgatactacattgtgagtttactctgaaggctgaagacaattccagtatagccctaaagagactccaccatttgcctcttacctccctgatctagttaaattaattgtatacagttagtcatcttgtataacaagtcctttctctctctgatccagcccatgtaaaactgtatataataagaaaacaaaattgaaagctgtttactttgggtagggcccaggggatgaaaattggaccgtaggaggttccttccatttcttttaycctgttatcagttagaattcagtttcctcccccatcactctgctcttcctcagacatctcaggcaaataaaaaaacctgaccatttaaacaaataacacagcaatataaacaaaactcctcaaagctccaagcagtctactaaaataaaatatcaggctaaacataagaaggcttggatttgaaggcgaagtgtagcaaggaggtggaattgtgactcctttccccttcccagttcaaagccgttctcctcccttgctaatcactagggaggtgccgggcattagctcagcatgccttcctgcagcctccaggcatttacagartatgtgcccattgctcttaacacgtcagagacagtaaacctgagatttggcctggaatgtggagtctgcattgtgttggaaagagcacaaggtcaagaggcagacagacctggggttgttcctggctccatcacatactaatattgtccttggataagtcattttatttttccaagtctcagtttccttatctacatattagtaataacaaccccccttttgcagagatattatgaagaccagaggtaacatatgcacccaatgtacagtaggtattacagaaactactrtggcaaaaactaggaaatggagtctcaggattcagcttggtttacatcaaaaatgatatggagaacactgacgaatctgtaggctgtcttcagctgcaatgaaaaccttcaaaagcgtggattttaagatcatctcaggtatctagcttacttcaaacagtgcccctgagagtccacatatctctcttctcccagggactagcctagcttgaccacactccctggctggcccagaactaagtgatgactaaagttggccctgtttgcctttcaatgtatcctcctcatatctgaggttggtttgtgacctgagaatgacaccatctgccaaagcatagccaaatcactctgggtcaccatggtgatttttaagcaggggattctgggtatggttaggctgaacccagagagagagagtcaaactgaccacccaggcagtctccaagaccagttctgtatctgagaggyctgagcttaatgtatccagacttttctagttgggtcttgaagctttccagaaatcctaaccagggctcaattttggcttcaccatttattggcggagtattcttggaacggttattttatttttgttttcttttatattttttaatttaaaaaaatttttttaagagatgggggtcttaccatgttgcccagggtggtgtcgaactcatggcctcaagcgatcctcccgcttcagcttcccaaagtgctgggattatgagccaccacccttgattctgcattgcctctggaccagctattttatgaacaatacgttttgacatagtagtgggaaagaaggcaaaaaaaataccaaaaaatcataggagcctttaatgcaaggaagaagagttcagaaatgatcctgcttagtcttaaatgatcctcctacatgtgattgagatggggagtaacctcacaaatgcagtatttcggggatcgttaatccggttttagtgtacaagatgtattagggctagaaaaaccaaaaggatgaatggttaggatattggtgcagttgtccaagatgggatgagggcatagaaattaaggacactttgaattagaggaggaaaaaaatctcttagacttcattacrtgtgaacactcctcctcagtctcctttactggttctgcctacatcatatccacagatgtatcttcagcacctggcacagtgcctacccatagcagatgctcaaatatttgtcccatgaatgttgcatttctatgacctctaaatgttacagtgcctcagggctcagaaattgatctcttctctgtctactctcattccctcgattatttcattcattctcccaaacttatcaacatgaactccagacttacatttctaattgccactgaacatctccacttagaagtctaaaatacatctcaaacttaaacctgcccaaaactgagctcctactctttttgccaaacacactccttaagtgatcctcccacctcagcctccttagtagctgggattacaggcgtgagccaccatgcccagctaatatttttaattttttatagaaatgggctttcactatgttgtctaggctgatcttggaactcctgggctcaagcaatcctcctgcctcagcctcccaaagtgctgggattacaggcgtgagccactgcactcggccttatgtctattcttaacacagcagtttagcaaatgaacgcagaaacagaaaaccaaataccgcatgctctcacttatgagtgggagctaaataatgagaacacgtggacacaaagagggcaacagcaggcactggaggagggagaggattagaaaaaaatacctattgggtactatgcttagtacctgggtgatgaaataatctgtataccaaacctctgtgacacgaatttacctagataacaaacctgcacatataccccgaacctaaaataaaagttaaaagaaaaaaaaaacacagcagctagagttccttttaaaatataagtcagccaggcacggtggctcacacctgtaataccagcactttgggaggcggaggcaggtggatcacgaggtcaggagttcaaractaacctggccaagatggtgaaaccccatctctactaaaaatacaaaaaaattagactggcatggtggcaggcacctgtaatcttagctacttgggaggctgaggcagagaatcgcttgaacccgggaggcggaggttgcagtgagccaagatcacaccactgcactccagcctgggggacagagcaagattctgtctcaaaaaacaaaacaaaacaaaaacaaaaacataagtcagatcatgtcacctttttgcaacacacacacacacacacacacaaatgttgcaatggcttgtttttatgtcactgagagtaagacccaaagtccttacaaaggccttcctggctctatcacattggcacctcccctacccctcaactccctgaccttggctcccactactttcctctcccacgttctacagccaccgcattggcctccttgccattccttaagcacatcagttacactcccaatgcatgacctttacaccctgttctactgcagagatctccacagggctccctacctcaccgccttcagggctttattgaaacatcacctcagggagttcatccccgtctcccttccctaaaattgtaacacctgttctctcactcccacacactccctcatcactattccctgcttcgctttccccttagcagtgtgctatatatatttttttatatatatgatgtgtgtgtgtgtgtgtgtgtgtatatatatatattttttttttttgagacaacatctcactgtcacccaggctggtgtgcattggtgcaatcattgctagctgcagactcaaattcctaggctcaaacaatcctcctgcctcagccttccaagcagctgggactacaggcatgcaccaccccacctggctaaattttttaaaattttttgtaaagatgaagttttgattcattgcccaggctggtcacaaacccctgggcccaagcagtcctcctgcctcagcctcccaaagtgttgggataatgggcttaagccacggcgcccagccttatgctatatattttagatatgtatttgctttattatctcttacctctacttacaagagtgtaagctgccggaggaaaatgattttgtgcattgtgctcattgctgcatttcaagtgcctagaagagtgctcggcatgtagcagtcattcagtaagtacttgttaaaagaataaaggaagaagaattgaaagaatgtggggatttttttctaaattgacataaaggaaagataaaagatgactcttgggttatgacttagggtaactagagttaatggtatcatttactgtagtgaagacggaggaagagcaggggcaatgtgtcttgaagattaggagttcctatttgggtaagtgattttgacaagaggacagctcaggcaaaatatctaaaacaggaagggtgttcaaaatagacatcgaggccaggtacagtggctcacacctgtaatcccagcactttgggaggccaaagtgggcagattgcttgaactcaggagtttgaggccagcctgggcaacattgcaaagccccatctctacaaaaacaaacaaacaaacaaacaaataaacaaacaaatagccaggcctgctggcttgagtctgttgtcttagctactcaggaggctgaggtgggaggatcycttgagcctgggaggcggaggttgcagtgagctgagattgcaccactgcactccaacctgggcaacagagtgaggccctgtctcaaaataaaaaaatagaaacctatgttcagatataaatccagttctcagtaaagaggtgattgtgatatttaaattaataggctttgctgggatctttaatcagcaagagagatgagcggaagatcaaagacaggagcagaagttcttaactgcaagtgcccattagaatcacctgaagaagttttaaacattccagtgtcccagcctcatccaagatcaattagatcagaatttctgtgggtgggacacaggcatcagtatgtaactccaacgtgcagccagggtcgagaatcacgagtcggagtctttaagatatatttatctgtaggtgaggattaaaaaaaaggaatccacaatggaaatagaaaagttccaatcataagggtgggaagagaagtagggtagtcttgaccaggatttctgatacccaagtgtgcrtaagaatcacctggagatattgaggaaatgcaaattctgattcagaaagctaagatgagagcctgaatttctgcttccctcacaagctcccaagtgataccatgtttccaatccaaggaccacactttgagtagcacatgtcaagagcagtgtttctcaaactttagtgtgcataagaatcacctggagagctcattaaaacagctatctgggccgggcgcagtggctcacgcccgtaatcccagcactttgggaggctgaggtgggcggatcatgaggtcaggagatcgagaccatcctggctaacacggtgaaaccccgtctctactaaatatacaaaaattagctgggcgtggtggcgtgtgcctgtagtcccagctactcgggaggctgaggcaggagaattgcttgaacccgagaggcagaggttgcagtgagccaggatcacaccattgaactccagcctgagcaacagagtgagactcagtctcaaaasaaaacaaaaaaacacaaaaaacagctatctggaccctgccccacccagcaagatcctgattcygtagggcagggatgggacctcagatcttgcattttgaacaaaggcccaggtagtgttcatgctgctactccaaggaatacatttccrttggtaccaagtgaccaagaccaaggtaagaaagaggagacactcaatgctgtctaccaaatgaataaaagatgctgcaagcacacctggaagaagaacgtagcaaaagccactatattttataaggtgaaggtcacaagtgaggcagaaaccataaaaccataaaacgattttgcttagttctctatttccaagcaatatgctttcctcctagctttttattttatcttgggaacagttaccaaagtgctgtagctatttttgaagaagagaggaagcaaatcaattatttgcctttttgttcccctaaggcatcagaggtatgctaatggagtccttgagagctcttatctatggatgtgcctaaaccatgtagaatagatgaggctatatttattaaagactttggaggctattttagcttcttcagataccaaaatacagttgtgatgttgctgccactgcctttctgtatatttttacatttttttaaatttcaggttccggggtatatgtgcaggatgtgtaggtttgttacataggtaaacgtgtgccatgatggtttgctgcacctatcaacccatcacctaggtattaagcccagcatacattagctatttttcctaatgttctccctcccccaaccccacccccctaataggccagggctttcgacctcaatagtattgatgtttggggccaggtaattctttgcggaggggactgtcctgtgcattgaaggatgtttagcttcatccctgtcttctacccaccaaatgccagtagcattccctgccccaagttgtgacaaccagattgtctccatacatggccaaatgtcccctggggggcaaaatcacctccatttgagaaccactgctttaaaagcaatgcctgaaaacctcatcttctaagaaatctgacttgtagtttgggtatgtcgatacgaggtagtgatgataacaccttaggtagaacactgccagtaaccagtactaggactgccctttggattcttggggcaatggaaaacactaatttgaccttcagtaatgggtaattttactgacctcaaatgtgccaagagcctaataggtaatgtggtatctcaagcatgtctcagaggagattagtacagaagccacaaagagaccctttcccaaacccagcgttgaatagtcaattactactttttgcccactttaccacatatgccacatatgccactttaccacatatgccattaggaagtaaaggtagaaatggtaaacaggtagagaggagaaataatgtgtgttagatacaagcatttgcccagagaaagatgggaatgcttgggatatttgagcgcccactgccccagttggacccagtttaggagttgtaaatattcacaagtcatccctgagagttgatgaggtttctgaaagatgtgaaccaggccaacagctctttgttctcatattttccctctcctgcctgtgataaagccctcatccctgttcaccatttccgcctgcacaaaactcataatacggtgccttctcccctatttcttgtctcccagtggcctcacctgtggcagaccgtttttactctccacacatcctagagcacaaaatgatcatgtgtgctggaagttattacccaagtccaaaccagcattcctctcatttcaacccattctctttacgaagcagtccctacttttactcaacttgtgttgcaggttgtaactttcagccacaccaacttcctgctcattcaggcatggattattatttttttcaattggctttctttttaaaaaataatagcttcattgagataggattcacgtaccataaaactcatccttttaaagtgcacacttaatgcatttttgtatattcagagttgtgcaggcatccctactaatctaattccagaacacttcatcaccccaaaagaaactctgtactcacttagccatgccccacactctcctttccccagcttctggcaaccatgatctacttcttcccctgtagattggtctattctggaaattttacataaatggaatcatacagcatatggccttttgtgtctggcttctctcacttagcataatgctttcaagggtcatccatgttgtagggtgcacttcattccttttgatggcaggttaatatccaattgtattgatataacacattttgtttggaaacatgtacaagtttttgtgtggacatatgttttcatttctctaaaagtagaattgtcgggtcatttgataattttgtgtttaacattttgaggaaccaccagactatttttcaatcccaccagcaatgtctgagaggttcaattttttctgcatcctaaccaacatttgttattatctgtcttttttattattgccatcttgtgggtataaagtatctcattagcatcttgatttgaatttccttcatgatgacaatgttaagcatcttttcatttgcttattaaccaattgtatatcttctttggagaaatatctgttcaaatcttttgctcactttttaattgagttggttttttatgtgttgtaatatttcattatatattctggatataagtcttttatctaatgatttgcaaatattttctcccattctgtgaattgtcttttacctttcttggtggtgtactttgcacagatgtttctaattttggtgaagtccatttgatctatttttttaatttgattgtgttttgggtgtcctaagaaatcaatctctaaggttttctcctatgtttttttctaagagttttatagtttttactcttatatgtaggtgcttgatccatttttagttcacttttatgtatagtatgaggtaggcatccaacttcacttttttgcatgtggatatccagttaccagctactatttgttracttctcaatgttaagcatcttttcatgtgcattgaccaattatttatcttccttggagaaatatctaatcaaatcttttgcccacttttggagttgtcttcttaagagttgtaagattttgatttgtatttccttactgatgatatgccaggtgctattctagattctgaggaaacagaagtaaataggatgtagcatacctgttgcctctcagggagattaccctcacgggtgggggtggggatcacatataaatagaaaacaaccaaggtcaaataatgtgtgtgcaatgcctgacactgtgcctggcccctagagtgtgcatagcaacaggtagcttcaataataataataacagctattattgttattataaatgccaatacagagatgtgtacaaagtgctgtggcaggagggagtgacttgtgcttgtctcaagattggcttcacatagggccacccccagcacctctagggcccaggaagggagtaagggaggtgcaggcatagggctcttcaagaccaacctttcatgagtgtgtgtggtatgtgtgacatggaaacagctggttttcttgtctctgtgagtgtcaactcggaataaggattgtgattgacaattcccatcccagtctgtacttaagaagaaatggcttccttcatttgtgtgtagcagatctcaacaggctttggagggaagctcagaggctgagagtaaattataaaatgtttctaaatagcttacctaggtacattatcttaaatattatataattagggcttaaaatctctattccttggtgataacatagtgtgtcctcaaactgaactttcaaagtgtagagcaatggtggttttttaatgtggaaattatagtactctttgtaaaatatcaaaaactgttaatttaatttcatcatatgaataaattatgttagtggtagggagtatggctgtattatatgtattctagggttcacattaccaaaaaatatccaattataggaagcaattttaagaaatcacttttccaaggcttttcgttacactagttatttgttttgtcatctgctagcacatattagcagaaaagtgagaataggtgccataagttaagaaaaatgtgttagaaaygaaaaactttaaattgagcacattctaacaattaatataatctaatttaagctacaaagtactttggccaaactgggtaggatgtagttgtttccaagaaggataattttagaaccactgatgcaaggtttaaattttaatttaaacatactgttatattttatcaaaaaataaaggctttctttagtatctggttttaatatcacctattgtataaattatgagtttttattcagtcttcagttcatcaggcactgattggctgtctgatatatggagggaactttatttaagtatatgatcctttgtcctaaagtagttcatgatctgaggaggaaatgctgtctagtgtaggacacatacattgctagttacaagaagtagcaatttgtgataaatgctgtaatagagaggttggttcagattcagagtcgggtagatctgggggagctttcttggagagctggtacctgggctagagctcaaagttgggggtaggggagatggcagcagtggggaagagaaatcaaggaaatggtggtaacctggtatgcctgaagtatagaatgagtaggggacgtagcagggcatacagttagacagggaagagccacattgtggaatcttgatgatattacaccaaactaatgagcctggacttgattctgtaagcagtaggtagccatagtgtttttgaggagagttgtaacatgatcagatcagtacagaaggaggctgaaggttaggttgaaggtggggaaaaaattagagaccattcttgggtgatacaaatgccgtctttccgatttcgtttcastttaaaaactccaaggggtagctatcttatgatttcagatatttgatacagaagttcatttacattttaatggttaattatgcctcccactaactgatgactcctcttgactgatattttttagcaatggccaagcaagagtttataaagggtaaaacactgcatgttctcactcataggtgggaattgaacaatgagaacacacggacacaggaaggggaacatcacacactggggcctgttgtggggtggggggaggggggaaggatagcattaggagatatacctaatgttaaatgacgagttactggatgcagcacacaacatggcacatgtatacatatgtaactaacctgcacgttgtgcacatgtaccctaaaacttaaagtataataaaaaaagagtttataaagggtactaataaagcatgaacttgctttttattgttttccataataacatctgaatcagtaccccagattttctccttaaatgtctctgagccaagggaaagaaccaaccagatttttattttagaaaaaggaccaggaaatgtgtctataccgcagaagaaaacaaaccaatatgaagcaggactattagacaaaacttcagtcccaggttagtactgaacttagttacctggtttgcaatccagctttgctcttataggctgtgtaacttcaggcatgctacttaaccaatctgtgcctcagttctgttatctgtaaaatgtggagaatagcacttacctcagtggtttttatgagaattaaatagataaatttagagttctctggcacatagtaagacctgaataaatggaaactattattattcagtcatcgcgcaataaaaatgaagtctatgaaatctctgcctgtgacacattgtagtttatagtcttttcacatattcactaggtcatttgagctccacagtcaccttataggtactgattgttcaaactaccatygctgctaacaaactaccccaaaacttagagccataaaacaacaactattttattatgctcacagattctgtgagtcaggaattcaaaagaagtacagcgggaatggcttatctctgcttcacagtgtctggggccacagctgggagctgcttgaaaggctggggagaggctgggcgaggtggctcatgcctgtaatcccmgcactttgggaggccgaggcaggtggatcatgaggtcgaggcagatggaccatgaggtcaagagatcgagaccatcttggccaacatggtgaaaccccatctctactaaacatacaaaaattagctgggcgtggtggtgctcatctgtggtcccagctactcgggaggctgaggtaggagaatcacttgaacccggaaggcggaggttgcagtgagctgagatcacaccattgcactccagcctggcgacagagagagactccatctcagaaagaaagaaagagagagagagagagaaagagaaagagagaaagaaagaaagaaagacagacagacagacagacagacagacagaaagaaagaaagaaagaaagaaagaaagaaagaaagaaagaaaagaaagaaagaaagaaaagaaaagaaagaaagaaaggagggagggagggaagaaagaaaggctggggagtgagtgagacaaggggctggatcagctgagactggcagatccacttccaagaccacttcttctgcmaaactgcctggcactttggtgggaaacctggaagggtgggctcagctgggactggcacctaagcacctacatgtggcctctccactatggtggcctcagggtagtagtcagacttcttacaatgttcttgcagcaaaagctacatgcctttatgacctggcctcagaagtcctataatgaacattcatttcccattctcttttggttgaagtagtcacaagcccccccagattcaaggggaggggctgtagatcacacctctccgtgggaggcataccacaaaggccatgttttaaaatcaccacactggcattatttcctgattctagatgagagatggtaattcagtggagattaaatgatttgtcaaggaatagtaactgggatagttagtggggaagggggcttaggggaggagaatgacttttaccataattctgmctctaaattcttgctctttcaattagtatatattatatcagctaacatatacttgmtaatatgtaaaagttcaaagaaaaaaaactaactggttttgaatatattcagtaacttccctaaatagaaacacaaatctagaagaataaggtttgcatttataagcccttgcatttataagcgcttgcataaaaacttcatattttaaggaggtccagggatgagtgcaatcctgagattggtcagacagcaactttgtatcatttttctcacaaaaaaagatctctgaaaatgtccccgatacttaactgtgatttcatttgttctctaggaaaatctcacctggccattgtccagcgggtgaataatgagggagaaggggaccctttctatgaggtgatgggcattgtcacgctggaggatatcatagaggagattatcaagtcggagatcctggatgaaactgatctctacagtaagtgcacggccttggctgttctccagggtcatcttattttcctccaagactctcaggtaaagcctcatttgatttatagaaagggtgtcagggcaaaccctgtgccctgatgtgtgtcagccacctatgccaggtgctgctrtggcaagataccctagttggaatcacttctgagtcactgggaacatgctagctaagtgtttatcaggagggaaccttcaggaactgagccaagactatgaaaaggagacctcccagcctttggatagaaacgggactacaggaaacacagtgttcccaggacggtgcccagaggcctctctgcccttgtttctgtcccctgtgttcttgtttggttgcttcatccacctagatgcagaccccaacaggggttccactcacatcagaacatcgcagtgagcagtggagactgtcatgagattgcctactcacagcctaagccaaaaactgaatactccttcttacaaacttccctgtcctcttctgcctttcagcccaccaccctgggtttctgttctctccctgccaccagcatccctgctcttgtctctgcttccttctttctggtctgctgcccctcctaactccctcactcaggaacaatacagacttttctatgcagatgtgagtactttgggttactgaaccttatcaaagctttgcttgcaaacattacaaaggcatgctttgtctttaggattggaatgttatctaagtccatgggagtccctaggctgggaagtgtttcctcctgagaatttcatctcatggaatagccatccttttcttccttgcagataactcgtttcagamtttggtccttagtttgtgagatgcggcctttcagaaactggctcctggtagaaagagctttgataccataaggcagtgagcagtgcagaaagagtgccttccttttagacaaagaagagatcaactctaaaaggtgggccaggccttggcaaagacaagcaagagagtcatggcacctccctccaagagcctgggcactgctgtgcttgcccggaccaggcgtgtcttcctcacatgaggaacgagctcggaaatgtcctctccctcccccacctctgcctgccactcttgatttagaattctcaggtgtagcctgggcaacatggtgaaaccccatctctacaaaaaatacaacagttagccaggcgtggtgacgtgtgcctgtagtcccagctacttgagaggccaaggtgggaggatcacttgagcctgggaggtcctggctgcagtgagtggagattgtgccacagcactccagcatgggagcctgggtgacagggcaagactgtctcaaaaaaaaaaaaaaaaaaaaaaaaaaaaaaaaatcccaggtgtctcagataaactagtgaagccattcacactaaggtgttaggtactgataatagtctaaatgagtaagctcctcccagggcacttgtttgaacaaccttaaggcttccaacacacactattgaaatctaaggagaagggggcgatgagaggaatgatttcctaataatgccatgttaagtggcaatctgatgggggagaggggggctatttaggcaaacttatcatacaaatcagaaagttgctcactagtgagagcgaaagagctgggctaatagcctgtattttgctactcttttgctgagtgatcctctttctacaggagcaggttagggtctttctacctataaatagctgctggcatgattccctaagagctatgaaaaggcccagaagccagggatactgtctttcttcttgcatgaccctgacctcttacgtgatctggacacctgggtctgggtctgcccattgtgacttgagcaaaaggagtgtcaaagcaggggccagatgactgtgaaggcccagagtcagagcgggccatggaagagctgcaccggcaggagggcactttgacccttctagaaggaaacccaaaagcaggccccaaaaggagagggggcacaccagggagccggattctggggccttattttcctgccacaggggttcattccctttcattctcactgcatccactcagcttgcaccagacgttcccccacagccctgtttctctttaggcgaagtttggagaaaacccaaatccctctccctgttccccttagtgcaggtaagatgggctagcagtttcaaaattttactcaaaactcagggaaagcaaaagagaaagaaccaaagaaaacatttcctctaccaaaaaaaaaaaacaaaaaaaaaagcgggggccgggggggaagtagatatatttagacaagctttaaaaagaatgagaacaaattaaattggaaaaagcaaatgtttcaaccaataattacatgcctgatacataggctcttgggaggtaccagaccctgcctgaggcccccatccagaaaacccacctttagagattataggtccaatcttatttcttctcctctcttcttccctatatttcccctgattccctcccagtggagggactggggttgaagcagggaaattgtgaaataagaggtggtggccgccctccttccttgtgtggcatgcttcaggtaccactcagagcatggttcacataagcagcaggagactaggtgaggccagttcagggcaaaggagggggacagagtcagaaattccctgggcccctgcaaccctcttgatactaagaatgcaggtcccttgtgtgtgtatgactttgggtaaaagcattctcacaggtagtttccagttggagtctcataattaattgcacaagatgagtatgagagctatattaaatattattagcctccttgtacagattaaaataaaaactctaatgcttagagagattacatggtaagtaggggaaccagccccagaaccccagacttgggtaccccaagcctgctttcccctttttctactatataccccctaagtgtggaaaacactgaaatgatggcagtctcccattgtctatccctcaccaacatccttctacttcctgggtgatattgtgatgtcacccatagttgacactgcagaaatgttctatctgtcccctgtgattctgggaaaacctccaaagatcaacgtgattctgagatagctgtaatctgtcctctgtgaccccacagctgacaatcggaaaaagcagagggtcccgcaacgggagcggaagcggcatgacttctccttgtttaagctttcggacacrgagatgcgggtgaagatctcaccacagcttctgctagccacacaccgcttcatggccacaggtaggacaagtctccactccagagaagctaaaacagaatctctagggtgggaccyaggcaccaatcgttgttaataccttccagcctgattccagtgtgctgtcaggactgagaagcactgttctaggaaggaggttgccttagacagggtaatggatgccacctactgtcgtattgagccccaggcctgatctcatagaggaagaaatgagtataactcaactcttctaccagagaaaagagctraagaaaccattgctgcacttttccctcttctactcacttcctcgctgaagcccgaggccatctccctgtctgttagacttgcagtgccctagagcagtgccacagaagcctgtgagctatgaatttttaaaatacagaagtgtattgtgaatcttgggatctttagaaagaaaaaaaagtgagaaaatccaaagataaactccttcttgtgaagaagataaagtttgtctttgaaccctctgaccatccatgcctaattaatgtgctgacctagaatgatcatatctatcactaacttcaatatttaattaatccaacatatatttattgagtatgtaatgagtgctagcactgttttaggtgctaaagagtagaaaattttaagttggagctgctttaagatagaatttctagttctgagtacagatttcttttaactacttcccagagcctatgttatataagtaatataagtttaacatatgtaatataagcaatagctgtaatatataaatatgatgcaatgatgcctcacattattgacaacttattatttaaataattgcctgtctttagtaacatgggatttcatttcattcagcagatatatgtcatacaaataagccagattaaattatctgcatttcattcaattatagcattaaagtctttgttgtttatgtggcttagttgtccatgtccaattttaaataaaatcaaagaaaattaataatgaaacagacatttccaaatggagacctgtttctcctgagatgccagtgcagggacacacatctccagaggacgtgggtaaggccctgagatgcacacttgggattaggatcctccactccggaggaactgcagaagccctgccaacctgatgcccaggtacaggcacaggggtcccagttgtgcccactctgactcctcccagctgccactgctggaatgggtgggacacagctgatgctgattcctcccttcccactcactctcctctagaagtggagccctttaagtctctgtacctttcggagaagatcctgctccggctcctgaaacatcccaacgtgatccaggagctgaagtttgatgagaagaacaagaaggccccggaacactacctctaccagcgcaaccgccctgtggactactttgtgctgcttctacaggtgagtaggaaagtcagggaacctctgagagccagaggagggcatctccagggtgaagaaatggccatgcctccgtcagcaccaagttccaagacttggctggctgcctcagcaacaaggccagctgggtggacatttcttcatgacccacaggaggggcctagacatggaagactggtgtcctgggagtgctgggatctttgacatttagtttgacaactcagcgatgtttggggtgggttgaatacctctccaatagaggggttctgcatctaaacttccagaactgctgctctgcggaagctataatacctcctcatctctgcttgaacatcccctgaaatgaaactgcccactgcctcctaaactttagacaactcttctttaaacccttctctctgtcaagtggaaatctcaccatctgtgacttccatactggtccttgctctgctctctggaggtacatgggacacattcattctctcagctgcatttcagcctttgcagttcctgaaatcttctcccccttcagaggaccaggaagggggaaaatgacctgttcaaagaagtgcaacatctccccagtgctcacataagtatgatcaccttctgctctggatacctgaataggcctgtcttaaataagtgtctgacatgattgcagcttgtaacactgctggtgccctgtctggcttcaccattagctctgtcactgattccctgtcccttcccaacataatgttgtgaatcctaaatacactgattgtattttaaaatcttgattaagctcacatgaacttagaaatggtctctttgttactgtccacttccagcctctctgctctgtcactgtaacttgcctcacatatatctttccaaatggtctgaacaaaatgacctctcttctccaaaaaatgtagtcatgtgcttcactgttggaaatcaacaagaatcctgttacattgtttgtataatgtaatgatcacatagtttcatgtcttatgctgaatataaacttaacggttttcaaataaaacatggaataaaatgtagtagcaagagtgtacgctcagaaatttgaaaaatatggctttaaaattccattgttgccatttcctaactaacctkgaccaagttattcaatctctgagcctcaaaattgagttccctgtaaatcagggataaaaatggcataggcttcatggggttgtggggctaattgcatgagaatctatgcagtgcacataatacagtgtcatgtccatgcatgctatgcattacatatcagctatcactattattggcaatgaattaaacaagcttcacacagaattagattttatcttttttttttttttttttttwtgagacagagtctcgctctgtcacccaggctggagtgcagtggcccgatctcagctcactgcaacctctgcctccctggttcaagtgattctcctgcctcagtctcctgagyagctaggactacaggcatgcaccaccacacccagctaatttttgtatgtttagtagagatggggtttcaccatattggccaggctagtctcaaactcctgacttcgtgatccacccaccttggcctcccaaagtgctgggattacaggtgtgagccaccgcactcggcctagattttatcttgacctgacttagaaatggtccaatcttggactaaaccagtggggcagtttatgargccctggattagctggtgcttaggcctgcatcatggaagggccactacagtatgcaaggacagcttggttattcatgactggatgctattttatgaacaacgaagcactgaatttactgcaaagagctattaaagctggtggtgctttctcacatgtaaatctggagagaattaacattcctctgtgataagaacatgggtctagtccacttgttatccaagcagaaatgcttaggattcgagtcaatagtagaactggaagtgctcatacacattcatagtacacttccttttttttttttccagggtaaagtggaggtggaggttggtaaggaaggccttcgctttgaaaatggagcctttacttactatggcgtcccagccatcatgaccactgcttgctcaggtattctagtttccatttgtttattgggaaagtaatgggatatggtagaaaaagcacaggggttcaagtcttgactccccctttgactcttgttaatcagcctggacaagccatttaacttccttggctttagttccttcctctgcaaaatgggtgtatgaatcacttttcattcagttagtgcttaaaaaaaaagtgacaaaaaattgaattgtaamaagcagtaatattgtcaagtgttagggatctagggtggtagatttcagtatgaaaagacaagtttattttgctttttatacttgttccctacccttccatttaattgcctggtttttacagggttaattggtgctgggggtggatagaagagggaagattcccataagaagtgtgttttctgagttgcctctgaaacccactgcatgcttctgtccttagataatgacgtgcggaaggttggaagtctggctggatcttctgtctttcgtatgtatctctcaaaccccttcctcgtcctccccatcgtagtcctgcctcagcccgctctggggacctggaccgagcactttgagcctgggctggggctaagacaaatgctggcagcccctttgtaatgttctgccaggaacactgcttcctgccaggtacccacagaccatgggagcttaggttctgtgtgtctggaatgttttctgctgcttctctgctcacatggttgsggggatgcaggggttgtgagggaaggcactgcttattgccaccttccagtgaatgcaggcaggtgatttgtgtgcttgggcagaggctcagcccttccttctgtgcaataacaattcacccatggcctttactcaaacactgtcatatgctattattgtgtctgtggggtttgtcctcagtaagaagtgactgcaagatttggggatgtaagttccacctttgtgcaatacgttgcttatctgcctctctttcttggttctccacctctcagctagtggagaggtatctgccagctggctgtgcatgctgttggtggggggcaggcacagggctgatggctggtttgctctgccctttctgtgctgtgccttcttgctgttttctgtgtagttattgcacttgtgcttaaagggcatggcattttttgtgattaaaagtgtgatacagaaagaattatttctctagatttctttctgattcacagttctgaattttgcattgctttcagctgttagtgtttacagtgaccacttcaatgccaaatagggtctttcctctcatcataaaaaaagattttacatattgccttgtggtgggaattatcagarggtcccagagcttgatatcatagtccctggaacatggcaaggtagataccattttaacatgagtgaaactaaggaaatgacttgcttcaaatcacccagtaagttggtgaccggccaagatgcttcctggtgtcctggctagttcacacagcacaataaaatacagatttcagatccatcatattctggaatgcaatttctaagtggaaatagtggaacaatttacagtgtaattgttacagtgtaatagcccagccagtggttgaaatgaagtacctgcccagtgtgaagagtggcagaacttgagttggaggagatctgtaaaattgaaaagaccctggtacattattatacttaagacaatgaatctcaatcaaggttgatgaaggaagcattagtgttcagtagaactctggatgggtgagggacgggctacaggactttggcaaaccttagttctctaaaggaaatctccatcatccatcacattagggactactcctgggattctaatatgttacctagaaatgtctgtgatctcttccagaagactaaaagaggtggaaattctgagaaaaaaagacctacatatggcttcctagcccacccaatttatatgaccttctttcttaaaaaaaaaaaaaaagaaattgctgtggccgggcatggtggctctcacctgtaatcccagcactttgggaggccaggacgggtggatcacatggtcaggagatcgagaccatcctggccaacatkgtgaaaccttgtctctactaaaaatacaaaaattagccaggcatggtagcacgtgcctttgatcccagctactagggaggctgaggcaggtgaatcacttgaacttgggaggtggaggttgcagtgagccaagatcatgccaccgtactccagcctggctacagagcaagattccatctcaaaaaaaaaattgttttaagtagaaggaagatgttatctgatttcttcctttccttccttcctgtttctagttctttctttcaaaagctttcagttgcatcagtgagatagaaataaagttgcaacattgatttctcctttaaaactagttaactgaaaagaaacatagcactctttctctttctctccccatgttactgagcatctctgtaaatcttcagaaggaaaaagaaatattattagccaatggggtaaaaagacattttccatcctccccgaacccatacttagtgtagtgaagtgtgaagtaactgcaaaggccagccataccccacagttatcccgggtgaatgctcagcccatggtccagccacccagcatctttcactggccaagaacctcaacctataggttgagggagagcttaagtctaagctaaaaggcaataaaatcttgtagggtcttggcccagccccgtccccctatgcttgaagctagcttaatcagcctttgaggatgaggagtgagattatgagtttgctggaatactggcacgatgacctatgcttcaaagttgaacttgaggctacaaagaagtctctggctttcctgcatgaggtgaagggaacataatctacactgtcttcttcttcttggttctgattgccaggaacccagggtagctggaataggtgcacacacaggtgtgcagatgtggaaagaacaggtctcctgtctgtttggtgtatacaatgtatacagtttggtgtatacatttatacatttagaactatgattcttcttgagaatagagagtttcttaactccattgtgtctcataatattagaggcccattctaatattcattaacatctcatgtcagagcaaaggattatcaggtaggtaatttcaaataaaatcatttgatgtagcaaataaaactgcagaagcagtctatttccatatgctatcatctgcagactggtttcatttagctccttaaaaaggactctgggaatgatcagataagagagatgaagacaggttcccatagttcccctgcccagacaccacttgaagggggaggggctggactgttaatacacactgaactctacccgggccccccagtgatagccagcaccatttcaaactctgtggggaaagagaaggacaatggaacggagagatactttggaccactggtacttaccacaaagtggctttgatttaattcatcaagttgattcacattaacactgctagagatattgttcttcctttatccctatcctctagcaatgcacagttcttcaccaacactgtgagcagagggatctcctaggagtctgaggcaggatctagcttcctcaaggatgcccctagcaggagcacacgctttccattcaggcctctgagtacctgtgcaggtgcccttggcagttgagctccatgggagctgggagagcttggtgggaatgcagcgctgggctcccagcatgtttgctggctcaaaatgggagcctcagagaatgctgcctacatgcttcccacagggctcggcttgtgcttgtacatctgattccaagatgtgttgcacatcttttcagatgaccttcagcaaaatccattttattttcttgtctttctggagtgtgastttgtaagaggatgtgattcctgtgttttcagagtcaagattcctttttgcagagaaatgtgatgttgtgaagatccaggaacagactgtctcacccactttgttctttgtctctttccttttgtgtttatatcttccctttcgcaactcacaaatccttggcccctgactctttagtgcctgtctctgtgtctcgtaccttcgctgtcagcagaggggactctctggcaggctccccaggtaaacatgcatgggtgtctcgggtctctgtagatccagaggggtttgcaagaagcctttggcctctgtcactttcctgcatgagaactaatcactccaacaggcactcctgtgactaaggcatagcactttgcacaaatagcactcatttgcacataccacccaggcattgctggttcagtggtgtcatttgtgagtttacctcccaggaatgtatctgtgtatgcacatggaaaaatggtgggggtgagggatagtgtgagtttttcctcatttgtctgactacagaatggagggatgaggagtacagcatgaatgaagtaggaatagtggaatactgtgctttatttctacctattttctttctacctttctttccttccatgtcctcatcttcctaataatgttactatgtgatgatcatatgctcactagctctgctcgtacaaaggatgctatatgtaaaactttcaaaacaacttttcattaggtttaacctcttttgttgataaatgaaatagtcactgggtttctttttaatcgggtaacaattcctcatagagctagacaatgattcaatgactgagtagaatgccacaaatctgaaygatcaaccrtttgttttcatctccagtggttgttctcttgggctcatagagcaagtaatgactaaaccaggaatgtatttgttaaattgccctgcagttagaacacagtccaatttcctctaccctctaaatctgtatcccttatcacgttgctggggtaatgatactaagaccccaccatatcctcagtcatcgagaaatcgcttatgtttctctgtctatatagtagaccctcaacatttaaaaaaggycatgttttgagacttcaaaccctccaatttgcaacctcagaagtatttatgttgacttctgttttttcccaaaatcactttttttcatcaaaaaccatctggtcctcatgttgatctatacaagataagttaaccaccttctcaaatttcaccaaagttttctctctctctctcgatggtgattttccactaagaaatagtttttcttgctttgtgagagctcatgccttcataatgactacaggatcggacagtcaatgtgaaatgccaatctggtgccctcaccagctaaatggtctactcctacatgcccgcaaaattagaaatgaccacttgatggaccttcaagttccttcacatgcagtgaatcttggtgaatgccaagagtgtgctgtgaaggttcagaggaaaggggagatgcacattttaaaagactttcagcccaaaagatcaaagcgaggatgtgttttcctttttaattaaccttcagttaaccagatgacctagttaattgtaacttcccagttaaaggaaggttaattctagttcatctgtattgattattataaagtccatgataacccaatgtcagacagagatgaaagtgattccctcctgctgtgcagaacccccaggaagtgctgagacttctgatccaactctgggtggtgtcatgtgcccctgagagtattttcaactttccccccttttccatgactgtggatattcaacacaacaggagattagtgtcaacacaatggaaaccctacccataaagaggtaagcttattcccacccttggtttaactctgcagggtggagcaatggtgggtacagtgggagaaaaccagaggtagggaatgcctmgtttctcctttggcttattcctctccaccttgtgtctggtctctatctagagctaatcactgtgccttcccagtgatcagctgacatccacaggacctattctgtggtatttcctctgtcactcttgcttttgttccawatcattaaaagaagtagcctcagaggtctgggatttttgtagaaagaagttccaggtaacttctggccctgtaagcacagactttggaaccaagggctcttattcagtgctcgatcgtccattcatagtgtgcattgagatcaacaatgatgccattttctcctagaatataccaaagtacctaaaaattttttttactttgcaaaatgtgctaagtggaaatattgatttctgatccagatacattaatttacatatatgctaaatctcaaccgtatcttatatgggaggaaaataaatcctagagattagtagggtcttgaagtctaagaaagwattgtcattgtctgatttgactccccacaatcactttgggagataggcaggaatagtcattgaaaaacaacagattaaaaaacaggttctgagaaagtcagtcagtgttgtatgtgtattaggtaggcagagggacaaggactggaatctaagtcttagatcctgctctccacctactgcctgggaccttgctgtacctctgaatatagacattttrtgccccctagagggctgtgatttatttgcattttgaaagcagtgctaattacgaatctggtgctcgcactagattgaggctaggggtctctgcaccaaatattgccatcattatccatagggagtctctttctatttgagccttagtttgaaataagaacacagtggttcacagattacctccaggttgtggtgtggttaaccaacttggcaggtgctttcatttaaaaatgaaacttctgatcaggggtttcccctgaaagtacacagccccactgcaattagcattccctttccccatattcactccttctttcttctcctggtggtggagataattttgaattccccataacagtcctttcaaatccacaaaagcacagagacagagactttggaaccaacggttctttttcagtgctcggttatctattcataatgtgcactgagatcaataatgacagttttctgcttgaatatacagggaatctctaaaaataatatttctactttgcaaaatgtggtaagtggaaatattccttcgggttggctcttgtgtgatgaacatttgggaaccattaaagctccgtgtaaagtgaatgagttcatctgggatcctaacttgggcttagagttcacatcgtagttttgacagacagctggctttggtgttcggttgtctgatgctaaatattgccccagtataatgaattttaataattctagttggtactcttacaggtctatgtaattaagcttcctcatccattttggagaacagagatggcccacggcacaatcacagtcagaccaaagtaggccattccccctcatccctcactgatggtacaaaagatgtaggcaggcaacccctgaaccctcctttttcctcaaatcctcatagggaaaatgggagcttagcattctacttctgtatcttggggtctgattccaggatagggttgtgaaggctccctggatacaggtgtcacaaatgaagcaagagtcccagagctgctgtgtatagattttcagggcccctgactattactacagaaggagaggagattccatccagccccgattacagtgtgaagtcctcttccataccctttgccaccctgcccccaattttaccctagtgccttccccacccaaacctcagcaatccaagtagccaacccaggacagatatctgttagagactgaccactcaaaggctgcaggaatgaggtctgccacaatttcacagagcagaaaaccctgctccccatcacccggttacacctgagccaacctgagggtctgatgcaagagcaagagtgggcaagggatgggttggttgcttggcctgctgcctgctgacaggtcccgggttggtgtcacatatcatactgtttgatctgtctccttccagacctccttgcmttatacttaggattttcctcctcgcttcactcccccaagctgtgcctctgtgctcttaggatatgccaaggggaattacacaacttgaactagtttgccatgctgctaagacactcgtctgttactgatttcttctgctttttattaaaagcatttccatgtcccttgctcagaaacctctgagtgtatatgcataattaccaaaatgccaagtcatcagcatccaacctactaaggaatgtcagactccaggacacgaaaacattgatcttgcgcaatactcagaggggccgggactttctcacggagtaaaggttcttttttcttttaaaaattgcttttatagactcgatctttgtaagacaattgtatcgtttggtgttgggaatcctttatgattttataaataaactttcaataacattgtttttactttaaaaaaaaagacatgtttttcctcctcccagcacaatagtgatgtagcttgtgtttgacatgtgagtccttgtgggtgtcatctacactgggtgccagtgaaatgatgagagctttggagggaactgggatgtagctgttgcctctgttttcaacaggagaagcttccacggatggaaggagtttagtagataaaatagggctatttccctgttgtcttccctgaacatatcttgaattgtgacataagagatgaggatgtggaacaactggtgtagggtgtgtgaagcccatgtctggccaggcaaagtggaggattattgaggaatggtggtgattctctgggcagctgaagccacaagccctgctcacactctcttcccttggttatgtccaaactgagttgaggtcaaaacccaccagatcaaggtatggttttccagatgctgcactggggccaaagaagctacttttgggcaggactctctgccccgcttttctgcaacaactagcctggaggaaagaacacagacttatccagccaccaccctaaaacagctacaaatgggtctggccaagccagaactcatcaatttgctttctcttttcttctttttttaatagatttagggggtacaagtgcatttttgttacatagatatattacatagtggtgaagtctgagcttttagtgtggccatcacccaaatagtatacattgtactcattaagtaatttctatccctcaccctctcctgcccttctgggtcttcaatgtgtattatttcccatgtccacttgtacatattatttagctcccacttacaagggaaataatgcagtctttgactttctgtgttatttcacttaagataatggcctctatttccatccatgttgctgcaaaagacatgatttcattctttttgtggctgaataatatttcattgtgtatacacacatacacacacacacatatacaaaatcacattttctttatccagtcatccattgatggacacttgggttgattctgtatctttgctattgtgaatagtgctgcaagaaacatacacgtacaggtatcttttttacataatttcttttcctttgggtagatacccagttgtgggatttctggcttgaatggtagttatatttttaagaactcatcagtttgttttcaaggaatgaggcccagaagtgaaatgtacctttttctgcccaactcttctgctttttacaattaattaccttggtgcttcatgttgttctctacaktaccatcactgtccctgtccccgtcagttcttagtcactctggagaagggtctggtccttcatcacacagtggatgggtagggccctgggcatctgacttcaggaccccttgtttcacatgcccttattaaacaaacagtcttgctgctccatgtggcctcttcctcaagttactgggtcaaggcctgaggcttcttgatgccctttgattctagttgcacactattttactctatccagccacatttctggagtgtcttgctccccacccttacttcttggggaagtcagcttccccagaatgactttaggtttgtgatgatttaagagctttagtgactttaagagctttagtttgatgatttaagagctttaatgactttagctttgtgatgatttaagagctctgaaacctttttataaaacaaatttagattataaactttaagagtcattgtatcgccctgtgggaccctgacgtgctgactcatttattctacatgttttccttgagtaccttctctaggccaggcactgtgccaggtgctgggtgtacaatgaggataaccagagaagacaaggtctctgccctcatggaattaaaagttgaattaagtagatgtaacaagtagttactaatatgtaattaatacttgtgaaagtgctttgaaaggatggacagggagtcatgatagaggagaacaggaggaatcttcctaggtgaccagacaaggtcttcagagaaggtggtgcctcagctgagaactagtgactgaggagcagacagccattagctgaggcgggaggaggtggggtggggaagggaaatggcattcatcgaggtggggaaagcctgcttagttaaggatgcccagggaggccagtggctaaagcaaagcaagagaggggaaaggaggtcccaagatcagatcagataggaaagcaggggccaggtcacagcaaggaatttggattttattcagacaaaacaggaagctgatttgtgttttaaaaatgtgattctggcagctgaggtgaaaacagattataagattctaagtggggagactgtggtccaggtgaggctgaggtagctgggatttgagtggagacagagataggaccgatgggctcattatgtcagatggatcgcaaggctgcatgtggggctgagggagcggcaggagtcaaggacaatcctggggtttctggtttcaggaactgcatataagtggatgacacttactgagaagggggaagactggaagtggactccttaattccataatcagatcaaggcagtgatgattatggttctaatgagaaaatgattcaacctattattttactctttctgctacatggtttgccagacaacagcttggcagctaaatagatcatcaaccttccatgactcattctaaatagaggctaatcaaatattttgctttatctcaagagacaggattaaattcccaaggttctaccctgaaagagcagaatctataaagaatctgatttttcatttgaggcccctgagctaaatctgtgttaagagaagctgacagcctcctcatccccttttttggaagaagcagaaggattgggggagctttgcagtctatcacttggggtggttccacggttgagatgatgtttggagtcaccttcggtatcctgttttctgttgttcctggagagggcagctcacataaaaccaagtgacatggtcttaattgaacttttccaagaagtatttctttaaaatgtgaaaagaacctggctaagcattcaggagatctttgacagaaggcctgcagatgatcccagtgcccccctcaggcctatgcaagacggggcccagccctagacccacactttggcccttctcagtctagtccatctatatggggcaaagagttctcagggccaaagggatgtgctgagccagagcctgtgtcctcccttctaaaccacatttcaatatccagaatcctggaatccccacccaaacaatcctaagggaccaggggtccagaagccctagggccagtgctggctatccacccacagctctgttttctggcatggttgctatgaacatttgtcaaggaagaggataaagcctatttttaccgtttatcaatgtgacttctaacttaaaaatatttatccttttggtttgtgggcttccgtttgtctcaggccctgccaatgtgggggcaggcctgaatgcttcccactaaaatgtatggccacatgaggattggttgtctgtgctgtgacagatggttttgagggcaaacccaaggccttggcctttctaaaataaggtttgtgattggagttgatgtaaaatacctcaccatggtagaggggcgcatggtctagggtagcaagccatgcttgtagtactgccctcatctcgttcggggtccttgtgcacctaacctgaagacaagaaccaaggaagatgtgaaccacccgtcccccctgtctggggaaaatagatgctccagctcctcactgggagaggttgtggggagcagctgagtggaagggagccatgagtttgtcttaggtatttgttcctcttaggaataaacatcaacaaagcagctcagctccttccccgggctctgatgggaagggtgaggcccatcaccaccacccagtgttaccatcgcctgaaagtcttatgggacctcagtaaacaacacctgtctctccctccttccctgtctccctccctcccccttcttcctccccacccatccctccttgtcttttctccatctctcaccatctgcagtaaaccggtccccttctcgctgcagtgggttgaatcgctctgagtctccaaaccgagagcgcagtgactttgggggcagcaacacccagctgtacagcagcagcaacaacctctacatgcctgactactcagtccacatcctcagcgatgtgcagtttgtgaaggtaactcccccaggaaggttatcctctccctcccagtgggcagtgttggctggctgagcgggacaagaagactacccccattcctagragggatgtgtgcaccattcccctgtgttccaatacagtgctgggtggtaactgctactggctgtataaaggctgttttcagtaagctttaggacggttcattatttgtcactcttttaacatctcctgacccccttttttcatgtggggaaatgaggcacaaagcaatagattagcttgcctgacacaaattgctgccagaaccatttcctttgcatcccctaccattggcatcagtttgattttattcattggtttttctaagataagatttttctaagataagtttgcaggtgattaataaacaaagtgatgtgtagaagaaaccatgctatacatctgcctgtctgttggttaaaaagaagaaaccatgctatacttttacatgtgataatataattttataccttaaagtctaaaacacaacttgacctgtgtgttaactgaaaatcttttgtagtcactagtaagaccccttgaaaattactaagctatttgaagagaaccatgtgcaattgcccaggagagaggtagcaaaaggctcatggcctcataattaaagaggaggggagctatttcctcatacccctcactgggattggcattgcacaggagcctttaacattttcccctttcctcttgtttccataggttcttttttttttttttttttttgagacagaatctcgctctgttgcccaggctggagtgcagtggcgtgatctcggctcactgcaacctccatctcccaggttcaagcaattctcctgcctcagcctcccgagtagctgggactacaggcacgtgccaccacgtccagctaacttttgtgtttttagtagagacggggtttcaccatgttggtcaggttggtctctatctcttcacttcatgatccacctgcctcggcctcccaaagtgctgggattacaggcgtgagccaccgcgcccagcctgttttgtttcctagtattctgcaaaccatgacaaactttgtcctgagatctagctagagccccatttatcccaggccascagaacacccagtgggttcacttggtagctgttgcacagttgcaggctgggtcatgagaggtgcactgaaatcaccagggtggaagaaggtccttctttccagaacgcacgccttcattatttggagaggggtgtgtgctggccggttttctgtgtttcaggactttgtggacagccctgagttaaaactgacatcagcctataaaagtaaccttgaaaagtaaccatggaatgttgccagagggagggatggaacctgggggatggggtgagacaataactatttttttgcagtaaactgtgcaaggcactttactgagtcctttgtttgaattatccatttaatctcacagccaccctatgaggtaggtattgctgtcattcccattttctagatgaagagttcaggtttgaggagtatagggtcacatggctagtaaatggcacagccaagcttcaaagttgggtctttctgcctccagaatccaagccctgaagtcagtgggctttagagtgagcggcaggacatcagagctaaaggaaccccagggaagtgcctttacgagctgaccgagcaatgctcatgggtgcatatgactgcggacacttaagtctaatgtgacaaggaggttaaaccttagaaaatcatagcccacgattctgctcctcatagcttccagaagccttctcattgctaatgcagaccttccccagaaggggaagtagggaaaaagtgggaaaagaggaactctaatatgttaagtctggttggttttcgtgttggacatgtgatctgtgrggaaagaaatggaaaatcatagtatgactacatgattcaacaaatatttaatggrggcctgctctgttcttggcactgttgagatactgtggtgaagacagcaagctgctgcccttcgggagctcacaggctaatgagggagaaagacaacaaccacatacataacctaggtaatttcgggtcgtaataataagggctgtgaaggaaataaagaggtaattgggatcagtgattgggcagagaaggcaaggagactgctcttgaaatggttatcagacaggccgagaaaggacatttttgctgagacttgaaaggggagggggtgaatgttcaagatggaaacaacagaggctggaaggagcttgtagtttaagggtctgagtgccggcccatggtgtgcaaaggcagaggctccatgagaatgtagcatcacaggtggtatcacctggtatctttaggccatagtaaggaatttggattctattttaagtgtggcgggatttttttttttttttttgtagagacaggattctcactatgtttcccagactggtctcaaactctcagcctccagcgatcctcccacctcagcctcccaaagtgatgtgattacaggcatgagccacggcactcagccagaatttttaagtttgtttctcttttcatttatattagtcagttttggccactgtaacaaattaccatagactgtgtggcttaaacaacagatatttatttctcaccattctggaggttgggaagtccaatatcaaggtgccagcagatccagcatctgatgaaggctcactacctagtttgcagattacctctcattgtattctcacatggtggagagcaaagaaaggaagtaaactctctcttttttttttttttttttttgagacagggtctcactgggttgactaggctggtcttaaactcctggcctcaagtgatcctcttgcctcggcctcccaaagtgctgacaagctctcgtcttctaagggcactaatcccattcatgaggaattcacccttatatcctaatcacctgccaaaggccccacctgttaataccactacattggggttaggatttcaacatatgaatattgaggggacacaaacattcagtccataaccattcatatcagaagttgagaaaatcagtatgaagatttggtttgctgcttggagtagaaaagtgaaggagattttgaagagtcatgttcaatgggcaaaacatcattaggctttacagattggacagtactttcaggagatggatttggcaactcctcagaggaatgtgctaagatgatcacctagcattaggtttgtaaggattttcttaaaacttgccgatgggctgggtgcggtggctcacacctgtaatcccagcactttgggaggccaagatgggtgkatcacctgaggtcaggagtttgtgaccagcctggacaacatggcgaaaccccgtttctactaaaaatacaaaaattagccaggcatggtggcaggcatctgtaatcccagctactcgggaggctgaggcaggaaaatcacttgaacctgggaggyggaggtggcagtgaactgagatcgtgccactgcactccagcctgggtgacagagggagactcggcctcaaaaaaaaaaaagaaaaaacaaaacaaaacttgccaatgatctcatatctccaaccctagaacataaggaaagggaacattctacaaatcacaaggaacataaaagtctgtttcccaacatgagatagtttcagtgttgaaaaccccaagtcccaggtcagttctcgggtgtaggtgtctgtcctttttgtccaaacagaagactttgctgcaatcagtgcagctgagcagcacaaaatttgatttttctttccacctggatattttgaaatcaagaagactaaatgtcagaagtagagaagttgagaagaaggtggaaaccaattaagtgttattcaaccaggtgcagcagctcacgcctgtaatcccagcactttgggaggctgaggtgggcagatcacctgaggtcaggagtttcagaccagcctggccaacgtggtgaaaccctgtctctactaaaaatacaagaaaaattagccaggcmtggtggtgggcatctgtaatcccagctattcaggaggctgaggcaggagaatcgcttcaacccaggacacggaggttgtagtgagccgaggccattgcactccacctgagcggcaagagtgagactctgtcttcaaaaaaaaaaaaaaaggaaaaaaaagagtgttattcaaaaacctctttaggccaggcgcggtggctcacacctgtaatcccagcactttgggaggctgaggcaggcagatcacttgaggtcaggagttcaagaccactctggccaacatggcgaaaccccatctctactaaaaatamaaaaattacccagtcatggtggcaggcacctgtaatcccagctactcgggaggctgaggcaggagaattgcttgaacccaggaggcggaggttgcggtgagccgagatcggcgccactgcactccagcctgggcgacaagagcgaaactccgtctcaaaaaaaaaaaccaaaaaacaaaaaaaaaactttgattaaaatgggtagttctccaaaaaggaattctgtgagttcaagctcttttttttaacacaagtgtcttttttgttttgattttctcttttcttttttttttaatataagattctgccttagattaactttgaaaattacctcctcctgattgattagactgtgttagggacgttatttaggccactcatttatctasttccctcacctgtctctccccatctttccttctgttgttattgtgttttttaacatgagggttttgggggaagctaaagagaagactgcaagatgagtgttttcacagggcgaagcccctgtggttggctgctggaaggtttctcaagggctttttatatccaacagactgaaggtccagaattaagtccaggagtaattgaacttcaagataagttacaaaatgagatagaaaggtgcatctaatagttatctgggaaaggtgttaaacaaagccatgattaatggtagttaataagttatgaaggtaccaaagaattcttatgaagtaagttttttgaaatgtgttctgtgtcatcattaagctaagactacttggcagatgtcttacagtctggactacgtaaccttgaccaagattcctcatcaccctagattgcagcattgtgtcttcagggatgaataaaccacttgaaagtgaaaacaacatcataccatgataggaggccaggtgcagtggctcacacctgtaatcccaccactttgggaggctgagacaggagaatcacttgaggccaggagtgtgagaccagcctgggcaacaaagtgagacccccatctctataaaaataaatttttaaattagccaggcatggtggcatgcacttgtagtcccagctacttgggaggctgaggcaggaagattgcttaaacccaggagttcaaggttacagtgagctgtgatcatgccactgcactccagcctgcacagcagagtgagaccctgtctctaaaataaaatgacaggagacatcacattagcctaaaggttaacttctggacaccttggctgctaagtcaaaaagtccagaaagccacccttgcttttcactactttcagaataaacagacctccgcttcctttgtagcttagtgggtgattggattctaaactggccactctataagagaagacaatttgaactaaagctgttgctaataaatggttatatctactgcaatgaagaggaaacaaaaacatggagtctgttgaaaagtggcttgattccctcagtcaactaattgataagtatttgttaagcattaacaatggttctgggtgccatgagctatactacagaaatataaatctaataaaaatatatcctctgccttataagtagattaagaccagttagagagaggaagcttaaggtaagttaaataatagtgaccaatgcagggtactatctaattcattacaaaattatgtggaatttttttttgttttttgacggagtctcactctgtcccccaggctggagtgcagtggcgtgatcttctacctcactgagttcaactcagtgaactcactgcaacctccgcctcctgagttcaagcgattctcctgcctcagcctcctgagtagtcaggattacaggcatgcgccaccacgcctggctaatttttgtatttttagtagagacaaggtttcaccatgttggtcaggctgatctcgaactcctgaccttgtgatccgcccgcctcggcctcccaaagtgctgggattacaggtgtgagccactatctggaattttttaagcactaattggctggagaatgtactttaggagtttggaaagaacaagaggagaattaaggcaatgccatgcaaagggacacccttaaacaggtatggaaggcaagtagacatggcgcattcgagggactgggtagagagagaagctgggtgggaccagtggttctgtcctggtgagtagtgggagtgctgttggccctgcgaggccaggtcatcgaaactgggcacagctgtttaggccgtccactaaaccttcaccatccagtacagcagccagtagccatgtataaatacagccatttagttacatgtggctgttgaaygcatgaagtgtgtctctttccaactgatgtgctataagtgcaaaatacacattgtatttcaagaccagtgcgaaaaagaatgtaaaattcctcactaatcactttaactaatcacatgatgatgtgaaattattttggatatattgggttaaatgaaatatgttattaaaattaacttgtttttactttttaaaatgtgactactagaaaactttgaattaccgaygggactsacgttacatttctcttcaacagtattacgctagattaaaataagttgtcatgagttgttgaacaaggggaaggaactgacaagaagtgatacccgaacctagaaatgcctctgggagaggcagagcagagttgcttccctggatacattggcaccttgtcaacaatttcttttaaggcaacacattgacatggcaggagttcatgatttaaaaaaaaattttttttaaaaagagagctgtgtgaaagaaagcaaggctgttaaggctgtgagtcacatagaggatttagccattgggtggtacctttccttttatataaacacccaccaacagtgcagaccctctccagcccctccccctccccaccctcactgccatacactgccgtgcttcttcccactagtgtggccgtctgaatcttctctttagcatcactgacaagtggtggcttaacatctgtgtgaatgcctccaatgatgaggaactcggtacctcacgaggaagtgtgtcccattcactcagtattgttaccaaaaatactttcttcccgtcctttcctccctgacaatgcttaaaaagagggttagagttcctggatccttgattccaggtaacaagaggggcttatcattgttttttaaaaacaaaaagaggccgggtgcagtggctaacacctgtaatcccagcactttgggaggctgaggagggtgatgtcacctgaggtcggtagttcaaaatcagcctgaccaatatggtgaaaccccgtatctattaaaaatacaaaaaaataagctgggcgtcgtggtgtgcacctatagtcccatctactcaggagcctgaaacgagaattgcttgaatctgggaggcaaaggttgcaccactgcactccagcctgggcaagacagagcgagactccatctcaaaaaaaaaaaaaaattaaaaaaagagtggtacaactcactgaagataaaatctgggcagaacttttccaaaaataaattagttaaataatatagagcattttgcaacagtagtcattcccaagagacttccagcctgggggacgcagccagtctaccaacttataggggccctgagccaggaaatccatttcaaagcctactgaaacagccccttccttctctcttcctcctctcctttcttcactcactgtccctttccttctgtcccgcttctccactgtccatagtcggaattgccttccttcccctactttcccttttgctttattttcttgattaaggatttatttttccaagacctagtcttgctttcacagaatctccagtcacactgactttgggggcagaggggacactgctccttcccccacctccaccctgtgtgtggcatcagcaatttagacataatgagatggtaagcttgacagctgtctttgaaatgtatgcccattataaagtcaaatggtgagacatgcatgtgggcatgttttaaacaaccattcctaacagtttcatataatggattcactcatgttatctcattatctctgggcctcttttataagatcagagaggttaacaatgtggccagtgtattcatttgcccattggctgattaaaaatgtatatgtatttggccaaggtctcccagcttgaaagtggcaaaattgggacttgaacttcagttcttggcactgtgtttcctgccatatttcttaggtgaagggacatttggcctttgactaaactagaagccaaatctaaataactaaagaacccaaacagagtaagatcaactgctttactgggcttaccaagtgtcatttagggaattttcccatcctttggtgttagagccaaatttcctcatctttgggggaaattttggaacstgacttctcacttcccaacagagggaattgcaaaagtcaggtgttttcaacaagaacattgaatcgattgaagactttggataaatgctaagtggagacctgtggttccatgccataaagcatggaatataccattttgacctgaaaaatatcgaagccagttgttaacactttgctgctttgtcctgtaaaatcctttagaagaaaaaaaccaaaacctgagtagtacctgtaactaattttaactaggtcttaagtcagcagttctcaaagtgtgatctccagactagcagcaccaggaacacaggaacttgctaaaaatgcaaattctcagtctccaccccagacctagtaaattagaaactctgagagttaaacccaaaaatcttgttttaacaagtccttcagataattctgatgctgaggtttgagaatcactgatttaaaccatcaagagaaaactctatttgcccactcaaatgggcagtagtataactagaagcctggaatctctgcatgtatgtgtcccatatgctctgcaaaaaggcacgtattcttaactggtgttttgtgattcgattggttgtgcttagaatttgcttggttctcttgcaaaatatcctgaagttggttaaagaaaggattgatcgtgtccagtaaaataatgcgtcttgtcagtagttgacaaggagccactgttgagaccttgccggatacaaagccaacttcaagcctactctctttcccaacatgtcagccttaaccatcccctctcctatttccagcagaaatcttttctctttcaacgtgtaataccaattctgccccaaaggaaagagaaggcaaaatgagcagaatttgtggttttgtccgttcactagcgctaatgcagtgaaggagggatgaaaacgctttaggagatggtatgattgggaaggatattatgccatgtaccatttcccttcttcccccagtgccagccgctgatgagtggtttcacattcctgtactgggtggcacacaacctagtctgttttcactgctagcaaggattcacagtgccagtctgttatgtacacccagagaacaggggtgacagagacaccctcctgccttttagaagagatatttgatccatatttttcctgcctggaatcgtggagactcctgtctggtctggctgcagcctgaccctccggatgccttcagttgtgggtgtttgacacatcaggaaagtcacaagtctgactcctgtgatttgaggagacagctgggaaacctccctgctgtggtcccagccagcataggagcatgaccctacatccagggatgggcttagtccaaatcagaaatgcctgtgttctctcaggccttagcctccagcttcccgacactgagacctagggcatgagagcttccctgctggagtcctaccttattctcaccaagtcacccccgactgaccctttgggcctttggcaatagtataaatgggtgttttaaacttctccatgggcaaccaccctgctctcagaagatgccctccatcctctccagggtctcagaaggcttggctcttccaggtgccaataaaaatgaacagtgggagctggtggcagaccagcaaagggccgcctcactgtccctgctggactgctacagcgtgggtaaggcccccattcgtggatctcaggcctcagaggccgagggttccaagcaccccagcgaggctgcccccgagcctgggaaggctggctgcatccgggtggtctctgcctagctgctcctawgctcctgccctcttccttccagatcacacggcagcaatatcagaacgcactcactgcctgccacatggacagctcacctcagtcccctgacatggaggccttcacagacggggactccactaaggcccccacaacccrgggcacaccccagacccctaaggatgaycccgccatcacgctcctcaacaacaggaacagcctgccgtgtaagtcagctgggcagacgggcaggctgggctggtgtggggtgaggatgaccctgccttcctcttctagcccttcccagggctcacaccacctgagccctgggkcttctccaaagcagagaggtgatgcactcactgtcctccccaggcagccgctcagacgggctgagaagccccagcgaggtagtgtacctgaggatggaggagctggccttcacccaggaagaaatgactgacttcgaggagcacagcacacagcagctcacgctgtctcctgcagccgttcccacgagagcaggtcagggaggccagctgggcccagtgcagcaagggagatcattgcctttgggcactgggatggcccagggaaagctggctgaggggagccctgggaccgcagcccgtgcgttaaacctccgacctccttacacagccagggaaaggaaacatttactgagcatctaccatgcatcaggccctgtctgattcattctcctaggaaaactgtgtagggcagtattaggagttgggtttctgcctggattcagaccctggctccttcgtttaggagttatgcaattttaggcaagttattgaacctaagactcagttttttttatctgaatggataagtatccttatgttaataggtataaattatgacagctatcttataaagtagctttgagtataaatgagataacatacataaaaggcatattacagtgttcagtaccatgctttataaatgttacatagctattattaggcctaccttacagattaggaaactgatgtcagccatcattctaactagctgtggttttgaccaaaggtgtagcctataagacttttcctgaggtctaagaccatatcacctccctctgagacactgaacacttctgccttgacagtggtgttgctctgagctcccagggtcccagcagtcttgagaagcttctgtgtttgcctcactaagatgtattccccaagctttcagtagccccctatgcctgcacccaagccagcagttcccccacccgacctgtcagacctacttcagtccatagtataagacctctcaagtccagagcaacaacctgaaaaagtgctccaagatttttaaagttggccgggcacggtggctcatgcctgtaatcccagcactttgggaggcccaggcaggcggatcacctaaggctaggggttcgagaccagtctgaccaacatggtgaaaccctgtctctactaaaaaaaacaaaaattagccgggtgtggtggtgggtgcctgtaatcccagctactcggaaggctgaggcaggagaatcgcttgaacctgggaagctgaggttgcagtgaggcgagatggcgccattgcactctagcctgggtgacagagtgagattccatctcaaaaaaaaaaaaaaaaaaaaaatttaaagtcaacaagacaatatgtttgaacttgtggctgacccagaaaatctgggacatacatagtcactgttccaggacctgaatttagaactgatgttccttttctgcccccaacaccaaatctagtagctaaagcacatagcaagaaaatgtaacaaaggaataagaatgaaggcgatggagtggtcttggagatcatctagtccaccctcgtcctgtgacatttgaggaccctggaggcctagagaagggaaataacttgctcaagtccaaaaactgcatcagaagcaggctcagcctcatggcttcagtgcagtgccatttccaacacaccgctctgccttaggtttttatttgcattggtggtaaggcttggccccttctgggctctcagattctgtaactctttgaattcccattgagtcctgcgggagaagacaggggcattgttgttgaaccctgtggctttccagggtttgtgcaaatataccaaggagacctccacctatcctcacgtgtgcttttagtctggcaaatagactgggtggagaacacattgttctctaaaccctctctcttgccaaacagtgtttgagaagagggaatgatttctgactttgcatggatcgttggattccggctcctgttctccatctttttgttccttttgtggcactaaaatgcctcttgctaactaatgacaccctgtacttccctgggcgtccctgccttgttacaccaccctcaccttggctcacrtcttaaacttcacttgctgagggatgtcatcactcagaatcaccctctcttgatgcctgagtgtgtaggttgagacaacttgagttctctcctttcctttctcagcatcagatagtgaatgttgtaacatcaacctggatacagagaccagcccctgcagtagcgattttgaggaaaacgtgggcaagaagctgctgagaaccttgagtgagtagctagttcttcacccaaatgagagccaccctgctgatggttagtaggraaagcatgttagcatcttcctcttgggggaggagccrtggactcctcttagaaaccctaatgaggtacaattgtggaaatccgcagaaggggttgggccagcactgcacccttgatagttttgggatmtgtcccattcagttgtttgtcctctaggacagaagtctgcacaccatgcccacaggtcaattctgacctccctcctttacttgtttttgtaagtaaggacttattggatcacagacagatccatttgttatctatggcaacaatgtcagagtcgagtaattgtgacagagaccatatggcccacaggcctctaatattttctgtctagtcctttaaagaattggtgtccaggagactcaatagaaagagagcaatctcctccacagatggaagtcaatggtggagagaacaaggtgaagatattccttcctaaaaacagacctgggaacagattgctctctcatccttgaggacaactatgtaattatgcccacctgccccactgcagaagggaggttgcttcagagctagagaacgcaggtccctggaaatggcttgcagctacagccaccaaccctgattcatgggacatcaaagtctatgagattggtcctctctgagggtgtctggcagtcagaggggctggcccccaaggggcgcaggaggcatgggcctgaggtgttacatgggctttactcagtcccctccaggaagtctcaattccaggcaccagcctgggtttgtgacttttcagagatggcatcttatgtggaaagtacgtcctaatctttcaagatgtaaatatgccaatatcagcaccagcatacaatgccggttagttctaaccaagctgtcaagggctttgtctccatttctgcttctgttttgaaaagaactcagactgccaagcaattatgaatgttcctccagtgttacaggctgatacttgcaacttgtttttttcaggtggccaaaaaaggaagaggtcaccagaaggagagagaacctctgaggacaactccaatttaacacctctgatcacatgacagggcaaagccagcattcactgggtgtgtgaaattccagagctttgggggagaatccaccctcccatcatctgcttcccccaaggcctcccacaggtgacagaatgttctgccttcccttccatctcttcacccctagctgtcagtttggcagattttccctcgttacctccagttcgactcagaaccttgacatggccataacagaaggaggtgcctctgatagaacatgctagaaatggtcttttccacagcatagtctgggactggaaaagagatgtctgactgcaagctgacaatgccactctgggacccctgatgctcttctttgttctttgggtcccctgatgccataggagacctatcgtcttggaacttgccattctttcctccagaacaaaatgttaactttctaacacatttcatgcatagcttggctcagaaggtgccattggcagacaggcacatgggaggctggagtaggaggtctgaagattagttcaggggatggaccaagaatttcccccagagctttaaagaagtgggactcagccatgttggcgcgtgattgacattacagcacagaaaactgttagtgactggtttcctgttagataagggttccagcagcctggggcagtatgtctcagctggaatggaaagaatgtgagatggaacctcaagtcactgtttttaccagggacacatctgttttggctcycaatcagcagtcttcaatcgatcaataattctgctctggaagagaaggaacagggagcagagagacccaactgggagccagagatggaacttcaggtcttaagtgcaaatcaaagcaaaaaacaaacaaaacttacatggaaaaactgtaagtgctgaaagcaagtttagccatgacaaaccaaagagtgcccaggycagccaagaaagatacataatctcatgggacttcagtgggagttacacaggaatgttgaagaatcattcttctttttcatgcatttgtccttctcccayccccttactacaccctagcagatcagctgagtgtactttattccaagaacttactggatctctggtttttctcctgaagttggggcaggtgcaattccaagcataaccaccagatggcagagtgaccgcgcatacctgcttccaagaataaaacagttctgaaaagcaaccgcaaagccgggcgcggtggctcacacctgtaatcccaacagtttggaagaccgaggcgggtggatcacttgaagtcaggagtttgagaccagcctggccaacatggtgaaaccccatctctcctgggcatgtagtcccagctactcgggaggctgaggcaggagaatcgcttgaacctgggaggcagaggttgcagtgagctgagatcacaccactgcacttcatcctaggcaacagagcgagactctgtctcccccckcaaaaaaaaaaaagaaagaaagaaagagaaaagaaaagaaaagcaaccacagccagccttagggaaaacttggaagtaagtgaaatttgtcttcagaataactatctccctttctgatctgtctcctactctttagatgttctcagtcaagtactcactgaactcattgatcgagtgctgtctgctaaatctccaaaccattcccaaacctttccccgtagtataccatccagcttccctccccttcctccaaaaccctccctcccacctccccacacccattgagtcattcacaggcaggagggagactgatcattcctctgggttatctgcatctcaaaagaaaatgcttacccacaggaactgttaactcaggggttcttaacttggggtccatcaccccagggggtccatagttggacttcagagggtctatgaaacccctaaaactgtcagtatttaatgtatttattcttgtatgttttttccagagcattaaagctttcataaggttctcaaaggtctcagacctacaaagagttaaaacaaacagacaaacaaaaaaaaacactactattttaaatagtggaactttcagcccagcgtttctgcaatgcagagtgaagtggatactgggcagttcgagacaggtttttaatcataagtggtcttttcaaatgtccatcaattgatggggaaggctggcacccaccaagaagtggaagtcctcagaaattctcggcacaccctagagtattgtacaaccaacacccccacataactttgtcccctcttccccaacaacccagagcaggtgttgcagacaggagggccacagcgtgtggaagtaaagactttggagctagagatgccttttccagcaatgattattgacttcaccacaccccttgcctggcctggcctgaggctcagcagtgcatgacttctcgtagataacttcacagtcatccagtcccaacacctgctcttgcctggtaggaacaggcgaagtgtcagccctcaatgttgggtacttagacccaaaccaataaatggtgagttttgaacaagaactaccatcatgcaggcttcttgcccagctgaccactggccccggggtgcctgcctggctggtcttcatcacctgaggccaccaggctcaagccactgctgttgcattacacccatccctttgcaaaatccctatggagcctgtyaccactcccctccctatatacccccaccccacaaagattttcttcaggttaaaaaaaaagtttaaaaaaaagattttaaaataaagcatttatgaaggcttaataaattgtaaataatttttaaataaaatgaaaatgcctttcctggaatgtggctgttttccttgcccctggaatcttctgacgtggcttcatttgagatgcaggttgagtgatgcccacgtgtgatgatctcacctgtgcaccacctgcctgaagaggcatgccgctccgggccaggtgtgaggctgcggtgaggtcacggggaagccttggcacactactttgggaggccagatggtaagattttgcaggagtgaatgccagaaatgagaagtaaaacccaaatgagaagccagtatgcataaagacgaggaaggaactaagacgacagtgagaagggctggcatttgctgaacccatgtgatgggtgaggtgctgtgctgggtgccgtccaaattcaaggtcttgggggctaaacccagacaagcccctgagacagaatgttggtcacactagctcgcttctgcagaaccttcagaaaggagtccaagtggcatgactctggcagtttgcaaccaaaggctagggaacggaacacaagaatgggccaggcctgttggtcagttttaagccgatgctggagggagggaacagccaggcaggtgggaagatgtgtttgggcatataatacctgtgtggaaggaaggctgaaatctgacacctactactcatttctcaaagcaaacaggaggatcaggggcctatgccaaaacctcttaagattcttctcaggaacctcagtagaggctattcatttcactaacggtaataataaataatggaaacaactattttgccaagggctttatgttccaagtattctgttaagtacccattagctcatttctttctcaaccaccctgtggaggaggggttactgtctgcaaggttactgtcttcttgctcacggttacacacctgggaactggcagagcctggaggttggagtgccctgctcttgagtgagcaaaattggtgaaacaatcccacctctgaagttcactggcatgtcagaggcctgaggagtcctgccggcttcccaaactcacagccctttttcaggtgaacgcagtgggaaccacaccaaccaacatatctgtcggaatagaagaaggccagattcccattgagatgggcttttttcaaggctaaaaacatttgagcactttggtactgtcacttagatttaaagatgtgtttatctttaatggttttggcagccccctaaagagaaaattttaattttccctaacaagagaaattaaatactaataagatggtcaggtaggattgcactttggaaggcaacattttagtatttcaggctttttttttttttgccccagagagccaattttcgtccccatggaggcagtatcgtccccatggagaatgagtggttgaaagcgtttggagagaatggcagattgacagaaggtagaatcattcgacttctctgttggctgccttcccttactaacaacaagcatctttacattgggaggagaacaaagactgatatgttcagaaagctgtgaagagatgggtgggagggcatctaatcacattcactcatgaacttccaccagcccaaccacacactggcagagtgagtgtcctctgaagaactcctggggctccagccagacagggaaggatctggaaaccacatcctgtgcagaaacaaaagtggtgggggagaggcagttcatgtggaaaagtgtaaacaaggaatgacaactgctactttcaaatatttgaaaggtggtagattagaagtgccagtagatttactatctgtggtttaaaggaaggaaaggaggggcaggggagtggaacaaagatcaaattctggttcaaggtagatgaacttttaccgtgagcaaaaggtaaatgagcctctttttttttaattaagaggccccaccagcagaaggggatgcctcaccaggtatttaaagaatccatcaccactaccaccccaccagttgaaatggatgagtcagagacaatatggagagactatttcactggcggagaggcaggacttgatgacttctgaggccccagtcatccctcaggactgcaggattttctaacaacccaaatgagtcctagaaagtggcagatcctattaaaatcacaagaattaactttaaatacttaaaaactccaattaatagacctcttgtgttaagtaacatcaaaccccaccaaattctacaaaatggccatttggagcggcccttggactctggaaattgtgatgtatgtttttgtggttctgtttcaataaaccaggagggactctgacagcagggaacgggctgatgttctataatcaacctgagtgatgtcatctcctctcacagtccaagaagtccagtttcttaagtaacataagacagctggcctccaaatgacaagcccgcaaaatcaccagggagttatatggtgagttcactgaaggaagctatactgtaagaacacattgtagtttttcctttagccactagtaaaaccctctaaagcattcattttaaactgtgggtcacaacccattagtggtcataaaatcaactccatgtcttgatcaacatttttattttatttttttaggtgaagtagaacacaatagaatggctcaaaaatatcagaatgcactacgcacatcacgagtaaatactgtttggtaaaacttgtttcagttaaatatgtacgtgtccgtgcatgtcatgattaaatatccttcttaccacagtcaccctaaagaaccaaagcttaggactagggacacaaccatgcagaaagagcagggagaccagacactctgggttgagatgatgaatttaatgccgcagccgacacccacattcacactttggctccttcagacaacttgatctttgggactagaatttgtacagagtcaaacaccacatagaagcacgtggccgccacacacaacactcctttttagtgagagggacaagatacctatgtctcatgatcaaagtactcttttattcttaaataaaaatcttaatttgctttgacctccaaaggctctaatcccagtctccaaattcgtctcaagggatgttctcttcatgtggggccggtttaaacagaggctgcctcaccagagcagcctttcagtcctgcaagtgtctctaatccatggtatgtacatgtaggtttgtgcaggcagggaacacacatgacagagaactactttggtggtactggacgggtggtgtttcttcactggattttggtgactgcttcatggatggaggtggccacgtaatctagatttttggtggttaagccactcacgttgattcgaccacttggcagcaggtagatgtgcttttcattgaccagatactcaacctgcttggctgttgaaaaccaaaagaagacataatcagagcagaggggatccttaaagcagtggaggctcagcaattatatgacaattacagctttacttctttccccttaacagagagaagcaaaacaaaaggcgctattttgtccaactgacaaacagaaaaatatgctcactagattctggaaagtactcttactagttcacctttgaatccccagaaaattcaatatggctactactgatgggaattttaatctgagattgccttccaaccaagccttatacattatatccaccaggacacccctatcacctaaaaacaaccatcagacggacagcgatatgaaatgctggctatgaagtgcttcctttagttcttccctaacctggacttgcattgagtacccgcggcagcctccctttgacatttcatttttacaatacattgggtaaggccccatgcatgaggtacctgatcaatcctgtgtgaattaaccaatgagctgagaaatgacacagacctctctgacctggcaccatcagacttctgttcatttctcagctttctctcagatgcagtagtttttccatgttttcagaaatgcatcacatgtgggtaagaagagactacctgtacttcctttatacagcagtctctaaagcagttttgctatttggcaaatccattgatagaattttagtgaatttggctgggcacagtggttcacgcctgtgatcccagcacttcaggaggctgaggctggtggattacctgaggtcagaagtttgagaccagcctggccaacatgctgagacccagtctctactaaaaatacaaaaattagccaggcgtggtggcatgtgcctatggtcccagctactcaggaggctgaggcaggagaattgcttgaaacccaagaggaggaagttgcagtgagccgagatcacaccactgcactccagcctgggtgacagagtgagactctgtctcaaaaaaaaaaagaattttagtgaattattgcttaagtaattagtacctttaagataccaccaacctgaggaaatggaataataatagaatcatcataatcagaggagtaaacactatgtgccaggcagtgttctaagcactgcatcttagttcatcctgataataactttatcatgcccattttacagataggccataaagacattaaatggccttccgagattgcacagctggtcaatggtggatgtgggattttcaggcaggatttcaagtctgggctgtacactgcccccgtgatgctacagtgcctctctaaggaagtgaaaaatctggaccctggactcagtgctccttgaaggaaaccaaaatagttcaccccaaaatatactttgacatattttgagatggctgttgagagggcctacatacagaagtagccctgcaaagctgtcttttgtgggagagatctgtatctgtagagaaaatctgcatggctgcagctaggctttctctgaggccctcccttgtccagatctaggggagattaactgagagtgtgatgcctttaaaggtctaaaagaaatagacctttaccgctattttctccgagggctgctacctgtcttatctacataatataacaagaccacctttgctaaccaggccttctcttctctgcctgccataatctgttctggcaagctccaagctcccattctttctataaccccaagatggtataaaagcatcaatcatctggccatttatttgagttctattttgtaagacacctgtgcaagttaataaatttgcatgctggccaggcacagtggctcatgcctgtaatccaagtactttgggaggctgaggagggaggattgcttgagcccaggagttgacgaccagcctgggcatcataaggagaccctgtctctacaaaaaaatcttaaaaattagccgggcatggtggcacacacctgtggtcccaggtactacgaaggctgaggtgggtggattgcttgggcctgggaggttgaggctacagtaagccatgattgtgacgccgcactccagcctgggcaacagagtgagactctgactcaaaaataaataaataaatttgtatgccttttctcctattaatctgcctcttgtcagctgatttccagcaaactttcagagggcaaagggtaagttttcccttgacccctccaaaccagtgaacaaagaaagcaagcttaagaagaggtttacctgtgtgaattggtcacccaaggggatagagcctcaagccaacacagccctgggtgtgccactctttctaaaagcctgtgccctgaggcagtgattaaatgactcctaccctggcttttggttttgttttagtaaaaatgaggcctttctactttttcagagaagggaagtgtcacagtttgaaaagctagtaaaagttatggactctttccctagagcagggccaaaatacacatatacaattttttaaacatcatttcaggggcttcacagttctcctaaacgtacatccagggattccaggttaaaagccccattctgacagaaaaaagataacaaaggaagtattgtaatgtgagaattgtagaaactaggtggcggatatataggggttcactgtacaatt

SEQ ID NO: 96887 - DNA, 23180 bp, Homo sapiens
agaaatccactttaaaatggcctcaaatacagcatcttcctgtttgacattgagctcatctttctcaatgatatccttaagttcagtgaccgagagctctaaaaattctgccgagactttcaccatctcctcaaagttgtgcagtatgaacatgtaggccttctgcctcagctcaggacagtagtagtagtccgtgaacttacagatgccgatacaattatccaagcacagctctgacttgaggaactcgcagcaacccctgacgatacccatgatgttaaactggtctgcagcagcaagcagtttctccacattgtccggtgtgataggcacggtccgggtgtatgcatactcaatgattagcttcatcatgtcaggagaaatgccagggatgttgtataccttcttttcagtgttgttccagccacttgtaaacaaagctctggaaaaaagaaagaaactagcagccacggaaacatttctctcctgttaggtgagtacattggaaatggtctgagaaagtggggtgcaggcatgtgctatatacagtggacaagaagaacacctttccaagaactctgactttggtcactcttaccttgtggatggagaaattaagatctagaactgagagtaagacccaggtctcttgggccaggcgtggtggctcacgcctataatctcagcactttgggaggccgaagcgggtggatcatgaggtcaggagttcaagaccagcctggccaacgtggtgaaaccccgtctctactaaaaatacaaaaattagctgggcatggtggcacatgcctgtagtcccagctacttgggaggctgaggcaggagaatcgcttaaacctgggaggcggaggttgcagtgagccaagatcatgacactacactccagcctgggggacacagcgagactctgtctgaaaaaataaaaataaaatggccactcactgctttttatcttccttttcttattttcccaggcatttatgatgatttgatatgcattttactcatttaatgcctgtttccccatccagggggtaaacttcatgagaacaggaatgcttctctttttattaattgttttcttttctttttttctttttttttttggaaacagggtcttgctcggtcacccagggtagagtgcaatggcatgatcttggctcactgcaacctccaactccagagtgcaagcaattttcctgcctcagcctcttgagtagctgggattataggcgtgtgccaccacgctcaactgatttttgtattttttagtagagatgcgatttcaccatgttggccaggctggtttcatcatattggtcaggcttgtctcgcactcctgacctcaggtgatctgcctgcctcggcctcccaaagtgctgggattacacgggtgagccaccatgcccggcttttgcttcctttttttaagaagtttaaggaaatgtggtcttagaaatcaaattcttcctctagagcaggggtctgcaaacctatggactctgtccaaatttggcccacctcttgttttcatgctgcccacaaattaagaatgatttttacattttaaatggctggaggaaaaaatctttttttttttttttgagatggagtctcgctctgtcacccaggctggagtgcagtggcttgatcttggctcagtgcaacctctgcctcccaggttcaagcaattctctgcctcagcctcccgagtagctgggattataggtgcccaccaccatgcccggctttttgtatttatgcctggttttttgtatttttagtagaaatgggatttcaccatcttggccaggctggtcttgaattcctgatctcatgatccacccacctcagcctcccaaattattgggattccaggcgtgagccactgcgccccgctggttgggggaaaaaatcaaaagaatattctgtgacacctgaaaattataatacatttaaatttcagtgtccataaataatcttattggaatacagccacacccattcatttagtattgtctaaggctgcttttgcagtataaaaacagagtagttgcaacagactgtgtggcctgcaaaaacctaaaacaattactatttggtctatttctggactcagctgagcgcgttggctcacgcctgtaatcccagcactctgggaggctgaggcaggcggatcacctgaagtcaggagttcaagaccagcctggccaacatagtgaaacctgtaaccccagctactcgggaggctgaggcaggagaattgcttgaacatgggaggcagaggttgcagtgagcagagatcatgccattgcattccagcctggatgacaagaacaaaactccatttcaaaaaaaaaaaagaaaaattagccagatgtggtggcacacagctgtaatcccagatattcgggaggctgaggcaggagaatcgcttgaacctgagaggtggaggttgcagtgagctgagattgtgccactgcactccagcctgggtgacagagcaagactccatctcaaaaaaataaaaataaaaaataaattgtggactctgctctgtggtctacctgaatgagaagttttagcaacaggtaggacacattgatcatatcttcattggaattgattactcaaacattttcagctcatgaacaaaatagcccttctacctcctgggttacaatggttttagcccaaactccctttttcttctgatatttcctgggtatttccccctcatctcccttcccatccccttaatccttgttaatttatcaccctgtttgaaatggtctctattgggataggggtacaggggggtccctgaagtggcattgtcatctgaaatccagtagggatgtccaaccttcccaaaggttggtttgggtgagaatcaaagattaaagcacctggcccaccaatagttggttgaaatccagttgaaaaatcagaccttaaaggctgggtgcagtggctcatgcctgtaatcccagcactttgggagaccaaggtgggtggatcacgaagtcaggtgttcgagaccagaccgaccaacatggtgaaaccccgtctctactaaaaacacaaaaattagctgggcatggtggcgggagcctgtaattccagctactcgggaggctgagacagaagaatcgcttgagcctgggaggcagcggttgcagtgagccgagatcaggccactgcattccagcctgggggacaaagcgagactccatcttaaaaaaagaaaaattgtatcttgccaggcgcggtggctaatgcctgtaatcctagcactttgggaggtcaagacgggcagatcacctgaggtcaggagtttgagaccagcctgagcgacatggcaaaaccctgtctctactaaaaatacaaaaattagccgggcgtggtgtcaggcgcctgtaatcccagctacttgagaggctgaggtgggagaatggattgaactggggaggcggagtttgcagtgagccgagatggcgccattgcactccagcctgggtaacagaatgagactcatctcaaaaaaaaaagacaaaaatcagatctctcaagagcaaaaggaaaaaaaaaacaaaacaaacaaaaaaaaaaaagagagaaaaaaggccctgaccctagtcatgcctcttcagaaggcaaaggagccaggcaggagctcctgcctggaccagagttggccaggcacagtggtaatcccagcactttgggagactgaggcaggaggatcgctttgggccaggagttcaagaccagcctgggcaacatagcgagactccctctctacagaacatttcaaaagtagccggacgtagcagcatgtgcctgtagacctagctacttgggaggctggagtaggtggattgtttgagcccagcagttgaaggctgcagtgagctatgattgcatcactacactccagcctgggtgaaagaatgagagcttatctctaaaaaaaaaatttttttttaatttttaaggagcccagagctttgacagtgtccctaaagttaaggtgatggggtgggaaacagaaaatggatcaaagtgtctcaaaatgagcccaattacccctttggctgaatttggcaaccctgttatacctaaagtaggaactgcagctacagaggatgttcttatgggcactgaactcaaagccattgaccttgatgaccacgtcgcagagcttgccctctagtctaagctcgttgaagatctcacaggccatcgcactcatcttcctctccatgtgaggctggtggaaacgtgtggaggccgccgcgctctccatctccatggcaccctgggacagcggagagaggctgctttcctagggtgtcggggagggttgtggggggcccctttagccagctgtcgctccttttccctactacatcttttgtatagggtctatcaggcaacccaagttccagaatcctggccctgcagtgagatcacacaggattgtgctctcaggttctggaactgcctcctggacttgtcctcttccttctcccctccttaccaccccacttaggctgaaaaccacctcacacctccttctgtgtccttgaacccaaaacagaaccatgaccactagcaccatctgagtgtttattgattccagctcctgttactcacctgatacaggtctctatccctggagcattcatctaccttccacagcccaacacttggctccctagacaccgaactcaaggaaatccaagtcaattgaggctgaagggagaagtaaaactgattaaatttctttcttaggccgggcgcagtggctcacacctgtaatcccagcacgaggtggatggatcacaaggtcaagagatcaaggccatcctggccaacatggtgaaacctcgtctctactaaaaatacaaaaattagctgggcgtggtggcacatgcctgtagtcccagctacttgggaggctgaggcaggagaatcgcttcaacccaggagatggaggttgtagtgagccgagatcgctccactgcactccagcctggcgacagagtgagactccatctcaaaaaaaaaatctttctttttctagggacgggtctcgctctctcacccaggctggagtgcagtggtgtgatcataactcactacagcctcgacctcctgggcttaagtgatcctcccacctcagcctcctgaatagctgggattacaagtgctccgcaccgtgcccagccaacgctgattacatttcagaaagctgtcccgggtctcccagcccgctggatgggttagtcactcagtttcttctggaatgaggaatggcctagttaacagagccctttctgggtgattaacagaattcagtttatggctccttcatctctcctcccatccagccgtgtggtttttctgtttttgtttctgagacagggtgtcatctgtcacccagggtggagtgcagtggtatgatctcggcctactggagcctggatctcccgggctcaagtgatcctcgtgcctcagcctcccgagtagctgggactacaacaggtgcgtgtcaccatgcccggctaatttttgtattttttgtagagacagggtttcgtcatattgcccaggctggtctcgaactcttcggctcaagcgatcatcctgcctcggcctcccaaagtcctgggattacaggtatgggccaccgcgcccagccccagtcatgtttttgtcacaaactttcagcctggaaatgaccacgtttggcaaggcttttcctccacaaagagtggcagaaccctacctacccacgtaaccccaacaccttgggaccttcaccctgctcttcacaataaatagaaccctcctccagtttgcctagcgcaaccggcaagcccacccggatcgcggccatctccgggaccgctcgattctcggccccacccccgccccgcccccggccccaccaacccccgcccgggctccaggcgggaggcgacgcctgcgcagtgcggtcgcggggctgtcgttgtcccgcgagccgccgaccaggcctcgaacgggatggcagaggaggtgaggagggaggaagcgtccggagtggggcgggcccggactccgacccccggggcgcttcgagccccccagctggtcaccgaggcaccgccgcttcacccaggccagtagccgccccctcgcgcaccccggccccgcctcacacgcgcgcccgagcgagccccgggctcccctcgggcccagcgtggcgcaggggtcagtggttctctcgggtctcgggacaggtgagcaccctgatgaaggccacggtcctgatgcggcagcctgggcgggtgcaggagatcgtgggcgccctccgcaagggcggcggagaccggttacaggtacctctggggcgtgcgggggccggccgggctgggggcggctggagaggcttcctgcccattgggccttcccgctttgctctgccgcggacccctcctagctctctgccccaagaaatggcygggagcttgaaggagagcgggttggttcgcctgtcctaaaacccaaatttcagatttctcaatatggtcatgctgcttcctctaattggacagaaggcgcccacaccagtacctagggccgatattatcctccccaagccagcggctccccagtaagttgaagatgtccagatgggccgtaatggtagagatctcttaggarggacctgatattgaaggagtcagaggggtcctgagtattcacccttgcccccacactaggagactgcgttttcctcagggttaacgggtactaattaggatcacttcccctctatccctctgtgtcactcggtaactcccctagggctttgcctacatcctggccactgagctgtattgatttccataatcatcccccaggctgaggcagggccacactagaattctggtgcctatttaggcatcatctctcttttgccttataggtgatttctgattttgacatgaccttgagcaggtttgcatataatggaaagcgatgcccttcttcttacagtaagtcacattctagcttcccttgttgagcttgacaagacgatgggttctaagggacaagtaaaaggagttttctctttttccagatattctggataatagcaagatcatcagtgaggagtgtcggaaagaggtgggttgctcccgtcctttgctcagaaatggttgtcatttgctacttcaaatggttcctgattggaaccaaagattccagtatagagaccttagaaaattaatttttaaaaacttgttgttttgctaaggagggtctagttttaatacattaagacagcttttccttactggccaggacatatgatgattaatggttggaactggacattatatttactgttggctatagagtttacaagagatttgaacattctggaggttcagcaacttacccagggtcatacagccaaatggcagagcttgtttgtttgtttgttttgagacagggtctcactctatcacccaggctggagtgcaatggcttgatctttgttcactgcagccttgacctcctaggctcaagtgatcctcctgcctcagccctactgagtagctggaactacaagcatgtaacattacacctagctaattttaaaaattttttgtagagatggggtctcactatgttgcctaggttggtcttgaactcctgagctcaagcaatcctccttcctcagcctccccaaagtgctgggcttataggcatgagctaccacacctggcctttttaaaagaaaatttatattcttctgttgggttctagtgtgtgtgtgtgtgtgtgtgtgtgtatttttttttttgagacagagtcttgctctatggcccaggctggagtggcataatctcagctcactgcaacctcggttcaagcaattctcatgcctcagcctctcgagtagctgggattaccagcatgcatcaccatgcccggctaatttttgtatttttagtagagacgaggtttctccatgttggtcaggctgatctcgaactcccaacctcaggtgatccgcccgccttggcctcccaaagtgctgagattacaggcatgagccatcttgcccagcctgatttttrgagaaaggttctcactccaaaaaaacacacagattgagaatcttaatacatttcagaagttttctgcctttgttactatgtcatctttcatttaatcttcttttgaacagatggacagggattccatttgatcttgtaatgttcctgagaatcatgcatgtattaaaattctttacttggtcaattctcatttttactaggcactgttacggactggctctgtgtaacacatgatccctggaacagcccctttagagtgtcaaagtcttggcacatagaaggaaaccttagaggaaacacacatagatgctgtgcattcacatgatattgacacttttgacggaattgtccaccaacatgctgtgtcccaaagtacagtcttctagttatatttcattttttttgccatatctgtatatcacctttactaaatctttctctaaattggcctgcttttaaaaattgtaattaacttataaagaaacaggccgggtgtggtggttcacgcctgtaatcccagcatttctgggaggctgaggcgggcagatcggttgaggtcaggagatcgagaccagcctggacaacatggcraaaccctgtctctactaaaaatacaaaaaatyagctgggcgtagtggtgcctgcctgtaatcccagctactcgggaggctgaggcagaagaattgctcgaaccygggaggcggaggttgcagtgagccgagattgcgccactgcactccagcctgggcaacagagtgagacttgtctcaaaaaaaaaaaaaattgtacatgaaaatgaatccaaaacttctgagttgaaaagcgcttctccatgaattccctaaagttttcttacctatcacctgagaaagtggaccacattctgggaaacacagcattaagtaagttcttactggttaagccctgaaaattgagctaattaataacagcaaaaaaatcttagtacccttcttctctgatagtaaaatctcatattgctgacttttagacctcactctcagggtgagtacaaaggaatgaccagctctgtggatccaggtgctccctggacttcaccaaatgggtaaaaatgtgagtgtattgagcgattatgttggaagataatatgagaagagaaacttaggtcttataaatgacatgtccccaaaggaaaacttgaagaaaatttcatgtaacactctcttagatgaagttgcatcttctttttatttgagacacagttttactctgtggcccaggctggagtgcagtggtgtgatctcgtcttggctcactgcaacctccgcctcctgggttcaaacgattctcatttttcagcctcctgagtagctgggattaaaggcgcatgccactacaccggctaatttttgtattttttagtagagacagggtttcgccatgttggccaggctggactcgaactcctgacctcaagtgatccacctgcctcagcctcctaaagcactgggattgcaggtgtgagccaccgcccctggccatgaagttgcctcttctaggtgacttttttctcatactaagctgtaggacgttgctgggaagaacttgatatggactaatggcctytctccccatttggatatcccagctcacagcgctccttcaccactattacccaattgagatcgacccacaccggaccgtcaaggagaagctacctcatatggtggaatggtgagtgatggtggtggagaaaagcttctgggcccttgagatrgagtaggctgggaggggcatatttttccagacccttgatgagatgacaggctcccttacttcactgagggcttaatttaatactattagtccagctattggaaccaacttttcagatgaacccagggctttttgtggctgctgctagagtggagaccctcagagaatccttggaataagttaaagacgcttggtgttgggggataagtgctttgtggaagtgacttttagtctgttttgtgctgctgtcacagaataacagactaggtgaattatatattttttctattttttgagacagagtcttgctctgttgcccaggctggagtccratggcatgatcgtggctccctgcagcctcaactgcctgggctgaagagattctcccacctcagcttcccaagtagctggtactacgggcacgtgccactgtgcctggctcattttttctattttttgtagagatggggtctcaccatgttacccaggctattttcaactcctgagctcaagcaatcctcccacttcggcctcccaaagtcttggggttacaggcatgagccactgcacccagcctagactgggtaatttataatgaatagcaatttattggcacacagttctggaagcagggaagtccaatatcaaaggactggctggcatttggcgagggccttcttgctgcattatctcattgtggaagggcaaagagagtaggggagagagaaagagaaagagagttctttttataagggatctgtgataatgacattaatccattcatgaggatggtgccgccatgacacctcccattaggccccatctctcaacacctccacactggggatcaagtttccaacacattcaaaccacagcaatcatcatcactggacagagccccagttctccagatagagggttcacggaggaagggattcagaagagtgccgacttcagcagtcagcttgcccagcacttgtctctgttgggttgcttttctcatcctcttcctttttttttttttttttttgagatggagtctcgctctgtcacccaggctggagtgcagtggccccgatcttggctcactgcaacctccccctcctgggttcaagtgattctccagcctcagcctcccaagtagctgggactacaggcgtgcaccaccatgcccagctaatttttgtatttttagcggagacagggtttcaccatgctggccaggctggtctcaaactccygatctcaggtgatccacccgccttgacctcccaaagtgctgggattataggcatgaaccactgtgcccggccaccctcttccttttaagggcagctaacgtaaggatgaggcctctgtcggcaatgctgtcagagggtacttggctctgtaaagggaaagggtgagttatttacttcagtgatttgaatttggggttttctggggtgtctgtttctaggtggaccaaagcrcacaatctcctatgtcagcagaagattcagaagtttcagatagcccaggtggttagagagtccaatgcaatgctcaggtaagcgtcttgctctggaaaacatttctatcagactatttagaatgttttgttcaaaaaaaggaggcgggggaagagtagagagcagttagttgcttaaaggaccggaagggacatggcactatgaacaactgatgtgatacagctaaagcatttcttacccttgctaggaaacattcagcaggtagtggatgtagtacaaaatggccagggcactatctctgagaagaaaccaagtctagctcttctttctttctctctccttctcttgtcttctcttctcttctcttctcaagacrgaatctcgctctgtcgccaggctggagtgcagtggcgcaatctcagctcactgcaacctccacctcctgggttcaagcgattctcctgcctcagcctccygagtaagctgggattacaggtgcccgccaccacacccggctaatttttgtatttttagtagagacagggtttcaccrtgttggccagatggtctcaatctcttgaccttgtgatccgcccacctcggccttccaaagtgctgggattacaggcgcgagccaccgcgcccrgccaagtctagctcatttttcacaatggtaaaagacttttggggtctgtctggtgactggtgttcttcatggtgactgggagttggctaggctgggacgcttgatygttggcggccttcactgaacagctgtctctgctggagatttcttttctggaggaaagaaatcctcataaaggaaggagtgacatgggtgcctgccctcaagggttgtgcatcctaattggggagattggctagctcctgaaaagtcaagacagtggagatgtgtgacccagtaagtgccggggtgggagtgtttgtaccctagtgaaggtgcccaggttagcttcctggttgtatggacagcaacagaaaacatatgcctaccttccaccacaacagcatctctcccaggtatgtaccccagaggaatgagggcatgtagccactataagacatgcacagggtattcatggcagctgtatccataacagctgaaatctggaaatctctcaactgtctatcaaggagaagctgggtagataaattgtggcatatttatatggtggaataatgctgcattgcagtgacaaaggataaactcattacatgcaaaatatagataaactacataggattatattgaacaaaataagccaggcacaaaagagtacattgtgtatgagtctatttatatgaagttcaaggacaggcaaagctaatcaatgggagggatgatattgactgggagagatcacgagggagcctcaagctagttagttacatgggtgtatacatatgtcaaaattaactgagctgagcacttaggattagcacactttaaccgcttattgaatatatcgtatgctctattttatttatttattttttgagatggagtcttgttctcttgcccrggctggagtgcagtggcgcgatctcgcctcatgcctgtaatcccagcactttgggaggccagggtgggtgggttgcttgagcataggagttcragaccagcctgggcaacagaggaaaaccccgtctttacaaaacataaaaaaattagccaggtgtggtggcatgcacctgtggtctcagctacttgggaggttgaggcgggtggatcacttgaactcgggaggtcgaggtcgcagtgaactgtgattgtgccaytgccctccagcctgggcaacagagcaagaccctgtctcacaaaaaacccaaaaaacaacccaaataggaaacaaagaacagcagtagaggcagtgccatttcagaattcctccatctcttttcagggagggatataagaccttcttcaacacactctaccataacaacattccccttttcatcttttctgcgggcattggtgatatcctggaagaaattatccgacagatgaaagtgttccaccccaacatccacatygtgtctaactacatggattttaatgaagatgtgagccaaatcctgtttgggctgggaaaggacgaggggtggggaccaccagccagggcagttaactctgcatgaaccctaacctggggaagaaggggagggaagccactctagcttcttcaccctcaggcagttgtttatgggttactttttggccaggcgcggtggctcagacctgtaatcctagcactttgggaggccgaggcgggcggatcacttgaggtcaggagttcgagaccagcctggccaacatggtgaaagtccatctgtactaaaaatacagaaataagccgggcgtggtggtgtgtggctgtaatcccagctccttcgaggctgaggcaggagaattgcctgaacccaggaggcagaggttgcagtgagccaagakcacaccactgcactccatcctgggtgacagagtaagactctgtcttcagaaaaaaacaaaaacaaaaaaactttcaaaggatcctctctctttggtgtttgcctgacagtcaactctctgccctggggtacctaatttatgggcctgccctgccctatgtcactgtcatattattatgtgccattctgggtcctaaagggcttgggctttgatttgtttttcccaagccagaggtgkgctgctccaactcatccacgttctgacttttttccccataaaactgatggttggaattttcatcatgttgacctgcagtgaggatgtggcccgcagctgagcactagcacatgtgtaacctgagtggcatttatatcacagcttcgtrcatccaccagaacagatgatctgcaatattgggtggctcctgttcatttaaactaggagttacaaacttatgctgtaaaaggccctgtcgtcgatatttaggctttrtgggctgtggcatcactgttgcaactgcccaactttgcctttatagcacaaaaaagcagccataggcatcatgtaaacaaatgagtttggctgtatcccaatacaactttatttacaaaagcaggccaagtctggcccatgggccgtagtttaggctacagtgaagttttggcattatctatcacttttgggattcccttttctctgtgacagagacagtggagagctggtgccacatgggtccctgcagcccttccatctgtctcttgtcttcattatttagggttttctccagggatttaagggccagctsatacacacatacaacaagaacagctctgygtgtgagaactstggttacttccagcaacttgagggcaaaaccaatgtcatcctgctgggagactctatcggggacctcaccatggccgatggggttcctggtgtgcagaacattctcaaaattggcttcctgaatgacaaggtgggtagaggaccagggctgcttctcttcatgkctttcttctctttgaatgcccattaacaaatgcctttgaacacattctctttttttatttctatttttattttattttattttatttttttttgagacggggtctcactctgtcgcccaggctggagtgcagtggcatgatctcagctcattgcaagctccgcctcctgggttcacgggagcctctggctcccaagtagctgggactacaggcayccgccaccactcccggctgattttttgtatttttagtagagacggggtttcaccatgttagccaggatggtctcratctcctgacctcgtgatccgcctgccttggcctccaaaagtgctgggattacaggcatgagccactgcacccagcttttttttcttttttttttttttttgagatagagtctcactctgttccgcaggctacagtgcagtggcgccatcttggcttactgcaacttccacctcccaggttcaagtgattcttctgcctcaggcagctgagtagctgggactacaggcatgtgccaccacacctggttcattttgtatttttagtagagacggggtttctccacgttggtcacgctggtctcgaactcccgacctcaggtgatctgcctgcctcagtctcccgaagtgctgggattataggcatgatccaccacgcccagcctaaataaaataaataaaatttattttattttatttatttattttgagatggaatctcactctgtcccctagtggagtgcagtggcacgatctcggctccctgcaacctccatctcctgggtgagctgagattgcgccactgcactccagtctgggtgacagagcgaggctccatctcaaaaaaaaaaatgggtcgtggtcaggtgcggtggctcatgcctgtaacccccctattttgggaggccagggcagggggatcacttgaggccaggagtttaagaccagcctgggcaacatagtgagaccctgtctcaacaacagcaacaacaattagctgggtgtggttagcatgcctgtagttctagttactcaggaggctgaggcaggaagatcacttgagtccaggaggttgaagctgcagtgagccaagattatgccactgcacttcagcctacgcagcagagtgagatcctatctcaaaaaagaaagaaagaaagaaagaaagaaattcagtccagatggattagaggcaacatctgtttttttttttttttttttttttttgagacagggcctcactctgtcacctaggctggagtgtcatggctcagtcttggctcactgtagccttaatttcctgggctcaagtgatcctttctgcctcagtctcccgagtagctgggactacaggcacccacccccatgcccggccaatttttgtagagatgggcttttgccatgttgcctgggctggtctcaaactcttgggctcagatgatccttctgcctcagcctcccaaagtggcaacatctggtttttygtttttattccttgttactgttcttttgtattgacccaagggttaattgtggtagcccatgcccatccctcgtctgtctccaaagggtaggcccggtaaccttgaactcctttggctctcaaaagggagctgggagttgctgcttgaatgctctcctccccagccccaggggctttgagagtgagctacggagggcagggcatttggggaccctctggcttctgcctctcattccgggcaggtggaggagcggcgggagcgctacatggactcctatgacatcgtgctggagaaggacgagactctggatgtggtcaacgggctactgcagcacatcctgtgccagggggtccagctggagatgcaaggcccctgaaggcgcaggctccagyccggcctgcaggccgtggtgaggaggggcgcctccccagagtctgctcccccgtgaacacagarcagaggccagggtggccagcagtggctgggtccttccgcgcccctccgtcctcctttccctgagcaccttcatcaccagaggcttgaaggaaccccgccatgtggcagggcacaggcactgttcctggtgaaccttggaccacagcatgtcagtgctctagggattgtctactccagggattttyttcaaaatttttaaacatgggaagttcaaacaaatataatgtgtgaaacagatcaaaatttttaaaatgaaaaaaaagctgctctgattcaggggatgtgggtsggggtagaacctggacctcttggccctgggggcacatgggatgcttctaggaacacagtttgagaaccaccacaaattggcctgagaccccatccgagcacagcctgattgtgtctgtctggttcagcgtggggctgaaagggtatgttctagcctacagtggtttgactttattctgattcagccatcaaacttgaaattcatttgggatcggtggggttgaggcaaccctgtctgagagccccctctttagggatccctgaggggatgcattcgtgtgtggctgtccccctatgccctaggctctcctttcccctcctcttatgggtcggggccactaaagtggatgacctgaaaaggggaatttagagcagggacctgagggagactgtgccaaggtgaaacaagtgatgtgtgcactgtggtcttgcgttattgggccgaccctgaagagccagttcagcattttcttagccttagaggaaatcaccagcacccttcctgcagtgttcggctagccgttggaaagttctgttattctgcagatgtgaagcgggaggtaatacagatgttactgaaggcctgcggtgtcccaggtgccactctgggcacttgggtgcctgccagttgaccctcacaatgaccccacaagtaggtgcagctcctcctgcttccagatggctcaggcaggatgggtaacttgcccaaactccatagctaggagctggagccaggatttgaatgtttctgaccaaagcccatgccttttgctgcatttctctgcttcaggcctgttccattcgtttttgggaggagggagtggccaccatctgaggctgggttagtaaccacttccagactttaatcaaggagctttcttggccggcgcagtggctcacgcctgtaatcccagcactctgggaggccagggtggcagatcacttgaggtcaagagtttgagactagtgtggccaacatggtaagaccctgtctctactaaaaatacaaaaattagccgggcttggtggcccgtgcctgtaatcccagctactcaggaggctgaagcaggagaatcacttgaacctggcaggcggaggttgcagtgagctgagatcataccactgcgctgtggtgacagagcgagaccctgtctcaaaaaaaaaaaaaaaaagacttcaatcagggagctttctggatgcttcggggccagagaatgtcggtcattgcccgtggggagcagtcacgtctcttaggggaccctgggcaagaagtgctgatgggggcagtttgctgtatgagtccagtcctgtcattttctttcctaagtccccaccccgtcctcacaatgctcgggtcataccaggcaagcgaggacagatggcctggttggtggctgaagtcctcctgcaagacactgtggagatctgaactccattacctttcccctagcaagagggagaagggtgggcaggtggtaacaggtggtggccaggagcagggagagatgggaatatcatagtattggaaatgatctatgggaaaggataatctgacttgtgtggtttaatccttgaactttgtaggttgtgtttgaggtcagggaccttgtctttcccattcaatggggacaattggaggatgaggatcatctctccacaccctgctggaggcctcccctctttacacattcaccccctccacagagcagggctcccttcccacagcgaagaccccaggttaggcccagggcaggcaggaaacctccagatggggagcccctgacctggggacatgctgtctggagctaatgaggccatggaaacagcctggtttaactttttccccaatctctgggtctaaaggcctcccacaatccccacttcatcccctagccattcccccctgcccctcaacctggtccaaaagacaccctaaggccattggtttaatcttttatttggaacaaaggaaaaaaggactgacaccagtttagcctttgagtgtgcagagctctgccctccctcccacccctcagccccaaatccaagatttcatagccctaacacccacccaagcagcttccctcacacatgccctttgttttcttcctctcttctatggttccttagggaaagccttctttagggatgaaaagctaactacagcccagtctggcctccagcagcccagggtcagctcagcctccactggaggcgagggaggagggcaaagggcatgggagaggtagggctgccctccaggagccttccccttccctaggagccagtcaggattggggaggaaggcagaggggtcctagggagctgtcacatagaggaaaaggggctgggagtggggatgacaagaagtacaaagaaagagaaagtttggggagatggataacaagctcagctgtgtcagtgatgtggaggggaggtatggtgggggaccagccatggccctatccaaccccaggctccacaggccccaaattggctttgcaaatccaaacattttaaggaagtggtttagggatggaagagaaacacggtagaggtctgtgctgtggattttcatctagggtggtgggaacaccagagatgtctcctctgccattgttttagttggctcctggacctcatcccagcagagggagggtgactgtcagcaggtcagtcccaccgccactgtccccctcgcagtgggcctctgtgtctcaggcctggccaggctccctgcccctcagagctcctcgtggacccgctcctcgtcctcatctgacttcagcttgagctcgtcgactgtgatcttgccgtcctggttgcggtcctggttctggaacatgtctcctatggttttctcagggtcctgcccaggcatgaggcgtcctttgccctcactcacttgagccttgatgaaggtggagaactggggcaggggagagccgggggagcgggcagtgagggtcatggccttgggaggggcaggggccccgggtggaggccagtgagtgctttctttttcttcttttttcccaggctcccccgcaccctgtaactcaggaagggctgggaaaggcactggtgctggggtcctggtgggggctggggtggaggcgtggcatggggatagtctgtgactggtctcaggtagggaacagcctgcatgtgtgcccaggaaaaagcagggacaaggagcctgaggcgtgggactcagcgcaggcaggagcaccagggcgggtgggcagtccggacgggggacgtcttcttcctcgatgcttcctgggtgcggggattgcgtgggcatggctattaggactgaaccttcacccacctcctccggagggacctcgccatccttgttgaggtccatgtcttcaaacaggttggcaggagggtccttgtgccacacaaacaggtagcctgtgggcagcccatcctcccgggacaccagctccacctcaaacagcagcacagcactgcctgggactccccgggctggagggagggcaggagagaagggaggggtcctagtcaggccagggtctgggcctggcttcactgtttcccagcccacaggccagtttcccctcctggggctgggctggagagtggggcatgggatgtttaaggagccatcctgaaggcattcctgactcctcccaccagtcatcagacccacagtgggcaggagcaaaagggacagatgccagtcagattacggtctcgggccgagcgcagtggctcatgattataatcccagcactttgggaggccaaggcgggtggatcacctgaggtcaggagttcaagaccagcctgaccaacatggcaaaaccctgtctctactaaaaatacaaaaattagctgggcacggtggcaggtgcctgtaatcccagctactcgggaggctgaggcaggagaatcacttgaacctgggaagtggaggttgcagtgagctgagagcacaccactgcactccagcctgggtgacagagtcagactccatctcaaaaaaaaaaaaaaaaaaaaaaaaaaaaggattatggtctcagcccctcacctccactctccccgtgggccaggtgcgggggcacgatgagctgccgcctctctcccacacacatgccctgcaggcccgtgtccaggccttcgatcaccttgttggccccgagagtcgcctcctggggggccccgtagtcatgcctgggggagagcagatgcccaggtcagcagccaccctgtcccctgccagcgcacacccctctccctctgaggtgggcccagaacaagccctcagttccggagttactcccactggtgacttgggccacgcagcagagtgcaggggcccagctgtgcagacgtggggttcccttctcatcttgcctctgccccctaaagtgtggcctcgagggctcatggctccctgcgtcagtttcccctctgtgaaatagaaagagcagttctcccccaactgttggcttcaccttcccttcccctgcgaagcagagaatttcatctcctcgacatgctccgagatggggacttacagaaagcagcaagaggttgaatgctcccctggcgctcgaggaccaagagggaggagcaggcgtcgggggtgcactgaggaggactccccatgcctgtgcccacccacctgcccagtcccggcccccccccggacccacgaggtgaacagctgggtgccgtccagcaaagaacagttgtaatggtatcgaacaaagtccccaagcttggtggtctcattgcaggtctcagatggccgggacagtgtcctgatttccaccacatccgcagggttgtggaagtcaatgacatggacgttgaagattagcacggcagagccagggatcttgtctcctgaggccagaatgggggagtgtggtcagctcagagcactaggagaggctacttgaggtctctccatggaggtccccagacctgataccccttcccgaccctgaggatccaaaggaggatgggacgggatgtttgtccagagtcaattctaacaaactttcactggggcagggggcaggggaaggcagctttccagtaagaaagcccttttccactcaccgtcttgcaaactcccagtaacttaccctgcggatcagcatggcttgcccacttgacaggtgaggacactgaggctcccagcacagctgggtcctgggggtatgctggttctgtttttccataaccaccctccctccccaaacttggctgcccttctccactgcggaaggggcgaagtggggcgctgccctggaggaaaccgatggagtctgtgtggcaggaatcagatggggtgaccagatgtaagctgcatgcatgtttttgtgatgagaggggccgagcggtgcctggaatcccactgtgggagggggtggcctagacacaatgggcagttcggaggaggagctgaggtggtggctggggaacgcccctaccagttccattctccccataggcgaggtgcggggggatggtaattctccggcgttcccccatgcaggcaccctgcagcccctggtccatcccggggatgatgtaaccctgcccgatataggtattgtaggtgtggttgcgggagtagctgcaatacaaggcgggagggccaggaagggagtcaaaggggccctccccttccaggcagctcagagtgacccccagcttcgtccacgtttcacccagcccccgccctcccacctcaagaccctcctgacctggaatcgaagagggtgccgtccatcaaggagccattgtagtggtagcgcatgaagtccccggccccggctctgcggacacagccgggggggagctccagcgtctctagctggacagcgtccttcgggttgtgcacgtcaatcaggaggacgtgaaagaccagcgaggcctgtggggggatcactgtccctggggaagggatagggcttgaaccataaaattggggagcaagccgaggctccttcttgactcaggaaggcccagtgggcaccatgcaagacactagccccactctccagagccctttcccgcccatcag

SEQ ID NO: 96888 - DNA, 28752 bp, Homo sapiens
gaggccaaggcaggtggatcacttgaggtcgggagttggagaccagcctgaccaacatggagaaaccccgtctctactaaaaatacaaaaaaattagccaggcgtggtggtgcatgcctgtaatcccagctactcaggaggctgaggtaggagaattgcttgaacccgggaagtggaggttgtggtgagccgagattgtgccatggcactccagcctgggcaacaagagtgaaactccatctcaaaaaaaaaaaaaaaaaagtgggatggatctactgggtgggtggtgatagtgggggcattaatttatttgggagaatacctaagctttcaactccaacatacaaagctttggatgtgttgacagatgccaaatacaaagcagctattttttccatgttataatacagattgcccttaacagtttttctgtcgttcgcttgcagtatggaaatagcagttgaaatgagatggaaaacttggtaactttggtttcccaaatgaatcttatgggtaaaagggccaaggtcaggttgaggggacatattggtcaccttcggctagataatacctcattccgcagtaacagacaactccaaaaatctcagtggcttaccacagcaaaggtttatgtctcattcacactacatccactgagggtttgctgtgcctgttctctgccatctgtgccgaaggaacagccgccgtctgggatgtgctggcctcacgtcagcaggataacagcaatggcaggaccacgtgcaggctcttaaagccttacatgattcaccttcactcacatttcattggccaccgcaagtcaagtggttatttgtgacatcactggggcaggaagagtgacaatatcaaggcatatctgattgggagagaccagtgggaaaggacagtaaatatttgaaacagtttatatagtctcacacagggccggtcatttctatgtccttatattgtgctttggttagaaaccaaagagcaagagatgaggtcactggcagctgctcagggccttatggggacagctccttagcagatccctttaccctgggctccttggctctgtagctccagcaacctcatttatttggtcactccactggcctaggtggggagtattaacatgaaggtcatgcatgtgattcaggacaccaccttctaggcagccaaacacttggccatctcaggtgatacccagaggttgcttgatgagcaaggaccagctcagaaccaagcagggaaggtgggtggctctgagggacattccatccaggacttgcttgactttgctcagccagccccagctcctgagcatataacaacatgcctatgtacagcacagagcctctttctaagataatgctagacttgcactccacactcactcattcactctttgagctccccgctttctagaggatgtactgacccagctatctcttttgctgagggctgaagttgctttggtattcgatttggtatgtccctagatcatcttcctcccccactgacaggtggttaatttcattcacagcaggtctagagttttccctaaaattttgggaatactttgcctccccacactaaacacgtgtttgtttagtgttgaactttgtcacagcttgagtaggcacagagctggcgggggcatggctggaggctggaacctaagactcttgagttggagagtggttaactttcagacctctgctgctcaacactgtaggacctggccagttccctgaacatctcagggctcagtttcttctttgcaacttaaaagtgagaacctaccaaggttgttttgtgtcccaattgagatatgagaggacttcaaaagccagcctcatggcattagcacaattggtgccacatggaatggtacacgtgggccaggttcctgaatcgccgctgggatatgtccagttctacctacctgtaacacaagtatgaacaaacacatcccagcagtgtgtgagtgttcctctgtaccgttgggttcatttctagataaacaacccagacatgcgagtgcagatcctcaaagattacgtcaggcagcacttccctgccactcctctgctcgattatgcactggaagtagagaagattaccacctcgaaggtaacaaagaaaaaacttcctaattccctcacgttggacaagtttattggaggaaataggagccacgttacattttgattatgcagctaaaagcaaacctagttttctagaaatgttatttttgtttcataactaaatttaacagacatgcactaaatgtcaactaggtgttgggtactttgctagatgctgggaattgaactgagtcagacacagtgtcgaccagtggggctggtagaaggtttttaaatgatggtcacaattcgtagtaatggtagtgacagtggaaaattatgaagaaaaaatgagaaataatgataaatgctttgaatttttttgccttcccagaagccaaatcttatcctgaatgtagatggtctcatcggagtcgcatttgtagacatgcttagaaactgtgggtcctttactcggtgagcattgcagctgttttcttcttcattacgtttgttgatttttgttgtttcctccaaactataaaagtaatgcatactcataatagaatatttgaaaaataaggagaggtataaagaagaaaacaaaaattgcctgtaatgctaccacccagagcaccccttttcttctcattcttgggcagtagtagtactgtctgtggggaggagggcagtcacgtgagccttttaaaactacaagttgatgtgtgttgcagggaggaagctgatgaatatattgacattggagccctcaatggcatctttgtgctgggaaggagtatggggttcattggtgagtccattcgttgttgttttaagtgtttttttttaaaccccacggttcagctacaccacttacccatggggttgagtttctttttctttctttttttttttttttaattttctttttgtggttcagtttctacagaagaaatgtcatatcctcttaatcattgttcttaatctttcctttcttactttaacctttccccttatctttatcattgttcctttgttcttagaaatgattgctagcccaggaaaatttttttttttttttttgagactgagtcttgctctgtcaccaggctggagtgcagtggcgcggtctcagctcactgcaacctctgcctcccgggttcaagcgattctcctgcctcagcctcccaagcagctgggactacaggcgcatgccaccacgcctggctaattttttgtatttttagtagagacggggtttcaccatgttagccaggatggtctcgatctcccaacctcgtgatctgcccacctcggcctcccaaagtgctgggattacaggcgtgaaccaccgtgcccggcctatttttattatttattttattttattttttccctttaaaattttgttttaatttaaaggaaaatagaatcagatccagcagctcccttgtacaaagtccgcctcatctacctatacagtggatttggactaaacttcccactgctttgtgtctactttttttgtgtgttagaaagatttcccttccttagcctcttcctctcaccaggcttatgaagctctaataaaaaagatgtgtttgcttcattttaggacactatcttgatcagaagaggctgaagcaggggctgtatcgtcatccgtgggatgatatttcatatgttcttccggaacacatgagcatgtaacagagccaggaaccctactgcagtaaactgaagacaagaactcttcccccaagaaaaagtgtacagacagctggcagtggagcctgctttatttagcaggggcctggaatgtaaacagccactggggtacaggcaccgaagaccaacatccacaggctaacaccccttcagtccacacaaagaagcttcatattttttttataagcatagaaataaaaaccaagccaatatttgtgactttgctctgctacctgctgtatttattatatggaagcatctaagtactgtcaggatggggtcttcctcattgtagggcgttaggatgttgctttctttttccattagttaaacatttttttctcctttggaggaagggaatgaaacatttatggcctcaagatactatacatttaaagcaccccaatgtctctctttttttttttttacttccctttcttcttccttatataacatgaagaacattgtattaatctgatttttaaagatctttttgtatgttacgtgttaagggcttgtttggtatcccactgaaatgttctgtgttgcagaccagagtctgtttatgtcagggggatggggccattgcatccttagccattgtcacaaaatatgtggagtagtaacttaatatgtaaagttgtaacatacatacatttaaaatggaaatgcagaaagctgtgaaatgtcttgtgtcttatgttctctgtatttatgcagctgatttgtctgtctgtaactgaagtgtgggtccaaggactcctaactactttgcatctgtaatccacaaagattctgggcagctgccacctcagtctcttctctgtattatcatagtctggtttaaataaactatatagtaacaatgaaggcatactgctggctcctggcatccatatcctttgatctgtattcctttgtaactgtacttttttccagacagggtatcactctgtcgccccagggctggagtacagtggcaccatcacagctcactgcagcctccatctcctgggctcaagcagtcctcccactccagcctcccaagtagctgggactacaggagcatgccaccactccaggctaacttttgtattttttgtggagataaggttctgctgtatttcccaggctcttctggaactcatggactcaagcaatccatcctccttggcctcccaaagtgctgttacaggcgtgagccactgtgcctggcctggcctgaactgtactaatagtttcagtatatatggttttaaaaatgctcatctacggtcaggcgtggtggctcatgcctgtaatcccagcactttgggaggccgaggcgggtggatcacgaggtcagcagatcgagaccatcctggctaacacggtgaaaccccgtctctattaaaaatacaaaaacttagccaggcatggtggcgggcgcctgtagtcccagctactccggaggctgaggcaggagaatggcgtgaacccgggaggcggaggttgcagtgagccgagacccgcgccactgcactccagcctgggcgacagagcgagactccgtctcaaaaaaaaaaaaaaaaaaaattagcctggagtggtggcgggcgcctgtagtcccagctactcgggaggctgaggcacaagaatcgcttgaacccgggcggcggaggttgcaataagcgaagagcgcgccactgcactccagcctgggcaacagagcgagactccgtctcaaaaaaaaaaaaaacaaaaaacccaaaacaaaacaaaaacaaaaagaaacaaaaaaaaacggataacgagtaactcattcatccctcatccacttagctggggctagatcttataaaaatcctgtattgccactcaaggctttaacaacaggtgatggtctaaggtggctttactcgacaaaatgactgcagagagcatgctacccactaaggaaaggaagcgagccatactcgcaccgacgccctgggggtaggcctggggcgaagtcttctggactgggcgactgttactgacggacctcaccaaggcaggcagagctgctggaggcgaggcggcgctgctggaggcgaggcggcgctgctggaggcgaggcggcgctgctggaggcgaggcggcgcatgtgcggccggcgggcgacctggccccgccccgcgcgcactatttaatcccagaatccctctgtgtcgtaccaacagccgcatcgttccgaggctgtggaggccgggcgcagcggcgtcaagatggcggctgcggcagtggcggcggcggcggcggcggccgcggctgcatctcttcaggtactggagatggagagcatggagacggccgccgccggctcggcaggactggccgccgaggtccgaggyagcggcacggtggacttcgggcctgggccggggatctctgcaatggaggcgagcgggggcgatccgggcccagaagccgaggatttcgagtgcagctctcactgctcagagctgtcctggcggcagaacgagcagcggcgccagggcctcttctgcgacattaccctgtgcttcggcggggctggaggccgcgagttccgggcccaccgctcggtactggctgccgccaccgagtacttcacgcccctgctctcgggccagttttccgagtcccgctcgggacgggtggagatgcgcaagtggagctccgagccggggcccgaacccgacacagtggaagccgtaatcgagtacatgtacaccgggcgcatccgcgtcagcacgggcagcgtgcacgaggtgctggagttggccgacaggtaggcgagggaggcgggagcgcggagggcggcgggcgcggagagggggagatgctcgctggcggaggggagggcagtgcctgccacggcagctcgcgagtcctgagtgaatgcattggtttcacactcgctgagcgcctgcttgggggcagccaccgcggtgggcgaggaggatgcaccatcaggtccggcgagggcgccccgcgcccaaggagctcagatactaggtgatgggacaaaagtgatgaaaaggaaagtcagtatgtggtaactgttgtgctgacgttcaaaaggaatgaaaggctagggattgaataaagatctttctgaagaggtgaagtttagatcgacctctgaatgtcaaaaaataactgaccgtgcaaagatggggaatgaatattccagacagcgcaaacgccctcaggcaggatccagtttggcttagagaagagaattaaaatatagtccagtgaggctggatctagtggatgaaggggagaaggatgcgtgagatgcgttggaataaggagtttggatttcactaagtgtgataggaagctgggtaaagaaatagctsatttaaatattttaatattattctgccactgtgttaaacggattgtagggagcaggaatgctccagagactggttagaaggcaggtaataccgtttatagagatggagaggcgtttgttttggcaattatcatcttacagatacattaacaaaaatgcctattgagcgcctattacgcatcagctcagatgcgggattctaaggtgctagggtttcagcagtgatcaaaacagacaaaagtccttttccttatcgcacttaggttggtagatggacggtaaataagtaaaatgtatagcctgttggatgattgttaaatgtatagcctgttggatgattgtcatcactgatgaaaaataaagcatggggggagtacatagaaactgctgggggagaggaagtgttttccaaattggrtggatagagaatgccctatgaagaagacgttttgctaagaaccgaaggaggtaaggtagactgtgtcaggtaggggacacaggtacagaggctctgaggtggagcttgtatgttagagaacagtggggagccagtgtggctgtatcaaagggatgcaggatgagaggaacaggagaagccccaggatggtaatgggcagggatccagatcccgtagggccttgatggcctgtggaaggacatgagcttttactctgattgaaatgggaaggtttggggcagaggaatgatgcagtctgatttgatgaatagtkctgtgctgaaaaaaggatgtggcggccaggcgcggtggcccacgcctgtaatctcagcactttgagaggccgaggtgggtggatgcttgaggtcaggagttcgagaccagcctggccaacattgtgaaacccctgtctctactaaacgtacaaaaattagccgggcgtggtggygtgcctgtaatcccagctgttggggaggctgagacacaagaatcgcttgagcctgggaggtgggaggctgaggttgcagtaagctgagattgcrccgctctactccagcctggcggacagaacaagactctgtctcaaaaaaaaaaaaaaagaacaaaggatgtggcattggggaggagggggcaccaagggcagacgcagagagactagtgtaggaggttgtggcagtggtggtggaggcttcgattgaggagggagaagtaaaggtgatgagaactgctctggttccagatatattttgaaagtggatgagatgaatttgctgatggatttgacgtggggtataagggaaaagactgctacctttttgacccaagcaatgggaaggatggaattattaagatgtggaagattgcagaagagcctgtttgggagtaagatcaggagtttttggatttggttaaggagatccctgggaagtgcatgggagctagagatacagattggggaaaattaccgtataaatggtaactaaagccttggggctggatggtattacttaaggagtatacatagaaaaggggcagcggggagagagtaggcaagactgagccctggggttctctagaatgtaaaatagccggctgggcgaagtggctcacgcctgtaatctcagcactttgagaggccgaggcagatggatcacttgaccagcctggccaacatgatgaaaccccatctccactaaaaatacaaaaattaggccgggcgcggtggctcacgccagtaatcctagcactttgggaggccgaggtgggcagatcacgaggtcaggagatcgagactatcctagctaacatgatgaaaccccgtctctactaaaaatacaaaaaaaaaaaaaattagccaggcatggtggcgggtgcctgtagtcccaggtactcaggaggctgaggcaggagaatggcgtgaacccaggaggcagaggttgcagtgagctgaggtcgtgccactgcactccagcctaggcaacagagtgagactccatctcaaaaaaaaaaataaataaatacaaaaatacaaaaattagcagggcgtggtggcaggtgcctgtaatcccaactactcaggaggctgaggcaggagaattgcttgaacccgggaggtggagattgcagtgagctgagattacgccactgcaccccagcctgggcaacagagtgagagactggatctcaaaaaaaaaaaagaatcttaaagaggagactgatctcatggaaatgtagaaaagaaggatatcaaggagggagtagccagtcgtgtcaactctgtcaacccattagtgatggttgcaggtcagagatgccattgacaagagctgttaagccttgctttataaagaggatcagaaacgtgtaaatgttttgggggacaatcccaccaaggtaaaagatactagagcatgtctgtgtgctgctgaaaatgattcagtagaagatgagtaattggtgttacaggagcaggggaataattgcaggagtaaagtccttgcaaccaagaagggaactgtcgggatggaagaggggtgatccctttcctccctctcataaaggggtcacagctgacattctttttttttttttttttttttttttgagacaagagtctcgctctgtttcccaggctggagtgcaatgtcgcaatctcggctcactgcaacctctgcctgccgggttcaagcgattttcctgcctcagcctcccaagtagctgagattacaggcatctgccagcacgctcggctaatttttgtatttttagtagagatggggtttcactgtatcggccaggctggtctcgaactcctgacccgccttggcctcccaaagtgctgggattacaggcgtgagccaccgcacctggccacagctgacattcttataataaaagacaggttatataggacagagaaaagcatagcagattattacaggcacatttgtgctcgagagtcatacaaaatatgaaaactctaagggtgactgaagtttttataccatcctgtggttatagaaaggaataggggcttggaatgcatcaagayaggttatgggagagccaggagaggaaagcctggcaagcacaggctgtcctgttatgcaggtgaaacctcacgggcagcagctgtcagaaaaaatggatgtagcctgtgggaaaagtttctgtcagatctttaaagtgtcagaccttagcctccttagtttttcctgtgagtgcgtctttcctcgatctgagtaaggggaggcctcagagaaagcctgtttgcatccctgttttccttgctgtttacctcattaatgtagattttctctacagatgcaaatcgcccccacaaaagacagctcttcaaagctattcctgtggtttcggcccctctgaatatgtcaaatgagtatattttggggtgaaatattctggttattcttcagtgtagaatccatattaaaattggaatggttggactgcaaagtatagggtacaactgctggtggattgggtggtgggaagatgaagttcctgcttgattgtctctgttttctcaagaggctgggtcatcaatgagaaggtggagtgggatgggcatagctctgagggagagaggtttgttgcatgaaaatgggtggaaaagggtcattgcactcactcaaacctaggtttgattctgtcatatcatcttgagtttgtcagatttgcycctgctctattggggagttagaggagaggagacgatactctgggcattttactaaaaactcttaacttctctccatctgtcagcagctaagccaatggcttttgtcaggcactgttcaaagtgccctgcaaccatcacatttaatcttcccatcagctctgaggcaggacccgcccccaccccccccaaaacccctaagtacatatgtctgttgatgatcatgcctgcctcactgggcatttgtaaggatcagaaatataataataggatgtgcacaatgcccctcacatgacagatgccaagtgtatgacagctattttcatagagcattgcttccagacacttaagggaatttgtctccaaattacctggagtgcctgctaaaactaggagcccagggcagcctgggaatcaggtgacactggcacccagacatgtctgggagccactatatcccataccactctactttgtctttgctttatctctaaaatgatatgttctcttaaaagagtgaagggagcctgccttattgattttcatatcatagttaagagagttactaagcacagtcactaataacaaacggttactgaattgcgagaggcctgaattgatgaagtgattcttaatcttgtttaaggttcttctcggttctggggacttagtctttttaaagcagtggtctcaaattggctatcctcaggctgattgctgccagatttatgaatttgtctgaaacgattgtggtttttttaaattaaactttaaatggatttaggtgagcagacaatatctagtcagctacatgccagatcactttcttttgttttttaacctacacatgctttgtactatgtcgcccaggatggagtgcagtggcgtgatctcagctcactgcaacctctgaccccaggttcaggcaattcttatgcctcaggctcctgagtagctgggataacagatgcacgccaccaygcccagctaatttttgttgttgttgttttgttttttgttttttgtttttttgagatagcatctcattctgtcgctggagtgcagtggcatgatctcggcttactgcaacctccacctcccgggttcaagcgattctcctgcctcagcctcctgagtagctaggattataggtacctgccaccacgcccagctaattttttgtatttttagtagagacggggtttcatcatgttggccagggtggtctcgaactcctgacctcaggtgatccacccacctcagcctcccaaagtgttgggattataggcctgagccactgcaccyggcctgaaccactgcgcccaaccctacacaatttttttgttgtgtttttgttttgttttctgcttcttcagatgtttgagtttgctttgcatccctgctttgatgagaacccagttcaggacaaatcttctcagtaccccatcccctctggctgcccaaagaaaaagctctggtgacgagattaaaacctctgacacagggagtatatattcagggcaacttgaatctatgatcctggagaaaaatttaaaaatgaaataaaacctctagcagaaagcctaaatctgagtaaggggggcgttccttctgatatctgactgagcagacccccaaagaagttcctgcctggctgttactttataccataaagtcccttcacttagaccctgtttcatttaagaggaggctggtgggctgggcatggtggctcacacctgtaatctcagcactaaagtgggcagattgcttgagctcaggagtttaagaccagtctggccaacatggcaaaaccttgtctctacaaaaaaatacaaaaaaaaaaattatctgggtggccaggcacagtggctcacgcctgtaatcccagcactttgggtggccgaggtgggtggatcacctgaggtgaagagttcgagcccagcctggccaacatgatgaaaccctgtctctactaaaaatacaaaaatttagctgggtgtggtggcaggtgcctataatcctagctgctcgggaggctgaggcaggagaatcgcttgaacccgggaggcggaggttgcagtgagccaagattgtgccattgcactccagcctgggcaataagagcgaaactccatctcggggagaaaaacaacaacaacaacaacaacaacaacaacaaaaaatatatatatatatatctgggtttggtggcatgttcctgtagtcccagcaacttgggaagttaaggtgggggaatcacttgagccctagaggtcgaggctgcagtgagccatgattgcaccactgcactccagcctgggtaacggtgagaatctgatctgtctcaaaaaaaaaaaaaaaaaaaaaaagaggctggtgactagcaaggaattaggaaaggatggcaaagacaagtttggatagggatttgcctttgccaaggacaaattaaagtgaaaataaagtgtgtggccgggcgtggtggctcacgcctgtaaccccagcactttgggagggcgaggcaagtgggtcacctgaggtcaggagtttgagaccagcctggctaacatagtgaaaccctatttctactaaaaatacaacaaattagccagatgtggtggcgygcgcctgtaatcccagctactygggaggctgaggcaggagaatcgcttgaacccaggaggcagaggttgcagtgagcagagatcgcgccagtgtactccagcttgggcagcaagagtgaaacaccgtctctaaacaaaaragaagaaaaacctccagccagacacagtagcatgtgcctgtagtccctgctactctggaagctgaggcagaaggattgcttgagcccaggagtttggggctgtagcgcactgtgatcgcacctgtgaatagccactgcagcatagcaaaaccctgtctcttaaaataaaaactctattttgtgtttttatatatgtatatgtgtgtatatatgtatgtatttcacatatatgataggtaattatataaactaatataaataatactttatattttatatataaataagatttttatatatgcttttttttttttcttgagacagagtcttgctgtgttgcctaggctggagtacagtggtgcgatcctggctcactgcaaccactgcctcctgggttcaagccattctcctgcctcagcctctggagtagctgggattacaggtgcccgccaccatgcccagctaatttttttgtatttttagtagagacaaggtttcaccatgttggccaggctgctttcgaactcctgacctcatggtccacccgccttggcctcccaaagtgctgggattacasgtgtgagccactgcgcccggcctgtatacgcttttttttaaagagacagtcttgctatgttgcccaggctggagtgcagtggctattcacaggcacgattatagcttactgcagccttgaactcctgacctcagccaatcctcttgcctaagccccctgagtagttgagactacaggcatgcatctccctgcccagctctatatgtgctttttatttttatttttttgagacagaatctcgctctgtcacccaacctggagtgcagtggcgcaatctcagctccctataacctctgcctcccagattcaagtgattctcctgcctcagcctcccgagtagctgggattacaggtgcccaccaccatgcccagctaatttttgtatttttattagagacaaggtttcaccatgttgttggccagcctggtctcaaactcctgacttcaagtgatctgcctgcctcagcctcccaaagtgctgggattacaggtgtgagccactgcgcccagccatgtgcctttttttaaagagacttggttttgccatgtttcccaggctggtcttgaactcctggctcaagcgaccctcagcttcccaaagtgctgggattataggtgtgagcccccatgcccagcctatatgtgcttttaaacatactttgccagcacaatattttctaatttggtggtgttttttgttgttgttgttgttgttgctgttgttttcagattttgtgtgtaaagtgagattaatctaactatttccatatgtataatttagatgctctcgaaatgtgaccataggctgggtgtggtggctcacacctgtaatcccaaacactttgggaagcagaggcaggaggattgcttaaagcaaggagttcaagaccagtgtagacaatatagtgagaccccatctctacaaaaaaataataatttttttaaatgtaggccatggccaggcacagtggcccacgcctgtaatctcagcactttgagaggctgaggtgggtggatgcttgaggtcaggagttcgagaccagcctggccaacatggtgaaaccccatctctactaaaaatacaaaaattagctgggtgtggtggcacacgcctgtaatcccagctacttgggaggctgaggaaggagaattgcatgagcctgggagaagggtgtcgccgtgagccaagattgtgccactgcacaccagcctggccgataaagtgagactctgtttttttggagtttttttttttgggggggatagtgtaggccgggcatggcagctcacacctgtaatcccagcacttcgggaggccgagggaggcggataactttgaagtcaagagttcgagaccagcttggccaatatggtgaaccctgtctgtctctactaaaagtacaaagattagctgggtgtggtggcacacgcctgtaatcccagctactcgggaggctgaggcaggagaattgcatgagcctgggagacggaggttgccatgagccaagattgtgccactgcacaccagcctggccgataaagtgagactctgtctcaaaaaaaaaaaaaaatgtaggccgggcacggcagctcacgcctgtaatcccagcactttgggaggccaaggcgggcggatcactttgaggtcaggagtttgagaccagcctggccaatatggtgaaaccctgtctctactaaaaatacaaaaattagctggacatggtggtatgccccaactactcaggaagctgaggcaggagaatcgctggaacccaggaggtagaggttgcagtgagccgagatcacgccactgcactccaacctgggtggcagagtgagaccctgtctcaaaaaaaagaaaaaagtaaccacataaaatatgcacatttgaaaaattaatcttttctctttttcttgattttaggttcctactcattcgtttaaaagaattttgtggagaatttctcaagaaaaaacttcatctctcaaattgtgtggcaattcatagcttagcacacatgtacaccctgagccaacttgctctgaaggctgctgatatgatacggagaaatttccacaaagtgattcaggatgaagaattttatacgttacctttccatctcattagagactggctttcagatttggaaattacagttgattctgaagaggttctctttgaaaccgttttgaaatgggttcagagaaatgctgaagagagagagagatactttgaagaactttttaaattgctcaggttgtcccagatgaaacctacctaccttactcgacatgtcaaaccagagaggctggtagccaataatgaagtttgtgtcaagttggtcgctgacgcagtggagagacatgctctgagagctgagaatatacaatctggcacatgccagcaccccacttctcatgtgtcactattgcctcgttatgggcaaaacatggatgtgatcatggttattggaggtgtgtcagaaggaggggactatttaagtgaatgtgtgggataytttgttgatgaggacagatgggtaaatctgccacatattcataatcacctcgatggacatgctgttgcagtaacagaatcctacgtgtatgttgctggatcaatggagccagggtttgctaaaactgtagaaaggtataacccaaatttgaatacatgggaacatgtttgtagtctgatgacaagaaagcattcttttggactaacagaagtcaaagggaagctctatagcattggaggacatggcaactttagtcctggttttaaagatgtgactgtttataatcctgagcttgataaatggcacaacttggaatcggcaccaaagattcttcgagatgtcaaagcactagccattgaagaccggtttgtatacattgccgcccgcactcctgtagaccgggacactgaagatggattaaaggctgtaattacttgctatgatacagagactcgacagtggcaagatgtggaatctttgccgcttattgacaattactgctttttccaaatgtctgtggtcaattcaaacttttatcagacagcatcatgttgtcccaagagttattgtttagaaaacgaagaggcagtaagaaaaattgccagccaagtgtctgatgagatccttgaaagcttgcctccagaagtcctaagcatcgaaggagcagccatttgctattacaaagatgatgtcttcattataggaggctggaaaaacagtgatgatattgataaacagtatcggaaagaagcctaccgatattgtgcggagaggaagaggtggatgcttcttcctcctatgccacaacctcgttgtagagccactgcttgtcacgtgaggatcccataccggtacttgcatggcacacagagataccctatgcctcaaaacctgatgtggcagaaggaycgcatcagacagatgcaagagatacatcgtcacgccctgaacatgaggcgagtgccaagctctcagattgaatgctaggttctctcaagcgtgccgattaaaactgttacacccrtttcrtgaagctgaagatacccaggctgttatttaaaaaagtatgtcgataacttattttctacatgaactgattattaccccatataaaggaaatagagttaaaaactaaagaatgggagactcagttcaatacatggtcattttgttagcttgcaatttttgtctttggtttgtttgtttgtgctagctaaataagatcttattaaggacaagtggaaaaatcaggtgtagttgcttagctgttttcctgccaacgagttatractcctttgtcttgaggacttacgttttgaacatgctttaagcaccaattttatttgcacatttactttgatattctttttcattttttattaaatgattggttttggcaagatctgacttctgcattgagccctcatctgcaggaggcatgtgcaatagtgagactgaaatttgaatgaaaacactcaatatttcagcaagataatttgagaatgtttgcattgatattttcttatgtttatctagaaatgccagtttccttcctagaagatgtgactgatgagaaattttttactggctcatgcattttttgaatatttttcattagcagctgtttatagactttaagccttcaatctgaggtgacggtagttggcaaaagtatagatctttagctaattgactaaatacagagcaagttacatgtgtgaactttgtttctctaagaagaaaagtattagtgtagactgggaaatcaaaggcatttaaaattttttcaacatttttttcaggagttgcaggattatttgaggatatgttaatgagtgtaaataatgcctatgacaatcgacactcaatgccttccattttaatttttgctctaatgcatattatatagaatcttcattattccttttctctttttttttttttttttgctcatgttgcccaggctggagtgcagtggtgcaatctcggctcactgcaacctctgcctgccaggttcgagtgattctcttgcctcagcatcccgagtagctgggattacaggtacccaccatcacgcctggctaatttttgtgcttttagtagagacagggtttcaccatgttgaccaggctggtcttgaactcctgacctcaggtgataygcccgcctcagcctcccaaagtgctgggattacaggcatgagccaccgtgcccagtccattattcttttctacaagaaactgtttttttccaaaatgggaaggaagtcacaatttagagaaatgttgctaaagagaagccttattatttctgattgttatattttatccagttgccccacactttcaaactttgcctgagcctaggataccaaatttgggtacataattttggcttttaaaggtttatgggctgggcacggtggctcatgactgtaatcccaacactttggaggaggctgaggtgggcagattttgagcccaagagttcaagaccagcctgggaaacatagcaagatcctgtctctacaaaaagtagaaaaattagctgagtgtggtagctggcacgtgcctgtagtccttcctacttgaagccaaggtgggaggatcaccagagcctgggaaggttgaggctgaaatgagctgtgatcatgccactctaccttgggtgacagagagacggtgtctcaaataaaaattaaaaagatcactkaagctatcttttatttagttttatacgttattcgaattatcttatgtctcctgagctttataaaagttagcactcaaattgacttttttttttttttgggccaggggatggggtcccactttgtcacccaggttggagtacagtggtatgatctcggctcactacaacctccacctcctggatgcaagccatcctgccacctcagcatackgagtagctgggactatgggcacgcgccaccacgcccagctaattttttttttgtatttttggtagagatggggtttctccatgttgccgaggctggtctccaactcctgggctcaggagatccacccgtatcagcctcccagggtgctaggattaggtgtgagccaccacgcccggcctcaaaataacttttttttttttttttgaaacagtcacgctttgtcgccctggctggagtgcagttgcgcagtctcagctcactgcaacctccacctcccgggttcatgtgattctcctgcctcagcctgctgagtagctgggattgcaggtgtgtaccaccacgcccggctaatttttgtatttttaatagagatggggtttcaccatgttggttaggctggtctcgaactcctgacctcgtgatccgcccacctcagcctctcaaagcgctgggattacaggcatgagccaccatgcccagccctcaaatttactcttaatgctcagttaatataaaggattcctaacagtttacaatgtggttttcttgtttttgttgttgttttggttttttaagatgtgaggtctcaccttattggccaggctggtctcaagctcctttcctcaagcaatcctcccaccttggcctcccaaagagccacctgtccartgatttatcctgtttcttaaggactgtctttaccttcttagacattttgtcataccattctagaagtcaaattccaagtgcagtgattttttttttccctagtccattatagttaatcttcttgttagtgatcaaataccaaaagagaaaagcacaaccagaaattttggctatttgctgcaagttgtaggtcttgggctctatactaagaacttgaaatttttaaattagtatccctgcctaggtgaaaagtttttaataaatgtgttgaaaatcaactttaaatccatttaatttagactggagtgggcgtgagaaactgcaagtctatttctacatataaggatatattattatattgtcccatcccaccactacctttttctcaatttctatttctttgtagttattttagtaaaagccatttggattctgagaagcactaattcttagctgtgataggtctatgcaagtaagacagaatcattaaatgaagctcactaaatgaagttctcatttctctccaacagactgtgctagcaaacttcgttttcttgattgtatttaaataatttagtatctcactacgataatagtttttaactggaagggtgtgatgtgttttttgttttttgttctcagagttgtcttctgagataattattaccaagtcatttgtggggttgtgtttttttcacatcatgtgacagaaattataactcataagatttaggcataatctggttttaaaaccttgattgaaactgttgttttttaacttagcaggcagcctaggccatggctgaaaagaaggggtaagtccttcattgcatgatgatgtgtgcaggttttcctgattttctaatttttatttttgaattcacatgtgtaatttcacatcaataacttgtgtttctgaaatatcctaactaacttgttaataaggaaagaaaccagatttgcttaaatctgttcaaggctgacattctgaaattctaaactggaaataacttcccagagtatttggaaaggttctaagtacaaggatcaggcctaaaatagctccttgggaaagaaatttcctttttgatgagaaaacttaaaatactgtttttggtaatgtaagcagttaaaaacatgactttagaaagacagcttaatgcgtattcaagcaaacctttgttttgttgcttttgcttttgtttgtagaagagagaggaagttattataccaaaaagtaatagtatatgtaactttgagtgaggctacttatatcttagaatgggtatccttgaactatatctaccccaccatggcttaaaaaaatcagtggtatatattgagaatgtcagtcatgagcttagtgtttaagtaacacatcccacttacagttgtttgcatgattagtcttgtgtatcatgatgttcaactttgcttttgctgtgccagttcaaaaatatcttttttgctaaaaactcttaaaattcatgacataagttttgttttgatcacccggttttatatagtatttctgggaccaaaaaatttaaatatacctttttaatataaaacagaagtttgaagctggaaagatagtgtttatggaagatttgtgtgcttttgtgttttttaaacccgtcaggctgctggtaaggcagtttctagggctcacttttcctccttacctcttgactagtgtagcatgtggtatgtttaaaatatttcattttctgcttcgtaattctaaggtcaacactatactgtatgtagacaggagagctgatttgtatattttagttatttggtctaatcaagcataactaaagggacttcttttttgatacttttctcaaattaagtttaaatatagtatacgggccacatttcatgtctttgaaagtgttgtacattactgtaaaccaagtactctgtctacaccagagggtgctttaactgcaaaatatttgagaaacaattcagtctctcaaacattttggcacagttcatcactccagtttgttactttcttgagaatagtccattttttgtttttgttattataccgtatgttctggtcattggaaacagaacagctcatagttgggtgatgtaatataataacagtaatataacctagtagtcattttgcttcaagtaatttaattagatagcaaaatcactgcggtttgtttattacacttgtagggctttttgtcttactcagtgaccatcactacgaatgtcttacattgaagcacagactgcagagcacttgttaacttagtcctcctgcataatgcactcgtgaaaagtagtgcttgctaggtgtttgaagattttatgatccgtgtgcttgggctcgttgagttatttgtaaaataaacatttagtttgagttgatgcagtaagttttttggactagtagtatccaggtccctactctactgaaaatataatcttcactatctccccttaagtcagaggagatgtagcatttagaacaccttgagacatgacattgtaaaatagcttgttttatgttcctgaagctatcttgttctctgttaaagctactaattgtctcagtgtaagttttaaataaacatatttctttaaagctggtttgtactgtgtgacttttttttcttatttatgcactgtcggatataattgctttcttccatccctcctactccctcattcatccagccattggctctcttaagttgaacattttccagtactcttcaaagtttaaacactgcatttttttaaaaaaagaattaattcttattgcttagactttttattagctaaatgaagaggctcatacaggtagggtacttgtcgaagcagaatattttacttcatctcgcagtgctaatcctgggaagttgtcccgtctagctgcatattcctcaacattggccagccctggtactacacagcagctcagagcactgcggtatatactcatgtcatgagcatcataccactcatcggtcttttcatcatagcactcaacattaaaggtggtggtaaaaccattaaagccacccaccacaaacaagaggtcatccaccacctcgatgccaaaattgctacgaggattaaacatagtggggattgtgcgccaagtgttagccacagggctgtaggcttcggcactcctaagtcgattagctccatcaaagccacctacctgtggatagcaaaagaaacacggttgactgctaaccattgattctgttcactgaggaagcccttgttgggggtaccagtgatctcataactccctcttccattatcttccatgaaaaaaagcttttcagccgggtgcagtggctcacgcctgtaatcccagcactctgggaggccgaggcgggtggatcacaaagtcaggagatcgagaccatctgggctaacacagtgaaaccctgtctctactaaaaatacaaaaaattagctgggcatggtggcgggtgccggtagtcccagctgctcgggaggctgaggcaggagaatggcatgaacccgggaggcagagcttgcagtgagccgagatcctgccactgcagtacagcctgggcaacagagcgagactccatctcaaaaaaaaaaaaagcttttcaaatacttaccaatagtagcataaacccatttactaatacaaaatctaggggtaatgtgttttttgtgtgtgtgtggtactagataaacttaccgcatatacatgttctccataagcaatcacgcctattccactcctcctgcttctcatgggtgctatgactgtccactgattactttcagtgttatacacttctgctgtgaacaggcactcgtttccattaaacccaccacatatgtagacctgtgtgaagagttccaagattattaaaattcccactctagggagtagaaagaaaggatatgtgtgtggtggtagtgggcacttaattccagtctgtacagtctgaatttcttttttttgtatgtgcatgcattgctttttatttattttttacagacagagtctcgctctgtcacccaggctggagtccatttgcaccatctctgctcactccgcctcctgggttctaacaattctcctgcctcagcatctggagtagctgggactacaggcgcacactgccacgctccgctaattttttgtattttagtagagacgaggtttcaccgtgttgtccaggctggtctcgaactcctgagttaaggcaatccacccctctcagcctcccaaagtgctaggattacaggcatgatacactgtgcccagcctatttatttttattttttgagatggagtctcactctgttgcctgggctggagtgcagtggagctatcccggctcactacaacctccacctcctgagtagctgaaattacaggtgtgtgccactgtgcctggctaatttttgtatttttagtagagaccgggtttcaccatgttggccaggttggtctcaaactcctgacctcaagtgatccgcccaccttggcctcccaaagtgctgagattacaaacacaagacactgggctctgccacattacacattacttttttttttttttggagacggagtcttgctctgtcatcaggctggagtgcagtggcgcaatcttggagcactgcaacctctgcccactgcagcctccgcctcctaggttcaagtgattctccgcctcagcctcctgagtagctgggactacaggcgcctgccaccacacccggctaattttttgtatttttagtagagacagggtttcaccatgttagccaggatggtctcaatctcctgaccttgtgatcctcccgcctcggcttgccaaagtgctgggattacaggcgtgagtcaccgagcccagcctgcattactttttttttcttttttcttttgagatggagtcttgcactgtcgcccgggctggagtgaaatggcgccatcttggctcactgaaatcctctgcctccggggttcaagcgattctcctgcctcagcctcccgagtaggtgggattacaggcgcccgccaccaggcctggctaattttttgtatttttagtagagacagggtttcactatgttggccaggctggtcttgaactcctgacctagtgatctgcttgcctcggcctcccaaagtgctgggattacgggcttgagccaccgtgcccggctttgcattacttttcaataaacaacataaaagacagttgcaactagtcaccttgtcaattgaagaaagaatgagtactccaaagtgaatactgccactgcgtcttccatccaccccaaaaaagagcagtatcatttctggtcttgtactttgcatccacatcttcccctcccaccctggtcctttaccttcccataaagtgttgtggcgcttgcatcactcctctgttcgtgcatgggggcgatgagtgtccattgattggtctctggctcataacgttcagcagtgtttagacgcacgtagccatcaaatcctcccatggcataaataaaattgccgaggactgtcacactgacatagcaacgtctggagtgcatcggggccacctgatgccaagttttcttgactgggtcaaaacgcttaacactattgaaatagtctacactatcaaaccccccaatgatatacacatagcctttcaaataggctgccccatggtaggcacggggactctcttcctcacaagtaacattcacccatctgtctgcccgagcgtcatatgcctcaatggcattggtggggctcccaccactccagccaccaattgcaaagaggatggcatagggcaagcgtggtctggtgagtgggttggtgaaatcagaattagagggtccattcatgttgaggtcatacatggcctttagggcattaatgatgactggtttgcattcctcactgtctttgacatagtcattcatcttaacattgttcatgaagtactcagcatgcattagggccaggcgaacctaagaagcaaacgcagaaagtcattcaggtgacgtgagagtgccaggaaatcccacatccttaactcccatttttcgatctgcctttgaattgctggaaatattttggtttgtttttgaaatgtataagtcacagtttaaatagtcgattttgaggctcacaccataatcccagcactttgggaggccaaagcaggtggatcacttgaggccaggagtttgagaccagcctggcaacatagcaagaccctgtctctactaaaaatacaaaaattggggccaggcgaggtggctcacggccgtaatcccagcactttgggaggccgagatgggcggatcaccggaggtcaggagttctagaccaggctagccgacatggcaaaactccatctctactaaaaatacaaaaattagctgagtgtggtggcacgcacctgtaatcccaactactcaggaagctgaggcaagagaatcgcttgagccagggaggcagaggttgcagtgagccgagatcaccctactgcactccagcctgggccacagagcaagactccgtctcaaaaaaaaaaaaaaaaaaaaaaaatacaaaaaccaggctgagtgcagtggctcacgcctgcaatcccaacattttgggaggccgaggtgggcagatcacttgaggtcaggcatttgacaccagcctggtcaacgtggtgaaacccccatctctactaaaaatacaaaaattagctgggcgtggtggcaggtgcctataatcccagctactcaggaggctgaggcaggagactcgcttgaactggggaggtggaggttgcagtgagccgagatcgtgctaccacactccagcctgggcaacagagctagactccaactcaaaaaaaaagaaaaaaaaaaattagccaggcatggtgccgcgtgcctgtagtcccagctactctggaggctaaggtgtgagaattgcttgaacccaggaggtggaggttgcagtgagctgtgatcacaccacagcactccagcctgggtgacagagtgagacttgtctcaaaataaataaatagttgtcagccgggcgctagctcacacctgtaatcccagcactttgggaggccgaggcaggcggatcacgaggtcaggagatcaagaccatcctggctaacacggtgaaaccccgtctctactaaaaatacaaaaagttagctgggcgtggtggcgggtgcctgtagtcccagctactggggagcctgaggcaggagaatggcgtgaacctgggaggcagaggttgcagtgagccgcgatcgcatcactgcactccagcctgggcaacagtgagactccttctcaaaataaataaataaataataaatatttatttactatttatttatggggaggtgatatatacatttggaagctgagaatgagctagatagaaggcacctcaagtggccagagagcaatcccattccttggttagtggtcagtactattagaccaagaaaaaccatggtaattgttcagtaattgagtatgtcttaatatgtaaaataacgcttattagcaccaactgacaacaattgtgtgcaatacttaagatttttttttttttttttgttaatttgagaccaagtctctctctgtcgcccagctggagtgcaatggtgcgatctgggctcactgcagcctccgcctcctgagttcaagttattctcctgcctcagattcccgagtagctgggattacaggcatgcaccaccatacctagctaatttttgtattttcggtagagagtgttctgctatgttggccaggctggtctcgaactcctgacctcaggtgatccacctgcctccgcctcccaaagtgctaggattaaagacatgagccactgtgccagccatgatttctaattcaacttctaccttgggtatggagaaattcatagaaaggaaaaaagctgaaaggaatttcagccctttagaattttttttttttttttgagacagggtctcgctgtattgcccaggctggactgcagtgaggtgatcacagcacactgcagccttgacctcccaggctcaagcagtcctcccatttcagccttccacccagtagctggaactgcaggcatgcaccaccaagcctggttaatttttaaattttataatttttttttctttttttttttgagatggagtcttgttctgtcacccaggcttgagtgcagtggcatgatctcagctcactgcaacctccgcctcctaggttcaagcgattctcctgcctcagcctcttgagtagcttggattacaggcacccaccaccatgcccagctaatttttgtattttagcagagatggggtttcaccatgttggccaggctggtctcgaactcctgacctcaggtaatccgcccatcttggccaaagtgctgggattacagg

SEQ ID NO: 96889 - DNA, 46964 bp, Homo sapiens
  misc_feature (1)...(46964): n = A,T,C or G
tgacaaaccttccatcagagctaagggcctgtgtgtcctggggaaggctctccagggagatgcagccagggcccctctctctaacccgacagaggctgcctgccaccagggaagctggagggatggctagttccactcctgggcagcagttatctctctggggatgcagcatctgtgctcagggaataaagtttctccatgcagcccaaccaggtccaggctggccccttcccagagtcacccccactccattctgactctctctcaaaaactgccactgcctcctccccaccaggtatgttcctataaaattccctcctctttcaggaagaacctgtgcagcccctcccacacacataaatcacttacccttgacttttacatatgacacgtttaaacttatctctgaatgagtttattattattattattattattttgagatggagtttcactcttttgcccaggctggagtgaagtggcgcgatctccgctcactgcaacctctgccttctgggttcaagcgattctcctgcctcagcctcccaagaagctggggttacaggcgcccaccaccacacagggtggtggaggttcagcgagccgagatcctgcaactgccctccaccctgggcgacagagcgaaactctgtctcaaaataaataaataaatgaaaataaaaaaataaaaggagtcttctggccaggcatgatggttcatgcctgtaattccagcattttgggaagccaaggcaggaggattgcctgagctcaagagttcaagaccagcctgggcaacattgcaaaacaccttctctaccaaaaaaaaaaaaaaaaaaacccaaaaattagcagggtgtgatggcatgcacctgtagttccagctactggggaggctgaggtgggaggattgcttgagcccaggagggtggaggttgcagtgagccgagattgtgccactgcactccagcctttatttagacactctgtctaaataaataataaataaataaaagtaatcttctgactgttgtgttgagaaggaagtgggggaggggaggccaaggagacccacttagaaggatgttgaagtaatccaggagagagatgatgagggctcacagtgaaggcagtagttacctggagagggagctgtgagtggagagaggcctttcacaggaccccctgctagcaatatgtttcttgatttacctgtgtgatgactacataggtgtacttttttttttttgagagagagtcttgctctgtcgcccaggctggagtgcagtggtgtgatcatggctcactgcaacctctgcctctcgggttcaagtgattctcctgcctcggcctctggtacagctgggattacaggtgtgtgccaccacaccaggctaatttttgtatttttggtagagatggggcttcaccatgttggccagcctggtcttgaactcccgactcgaggtgatctgcctgccttggcctccgaaagtgctgggattacaggagtgagccaccacgcccggccagacatgtatgtttatttacttatgttctatttcacaataaaagaagaaataaagcaataacatgaggaacatagctataaatggctgggacacactggaatccaattctagcactctttatcctgctaatcgaacccaaggaataggccccaacccagctcacttatatccttgtgctgtagcctggagcaaaccttgtcatttctctcagcctcagagtttctcatctgtgaaaccaggaaaccactgactggctctttacttcactagggtgttgtcaagctcacagtgctttataaattgccagaaagcacacattatgattggtattttatggtttttgttttgttttgtttttttgagatgaaatctcattcttgttccccaggctgaagtgcaatggcacgatctcggctcactgcaacctccacctcccaggttcaagcgattctcgtgcctcagcctcccgagtagctgggattacaggtgcctgccaccatgtccggctaatttttgtatttttagtagagacagggtttcaccatgttggccaggctgatcttgaactcctgacctcaggtgatccgcccgcctcggcctcccaaagtgctgggattataggcataagccaccacgccaggccttattgtgtttttaaaacagctttcttaatatataattaatgtacaataaactgcacataaagtgtacaatttgatgaggtttttggtcttttttttgagatggagtttcactgttgttgcccaggctggagtgcaatggcacgatcttggctcatcacaacctccgcctcccaggttcacgtgattctcctgcctcagcctcccgagtaactgggattccaggcatgtgccatcacgcccagctaattttgtatttttagtagagacagggtttctccatgttggtcaggctggtcttgaactcccgaactcaggtgatccacccacctcagcctcccaaagtactaggattacaggcttgagccaccatgtctggccaatttgatgagttttaatacatgtatatacctgtgaaacaattaccacaatcaagataatgaacatattcctcacctccatgagtttccctgtactcctttgtaatctacccctcacttccctactgccatgttcccaggcagttagtctgcattttctagaattgtattttatttgagatgtgatgtcactatgttgctcaggctggagtgcagtggcctgatcatagctcaaccgtgttagccaggatggtcttgatctgcccgcctgggcctcccaaagtgctgggattacaggtgtgagctaccacacccggccacatttaaatatttctagttaatttttgtatatggtatgaggtaaggatcaaggtttagactaggcgcagtggctcatgcctgtaatcacagcactttgggaggctaaggtgggtggattacctgaggtcagaagttcgagattagcctggctaacacagtgaaaccctgtctctaccaaaaatatgaaaattagccgggcatggtggtgcacacctgtagtccctgctacttgggaggcggaggcagaagaatcacttgaacctgggaggcagaggtggcagtgagctgagatcacgccactgcactccagcctgggtgacagagtgagactccatctcaaaaaaaaaaaaactcaatatttatatttagacaggcatggtggctcacatctgtaagcctggcactttgagaggccgcggtgggaggattgcttgagttcaggagttcaaaaccagcctgggcaacatggcaaaaccctgtctctaccaaaacaacacaaaaatcagctgggtgtggtggtgcgtgtctgtagtcccagctactcaggaggctgaggtgggagggtggcctgagcccagaaagcagaggttgcagtgagtcaagatctcactactgcactccagcctggtggacaaggccaactctctctcaaaaaataaaaataaaaattaattaaatacatatttacattaaaatatttccagttgatttttgtatatagtgtgaggtaaggatcaaggttttttattttggattttgtctttccatatggctatccaattgcttcagcacacatttgtggaaaagagtatcctttctccattgaatctctttggcaacttcattgaacatcaattgatcatatatgtgtggatctatttctgttccattaatccatatatatttacatatttatgctaataccattaccgtagctttaaaataagtcttgaaatcacagaatgtaagttctcttttgttcttctttttcaaaatggttttggctattttaggtcttttgcatttccacataaatcttaaaatcagcttgttaattactgaaaaaaaaaaaaggctgctggggccaggcacagtggctcatgcctgtaatcccagcactttgagaggctgaggcgggcagatcacctgaggtcaggagttcaagaccagcctggccaacatggtgaaacctcatctctactaaaaatacaaaaaattagctgggcatggtggtgtgcacctgtaatcccagctactcaggaggctaaggcaggagactagcttgaaaccgggaggcggagattgcagtgagccgagatcacatcactgcactccagcctgagtgacagagtgagactccaccataaaaaaaaaaaaaaaaaagctgctggagttctgattggaactgcactgaatctgtagatctcttccttgcaggaggtttttttctgattaatcctggttgctccagcaacagtcctcaactcatcaatgagcccaccttaacttagaacaggaccagtttcactgcaggtccttaaacctgttgctgctccttaaacaccctgtgaatgtacacacctccagcctttgcacatgttatttccttttttttttttttttttgagacagggtcttgctttgttacacaggctacaatgcagtggcccaaacatggctcactgcagcctcgacctcccacgctcaagtgatcctcctgcctcagcttcctgagtagctgggactacaggcacacgccaccacacccagctcacttttgtatttgtggtagagacagggcttcgccatgttgcccagactggtctcgaactcctgagctcaagcgatcctcccacctcagtctccaaagtactgggattacaggcatgagccaccacacctagctctcattctctacttacgtctactgggctccaccatactcaccctcagctcaaatattacccctctatgaacatgtctctaacccatcccagaccctggctgaatcattcatttgcctgggtttcacaccactttgtcctcatctccctcacaggcacacagaacttttaattactagttaatatcacttaagtggccgttacttgtttatacatctttctcccctattagataaaactccttcaagcagggaccatattatttcttatattttgaattaaaccttttgagataatcatagattcatatgcagttcataagaaataaatacaaaagagatcccatgtacccttttcccagtttctcccaatggtaacatccttaaaaactttagtacaataacacaaccagaaaattgacactgatacaatccactgatcttactcaaatatccccagttttacatgtatgccgtgtgtgtgtgtgtgtgtgtgcatttgtagttaaagacatctttttactatttaaactttaacaatgacattaggacgttttggaagtaacgtagtaaaggcagttaagcaagctacttagggtatcgttggagcccagaagaagcacctagtccacttttggaggagtggtgatggtgagggaatggggaaggacgtcagaatatgccttggtcaaggcccgctactagtagctgctcaaataactgcgttaaattatgttgaacccaacgttattttccatgttttcttatgcaaatcctcgcatccctgagtgttccattattttcatatttatttggcaggtggaacattcgaggctgggagcccttacatgccccgcgagaggtcacgcagttaggaagtgacaggagcgaagtcagcccaagtctgctgactccaagcccagtgctctctccccctaatggcggtacgccgtgcacatatccttaccacgtatgcctcatccctattcggaactttgcctccaaccctcttcctgttttcttggctgtcttacaagggagccttttcaggcagcaactccagagagaaccgccagagcgtgcaacagcaaacactaaccagcccagccgtcagccacgcaatcatcactccctggcccagtgcgcggcagaactggcgcaagcgcacgccggcaggttgtacccagaatccgggcccttgccagacgggggcggaaccggaagtcgctgtacatctcatggttgctaagaaacggagcttccacaaaccagatagaggttctccagcttttctttgattgtctctgctttagcgtctctaaatccggtcaccatgtcggacyccgaaggcgagaccttgcgaagcacctttccctcttatatggscgaaggcgagcggctctacctgtgcggggaattttctaaagccgcgcagagcttcagcaacgtgagtcgagctctcaacctatccatcaccccatcacccgtcactttttttttttttttttttttttttttttgtgacggagtttcgctcttgttgcctaggctggagtgcaatggcacgatctcggctcgccgcaacctccgcctcccgggttcaagtgattctcctgcctccacctcccaagtagctgggactacaggcgcgtgccaccatgcccggctaattattttgtctttttagtagagatgggggtttcactgtgttggccaggctggtctcgaactcctgacctcgtgatccacccgcttcggcctcccaaagtgctgggattacaggcgtgagccactgcgcctgccccctgccctcaccttttgattgcagataacactgaggtcttgatgatgcctggaggaccctgttgtttctattattcactgatttttgatggacacactgctgtcacagataagccctgtggttggccattttctaccagttcccacttgcaatctccattctctgcgttaacagtgaccttttcctccacttttacttaaatgtttcatgattaaccggcctccttccacagagcagccttaccttcccatcatttgctggcagattggatgggaggttgcatgcagaagcctcaatgtccccagcacaccgttgcttataaaaggtggccagtaagcaacatatgattattattatcaattttgagacaaagttttgctatgttgcccaggctggagtgcagtggcaagatctcagctcactgcaacttccgcctccccaggttcaagcgattttcctgcctcagcctagggagtagttgggattacaggcatgtgccaccacgcctggctaatttttgtattcttagtagagacagggtttcaccatgttggccaggctggtgtcgaactcctgacctcaagtgatacacctgcctcggccccccaaagtgctgggattactgaggtgagctgctgcaccaaccagcaacattattatagtaaccctagtataaattgcatcatcccaccctaaggggattgggtgatggtttgttgttgttgttgttgttgttgttgttgttgttttggagacgtagtcttgctctgtctccaggctggagtgcaatggtgcgatcttggctcactgcaacctccacctcctggattcaagtgattctcctgcctcagcctcaggcacactgctaagcagactggatttttgttgttgttaagatggagttttgctcttcttgcccaggctggagtgcagtggcgcaatctcggctcaccccaacctccacctcccaggttcaagcgattctcctgcctcagcctcccgagtagctgggatcccaggcatgcaccaccatgctcggctaattttgtatttttagtagagacggggtttctccatgttggtcaggttgatctcgaactccccacctcaggtgatccccccccacctcagcctcccaaagtgctgggattacaggcgtgaaccaccccacccagtgcatactcaattttatagattaggaaatatacagaagttgagcaacatgcccaaggtcgctaaactagcaagtggcagaggaaggattcaaagccgggctcagactccaatgctgaggtgctaaccacaaaactacacatctgacatctgcataaggaaactgttgttttttttttgtttgtttgttttttcagagacaggatctcgttctgtctcccaagctggaatgtggtggcacaatcacagctcaatacagcttcaaactcctgagctcaagtgatcctcccaccttagtgttccaagtagctggagctacaggcttatgccaccacgcctggctaattttttcttttcttctttttttttttttttttgtagagataggtgttttgctatgttgccctggctggtattgaacacttgagctcaagtaatactcccgctttggcctcacaaagtgctaggattacaggtatgagatacagtgccctaaaaacatgtttttatgaccatttcttttgctccaaattgcccacttcttctgctccaaattgcccacttcttcttctagatggagtgataggataaccctgtagttttgagacttcctgtaagatcaagcttctcaacagctccccagagtcgtttgtccctttcagtcaccaaccacaccctaaaaccagaaatgatgaccagataagtgaacaattgagttcggtagccctgtccccacttattctcctcctgctggatcatgtcccatcctgaagtacccaccagcagagaaaaaagaacaccctgagggaagggtagccttggatgagaagcagtcactttccagaaagacagtagctacttcctcttcttagaaaagtaggaaggtcttagaaaggggtgggtaccaggagacagagggttgcagtgagccaagatcatgccattgcactctagcctgggcaacaagagtgaaactctgtctcaaaaaaaaaaaaaaaaaagaccaggtcagrtggctcatgcctgtaatcccagcactttgggaggccaaggcaggtggatcacctgaggtcaggtgtttgagaccagcctggctaacatggtgaaaccctgtttctactaaaaatacaaaaaatcaaccrgacgtggtggcgagtgcctgtaatcccagctactccggaggctgaggcaggagaattgcttgaacccgggaggcggaggttgcagtgagccgagatcgtgccattgcactccagctttggcaacaagagcaaaacgccatctcaaaaaaaaaaaattagccaggtgtggtggcgggcacccgtagtcccaggtactcgggaggctgaagcaggagaattgcttcaacccgggactcggaggttgcagtgagcagagatcgtgccactgcactccagcctgggtgacagtgtgagactctgtctcaaaaaagaaaaaggggggtgggtacagttagatgcctcaggaaggacagtacaccacagactatggtaatcatctcacacagaaaagaggacactgggagtggggatattgccctcaaccccactttagggtcaaaatcagtttcattttcctggcattttcttttttttttttctttcttgtttttcatttttcttttccctttctttcttttttctttctttctttttttttttttttttttttgagacagcgtctcactccatcacccaggctggagtgcagtggcatgatctcagttcactgcaacctctgcctcccaggttcaagcgattttcttgccttagactcccgagtagctgggattacaggtgcttaccaccatgtctggctaatttttgtatttttagtagaaatgggtttcaccacgttggccaggctggtctcaaactcctgacttcaagtgacccacccaccttggtctcccaaagttctgggattacaggtgtgagccactgcacccggcctctttttgttttgttttgttttgttttttgagacagagtctcattctgtcacccaggctggagtgcagtggtgtgatcatggcttactgcagcctcgacctctccaggttcaagcaatcctcccatctcagcctcctgagtagctgggactacaatcatggaccaccacgcccagctaatttttttgtatttcgtagagacagggttttgccatgttgcccaggctggtctcaaactcttgggctcaagcgttccgcccacctcgacctgccaaagtgctgggattacaggtgtgagccaccactcccagccttttcctggtattttcatcttaatccccggatatagtgattagttcttgattagctacataaaaagagaaggctactggaatggttaagccacatggcagattgtcctcaagtccacttcagaatgcttagcctttgaaatttgctttgagtatgatgtgttgccatttcaggtttgtagttgagtttggtgtgcacaaaataccctacagttctattgcctgaggggactgaggggctctcagacattggtggaaagtcagygtatccacagagcagcatattcctactcttcagccagtggcttccacaatagccatgatttgaccttgttcaaggtgagccatatgcagataatcaagttgactgagcgcagatcggagttgttctgcttaggagccagaggcctgtgtgctggcctgaagaatccccttgattcttcagagccttgatttcttcagagcctgaagaaatcccctctgcaggagggtttgggctgcccttcccactccagcttctaccttgctcttcatgctggctgtcaacctgactggtttctttgtcaggctctttaccttcaggatggagacaagaactgcctggttgctcgctcaaagtgcttcctgaagatgggagacttggagagatccctgaaggatgctgaggcttcgctccagagtgacccagctttctgtaaggtgactgcatgggcrggaggactggatcctgccattgcctgtagcaacttctggttacaagtagttgttacaagtagaaccagccagactgcctagtgtttgatgccattttctcttcctaggtcattgcctaagtccctgccccctgtattccaaccttgaccttcaacccaggacccttctgttccaccacatgtgagtcctataaggccttatctgttcacattgatttgatttcctcccattccaggggattttgcaaaaggctgagacactgtacaccatgggagactttgagtttgccttggtattctatcatcgaggctacaagctgaggcctgatcrggaattcagagttggcattcagaaagcccaggaagccatcaacaactcagtgggaagtgagtgaccacagggcctatgcccttatccaggaaggtccttggaatccttaggtttagaggaaggttgagtcacagcaggtgagcagccaccaccaggcccgcagggagtcctacayctggatttggctgctgcagtgttgttgaggattagccgggcatggtggcgggcaccacctgtctgctgggaggaccattccctgatgcacacactgatctctgagcgctgcagccttgggttttcctaaaggtcagattagaagggctgtttcaaagtaggcctgtctttagcctggtgtcaaaagctataatgcggtcctgagcccagccttctatagtccctggcttctttcctcaccagacgcataccaagggctggccttagccatcagcattatggcagggggagaagggaagcaagtgagagcaagtgagagcttgctctgtcggtggcaaggcctggaaatggacagtttcccctgcatccttggcctccctttgtttggaaatctggctgccatagccttgggctagcgggggctgttagctcctaggagttataccaaacagcctgcaccatttgcctgctaggctggcttagggccagctttgccacagcctccaccatccccctgccaaaggcagccatttctacataaaaatatgtgataagtcatgcctggggggtctggccgacctgagctccagcttctttccttgcaggtccttcttccattaagctggagaacaaaggggacctctccttcttaagcaagcaggctgaggtaagggccctggttctgtggttgtatccctccaagggaagaggctatgtgtgcctgagaaggggtcttgggagtctagctgcaacctgaccaggcatactccgtgactcttggcccacagaaaggtcctggagttggaggaatctgggatcacagaccctagggccatggctgggtacactctgctccttgctgaagctctgttgggtgttgctccattttctcagaatataaaagcccagcagaagcctcagcccatgaaacacctcttacaccccaccaagggagagcccaagtggaaggcctcgctcaagagtgagaagactgtccgccagcttctgggggagctctacgtggacaaagagtatttggagaagctcctattggatgaaggtttcggacactttgttggcacggggccttgggggaaaggaaatctgggtggatgcttcatgcatgagctgaaggcagaacctgtcatataatattagctgacgtgtacctgtggacaggttttattagcattctcattttacagatgaggaaactgaggcgcagaccaacagaaactaaggtcatatataggtaggcaatgacatggcttatattcgaatccaggaagtccaattttagagcaatgctcctaagtgctatggtaccctgggagggaacaacagagatttggtctcctttaccaccatagtccctgaagggacatcccctttgccttcaatccttacaatgggcaaaggaatccagcggatatgtgcttaaatccgaggatattagttctagaatgctctgaaacatcatctggtccaagttctccttttgtagataaggaaatagagaccctgattgggaaggaactttcataagttgacaaacaagttcatggtggagtcaacatcagaacccaggcctctgacctccagtccagtgctctttcttttaaagacagagtcttgctctgtcacacaggctggagtgcagtgaagcaaattcggctcactgccacctccacctcctgggttaaagcgattctcctgcctcagcctccctagtagctaggactataggcgcccacaaccacatccggctaattttttgtatttttagcagagatggggtttcaccatgttggccaggctggttttgaactcctgacctcaagtgatctgcccacctcggcctcccaaagtgctgggattacaggtgtgagccactacacctggccagtccagtgctctttccaccacactgctgccagtgacaggatgaaggacagaagcctgagatgaatgtcccacatcaacatggggatgggagtattgccattagctgataagcctgagcagggtcacctgtgaatcaaatgcctcttctccagaattggcttcccaaggtcatgtgtagggttccctgttctgtgacacaggaacagcttcactgctggcacatctccttagcaacaggcctgaatgcctcctattctccagaggacccgctgcggagggaagaggtggcttgaatattacctcaagtggccttgtagctttgcttctggctgtaacctctggccaggcagtgggcaggacttgggcacccgccttccagcttccagcatgcacaggcccactgggcacctgggaaatcactgggcactggcagcctgggccagatcgtgcatttagactcagtgttatctgaggacacagcttgaactggggaagccccgaggcttctcagcgagccatccaccagctgccccttctggctagctcctcatatcttgccataaggggcccatagcatggaactccctgatagtggggctctggctgcctcctggcctggataaacccactctgccactatgcgcactcacactcctctctgtttcaacaactccaagcagagcaagttcacagagggccctgcagcggccaccgggaggaaacaggaggcaaatcccttagaggcctgttctccttggcgcctcctcacaccccttccccacagacctgatcaaaggcaccatgaagggyggcctgactgtggaggacctcatcatgacgggcatcaactacctggatactcacagcaacttctggaggcagcagaagccgatctacgccagggagcgggaccggaagctgatgcaagagaaatggctgcgggaccacaaacgccgtccctcacagacagcccattacatcctcaagagcctggaggacattgatatgtgtaggtgttgttctcagagggtggggcaggtgcctccagtgccttatcaggtggggaaggagcaaccaggtgtctgagcccctggtctctcagacctgcagatggtgtctgcaggaagaggagttaccctgtcagctaagaggaggctgccctggcctccacagmacccctttcctttctcagtgctcacaagtggcagtgctgaagggagtcttcagaaagctgagaaagtgctgaagaaggtactggaatggaacaaggaagaggtacccaacaaggatgaactggttggaaacttgtatagctgcatagggaatgcccagattgagctggggcagatggaggcagccctgcagagccacagaaaggacctggagatcgccaaggaatagtgagtgccctaggggaggccactggcgtgagcctacggagaaggacacctggggctatctgaggcccttgccagggctgctggtggcttgactcccattttctgctctgcatgcctgaggtagattctcctggaggtggggaccacctgcccaggactgagggtgggggcacctagactgttagcttttttgccaccaaaagggtagtggctcaaaattccaaaaagctacccaatgatctggctcttagggatgtttatattcttacatcagcttaacgagcatgcatgaagccccagacatgccagatgctgctagtgtgggaacacagtaataaccagacacaagggccatttccctgcagatgtcaagcaaaaagggacatagctaattaattgcaattgtgataagtgccatgaaagaaaagtacaggatccagtgtggtgagaaatacattccaggaggacttgatgacattggggaacacacagggcctatggaaaggccctgagacaggagggtacttaagcctggagagcacagcatattgccagggagaggggccaagaggaggctgaaggaagtgggcaggggatggatcaagcagggtcttttaaaaccggtgctgatcaagagcacgggctgtggagtcaggcaracctaggctgtggaacttgcaccgcccagccgtggaacctgagataagccacttkagctccctcagcctcagggtctcctcctgttagctgggcaccctgtagggcagaagggaggatgaaatrcagaagtacctgtgcagaccttaggacagtgcctggtatccacaatagtagtaacaccagctctccagaaatgagatcttctcaagacttgctgacttccacccggaggttccatcgctttctcagcatcctggttctaccctttggagtcattcttgacttcctcctgcctggtttctacccatctcaccagtctgagcctccttgatctcccatcatcccatttgccctcacagtgcccagccctcagccgacctgagtcctrctgcttcccctgcctctgctgtctctctccagctcctcccacaaatctccagagacacatgctatgaactctccctcccctgctcacaagtgggcctgggcccctcactgcctgcaggttaaaggtcaagcccctttgcttggccctcaggccctctctaaacccaccctggccctcttatagcaatcttcccttggggtcaaacgttcctgaacattcctgcctcctgccctttcctcttcactgatccaagccccatatgctttccattcccagttcatttctcgcctgcctccactgtgctgagcaggaatatcccatactggccatcccatattagaaaaaaatagctttagggacagacctgtcttcgatccctgtcttctaactggctctgccacttagaagctgtgtggatttgattaagttgctcctctactcagtttcctcatctctaatgaaggcataataataccaacccacagggactgtggggattagatgtgatgtatatatatggtaccttggatccaaccatctcccatgcacaaatgagttagaaatctttacttctcgccagacctctctcctgagcctcagacctgtgtgtccagcagattctaagacatttccatctggatgtcccacaggaatcctaaacttaacatgtccaaatcggaatcccttatcttcctcccaaacttacttcttgagggttccccatccccgaggatagcactgttggccactgagtcccaagccagaagaccggaggcttcccagatacctccttcccctctctgtttttgccatatcgctcaagttggtctggatgayaggcgtgagccactgcgcttggccccctcactgttcatgcccagcaatggccatgtcttgtcctgtccatactttctctgtttccctcccacaactcagtccagaccatccttacttcttgcctgtttcctctgacctgggcttcctacagttcagctgtcctttctctgaaaaacaactcctgtggttgggatgaaatttcaatgccctgctcaacacaggttgcccttcttcacttgacttctcctggcctgtcttgacctggctttctccaggcccccaggcattctgggccccagccagtgcagagctctgtgcatatcctccagccccaggaatgctttcccttttcccagcacttgctttatcaagctgccgccacccattcttcaacatttcaataaaggttgaaaagcctgcctcctagcctgagcggtggctcacgcctgtaatcccagcattttgggaggccaaggtgggtggatcacgaggtcaggagatcgagaccatcctggctaacacggtgaaaccccatctctactaaaaatacaaaaaaaattagccgggcgtagtgttagccgggtgtggtggtgtgcgcctgtagtcccagctacttgggaggctgaggcaggagaatggcgtgaacccaggaggcggagcttgcagtgagccgagatagtgactgggcgacagagcgagactccgtctcaaaaaaaaaaaaaaaaagagagaaaagaaaagcctgcctgctgccccaggggttacaaatccctcccctaggctccctctccacaggtagcctttctgtcctgttagactttggactttggaaggtgctattcccagcatctgccacacagtgggcatgtaatgaaygtgtgctaagtgactgaataatttgagatggagtttcactcttcttgcccaggctggagtgcaatggagtgatctcggctcactgcaacctgcaacctccgcctccctggttcaagtgattcttctgcctcagcctcccaagtagctgggattattggcagcccggctaattttgtgtttttagtagagatggggtttcaccatgttagccaggctagtctctaactcctgacctcaggtgatccgcccacctcagcctcccaaagtgctaggatgacaggtgtgagccaccatgcccggcctattagtttttaacatccacaaatgagcctcacccaggcttactccagtcttccttgtgagtcccatgtgctccaggagctccctcattctaatcagccacttgctagattagccacttactagtctaagtggttttttcagtgcccacggcactcatttatttctctgaataatctataaattatttgatcacatgctttatttttgctattatgatttttagtacatattgttatgaaaaatggacatattacagcttattcactcattcaactcgccagaacagagtacccactctagaagaggggatccactccgacgggctgtgacagcagcaggtgcacagtgtggcccaggggccaaggagacaggcaggtgggagcttggcaggggcctcagggaaggcagcagggtcagcaaggtgggcaagggggagggagaaggggaccttgggcagggcagaaagatgtggcagggatggaggacttggagaaccataggtaggttaggtgtggcagggctagggaccagggcctgcaggcagtgggaggtctggatgccatgcctcgaaaccggttcagccctcaggcactgaggcccagtgtttttgtgtgtgtgttttgttttttttgttttgttttttagcaacagggtattgctctgctgcccaggctggagtgtagtggtgcaatcatatttcactgcagcctccaactcctaggcccaagcaatcttcctacctcaccctcctgagtagctgggtctactggcatgaaccattgtgcccgcgttttgtttttacacaagtactataatgtcaggcttgcaggcttgaaccagaactgcgtggtactgagagcaaaacctgaaagttgtcccccgcaacccacttcccgtcacttcccaggatgatgttgttggaatgtgtcctctggctccttttcaatgtgtttacctacatactcatgtacatatgcaggattttttaaaaccaaagcagttccttgctatttttttatttttttaaaaaagaatatgtcttcctctcaaatataaccacaggccaagcacagtggctcatgcctgtaattccagcactttgggatgtcacacgtgtccatgtgaagagaccaccaaacaggctttgtgtgagcaacaaggctgtttatttcacctgggtgcaggcgggctgagtccgaaaagagagtcagcaaagggtggtgggattatcattagttcttataggtttgggataggtgtacaaaatacattcttaagggagggggagaatattacaaagtaccttcttgagggtgagggagaatatatcgtatcagggtggagcaggaacaaatcacaatggtggaatgtcatcagttaaggctattttcacttcttttgtgattcttcagttacttcgggccatctggttgtatacgtgcaggtcacaggagatatgatggcttagcttgggctcagaggcctgayatgggaggcttaggcaggaggattgcctgagaccaggagtttgagaacagcctgggcaaattagtcagatgtggtttcttgagcatatagacctagttactcaggaggctgagtcaggaggatcccttgagcccaagagtttaaggctgcagggaactatggaggccaggggtttgagaccagcctaggaaacgtggcaaaactccatctctattaaaaatacaaaaactgttgggaggccgaggcgggtgaatcacgaggtcaggagttcaagaccagcctggccaacatgaagaaaccctgtctctactaaaaatacaaaattagccaggcgtggtggcacatgcctgtaatcttagttactcagggagctgaggcaggagaattacttgaatcctggaggtgaaggttgcagtgagctgagatcgtgctattgcactccagcctgggccacaagagtgaaactccgtctcaaaaaaaaaaaaaaaaaattagctgggcgtggtggcatgtgcctggagtccctgctactcagtggctgaggcatgagagtcacttgaaccccggaggcggaggctgcagtgagccaagattgtgccaccgcactccaacctgggtgacacagcgagactctgtctcaaaaaacaaacaaaccccaaacacacatacaccacacacacacacacacacacacacacacacacacacacacacacacacaccccgcatacacagaaattgcctttcttagagcactgataacatttagattattttttttggccaggtgcagtggctcacatctgtaatcccagcactttgggaggccaaggtgggtagatcacctgagatcaggactttgagaccagcctttccgacatggcggaaagcttgtctctactaaaaatataaaaattagctgggtgtggtggygggcacctgtaatcccagcaactcaggggctgaggcaggagaattgcttgaacccggcaggtagagttgcagtgagccaagatcatggcactgccctccagcctgggcaacagagtgagactctgtctcaaaaaaaaaaagtaattatttttaatgcttattattataaactgtgctttaatgactgttcttgtcacattatctttttgaggtagattcctagaaaggcaattgctggttcaaagggacatctttgcaagctgttgattgattactctccagaaaagtcctgataatgttcattcttggccccagggcacagatgtgccacatccttgctgggctggacattgtccctccaactgaaaccctgagtttctgaggccagggctcctgtctttgccttctttcctatttccacagtgcctagaacagctgatttctagtgaatggcttgttttgcttcttccccacagtgaccttcctgatgcaaaatcgagagcccttgacaacattggcagagtttttgccagagttgggaaattccagcaagccattgacacgtgagtgaccaagaattgcctcttccccacctccatggttagaacttctcaccataacatgaaaatttgtttccggtaataagaatccagcctgggcaacataggaagactccctctctacaaaaaaaaaaaaaaaaaattagccgcgcatactgtcctgtgcctgtggtcccagctacttgggaggctgaggtaggaggattacatgagcctgggaggttgaggctgcagtgagacatgatcacactactgcactccagcctagacaatatgttaccagtggaaggtatccaagttattgccggtgaatctgtacaggtctgcagcaacctcaattcttgcctcctcagaagaaagaatttgaatgaggaatgggaatttattaaaaagctaggccgggcgcagtggctcatgcctgtaatcccagcactttgggaggccgaggcaggcggatcacttgaggtcaggagttcgagaccagcctggccaacatggcaaaaccctgtctctactgaaaaaatacaaaaattagccgaacacgttggcacgtgcctgtagtcccagctgctcgggaggctgaggcaggagaatcgcttgaacccggaaggcggaggttgcagtgagctgagatcatgccgctgcactccagcctgggcgacagagcaagatacagtctcaaaaaaaaacctttagggcaggaaagaaaggaacgtatacttggaagagacccaagtgggcactgagaaggacaaatgcagtgttggtgtttaaccttgatcctaggactttacaaactggcccctttcccctgattcttcccttagggttggctgcccatatgtgcagtgccctccttacccttgggaggtgagcacgcacagtgtgttgaggaagtggcatgcatgcttatctgaggctttcttcctctcaccagtggagtgccccccgaaggtcaagctccaccattttgtctcttaatgtgcatgcctgggaagttgcttctccctggcacctacattcagttaacactttagtgcgacagctgtggaccatcaggaaatgccctctccatgacactggctgccaatttatcacttttttttgtttgtttgtttgttttgagacggagtctcactctgtcacccaggctggagtgcaatggcacaatctcagctcactgcaacctctgcctctaggttcaagcaattctcctgtctcagcttcccgagtagctggcactacaggcgcccgccaccacgcccagctaatttttgtatttttagtaaagacgaggtttcaccatattggtcaggctggtctcaaactcctgacctcaggtgattcacccgccatggcgtcccaaagtgctgggattacaggcgtgagccaccgcacccagctcaatttatcactattttattttatgttatgttatgttgtttttatttttattttatgttattttatttttgagaaggagtctcactctgtcacccaggctggagtgcagaggcgtgatctcagctcatggcaacctccaccttccaggttcaagcgattctctcctgcctcagcctcccaagtagctgggactacagttgtgtgccaccatgtccggctaatttttcttttcttttttttttttgagacggagtctcgctctgtcccccacgctggagtgcagtggcgtgatctcggctcactgcaagctccacctcccgggttcacgccattctcccgcctcagcctcctgagtagtggggactacaggcgcccgccaccacgcctggctaattttgtatttttagtagagacggggtttccccgcgttggtcaggctggtctnnnnnnnnnnnnnnnnnnnnnnnnnnnnnnnnnnnnnnnnnnnnnnnnnnnnnnnnnnnnnnnnnnnnnnnnnnnnnnnnnnnnnncatgagccactgtgcccgggtgtgcattttccaaattaatattttaataataagcgcaggccaggccgggcgcggtggctcacgcctgtaatcccagcactttgggaggcagaggcgagcggatcacaaggtcaggagttcgagaccagcctggccaacatggtgaaacactgtctctactaaaaaaaaagaaaaaaaatacaaaagttagccaggcatggtggcgtgcacctgtaatcccagctacacaggaggctgaggcaggagaattgcttgaacccaggaggcgaaggttgaagtgagccgagatcacgccactgcactccagcctgggtgacgcagcaagactctgtctcaaaaaaataaataaataaaaaataagcacaggccaggtgtggtggctcacgcctgtaatcccagcactttgggaggccgaggtgggcggacctcctgaggtccggagttcagaccagcctggccaacgtggggaaaccccgtccctattaaaaatgcaaaattagccaggcgtggtggcacactcctgtaatcccagctactcaggaggctgaggcaagagaatcacttgaatctgggaggcggaggttgcagtgagctgagatggcgccactgcactctagcctgggcaacaagagcgaaactctgtctcaaagaaaaaataaaataaaataaaataaaataaaaataaaatggctgggtgcggtggctcacgcctgtaatcccagcactttgggaggctgaggcgggtgatcgcctgaggtcgggagttcaagaccagcctgaccaacatggagaaaccccgtttctactaaaaatacaaaattggccaggtgtggtggcacatgcctgtaatcccagctacttgggaggctgaggcaggagaatcacttgaacccgggaggtggaggttgcagtgagcagagatcttgccattgcactccagactgggcaacaagagcaaaactccatctcaaaaaaataaataaataaaaataaaaataaaaaatattaatttggaaaatacagaaaaatagagaaaagtattcagtctcaccacccaaagacaagtactaattctaatcctactcttttattgatactgtgttttttcattccaatcttttttgttttgatttttctctcatatattcttagtaatttttttctttctttccttttttttttttttgagacagggtctcactttgtcacccaggtgggagtgcagtggcacgattatagctcwctgcaatttcaacctctcaggcttaagcgatccccctaccttagcctcccaagtagctgggctacaggcgcacaccactgtgcctggctaaattttgtatttttttgtagagatggggttttgccatgttgcccaggcttgaactccttggctcaagcaatccacccacgttggcttcccaaaggctggggttacaggaatgagccaccatacttggtaataatattcttaaacattatttatgttgtgtgtatgtgtgtgtgttttgagatggagtcttgctctgtcacccaggctggagtgcagtggcataatcttggctcactgcaaccttcacctcccgggttcaagtgattcttctgcctcagcctcccragtagctggactacaggcgcctgccaccatgcctggctaatttttgtatttttagtagacagacagggttttgccagcttgtctaggctgatctcraactcctgacctcaggtgatctgcccacttcagcctcccaaagcgctagagacatgagccaccacgccagcctcaactgttgtattaaattccacattccataggtgttaccaaaatagtctcagtagtcttaaaatatctttatgcttatgaactccacccttgtatccaaaagaactggtagctggagaacaagttttattccgccacccagcaggaagccttggcatcctgtggcccagtgcatggttttgggggatgaagctgactctggttcttcatgtccccaggtgggaagaaaagatccctctggcaaaaaccaccctggagaagacctggctgttccacgagatcggccgctgctacttggagctggaccaggcctggcaggcccagaattatggcgagaagtcccagcagwgtgccgaggaggaaggggacattgagtggcaactgaatgccagtgttctggtggcccaggcacaaggtatgggctcagagatgaccaccctaccttttccagccttcrggcccagctcacaccagggctaggagtcttgtggactgagtttaccatcccagtgtttctccttcccagattattctgagagtggggataagccactctattttgaccagcacgtggtaagtgctttcattaagcaaagcttggttagagcttggggtaccttgagcctacctctgcccttgaggaggtcagctgcagacccacacagcatcgtgtcatcctcacaacagtgcccatgtattgagccactttccttctgccttggtactttttttttgttttgtttcattttgtttttgagacagagtttcgcttttgttgcccaggctggagtgcagtggtgcgatctcggctcattgcaacctctgcctcccaggttcaagtgattcttctgcttcaggctcccaagtagctgggattacaggcgtctgccaccacacctggctaattttttgtgtttttagtagagacagggtttcaccatgttggctaggctggtctcaaattcctgacctcaggtgatccaaacgcctyggcctcccaaagtgctaggattacaggcgtgagccaccatgcccggccctgttttgttttttgagacgaagtctcactakgttacccaggctagactgcaggggcacgatctcagctcactgcaaccttggcctcccgggttcaagcrattctcctgcttcagcctccagggtagctgggattacaggcgcgcaccaccacacccggctaatttttgtatttttagtagagacggggtttcaccacgttggccaggctgttctcgaactcctgacctcaggtgatccacccgcctcagcttcccaaagtgctgggattacaggcatgagccaccacacccagccagcattcttgtattgaatcattatgatgtaggtaggcattatcatccttattttagagatagggaaactgaggcacagagaggtccagtagactccccaagtcctatgagggaagctttttttttttttttgagatggagactcactctgtcacccaggctggagtgcagtggcgcgatctcagctcactgcaacctctgcctcatgggttcaaatgattcctgtgcctcagcttcctgagtagctgggattacatgtgtgcaccataatacccagctatgtctttgtatttttagagacgcagtttcactatgttggctggtttcaaactcctggcctcaagtgatccacccacctcagcctaccaaagtgctgggattacaggtgtgagccactgcgcctggccgaggaaaccttttattttttaatttattttatttctttatttttattttttgagatggagtcttgctgtgtcacccaggctggagtgtagtgacacaatctcggctcactgcaacctctgtctcctgggttcaagcgattctgctgtctcagcctcccgagtagctgggattacaggcgtgtgccaccactcctggctaatttttttgtatttttgtagagatggggtttcaccatgttggtcaggctggtctcgaacttctgacctcaagtgatctgcccgcctcggcctcccaaagtgctgggattataggcatgagccactgcacccggcctccaagggaacctttcagagtgatggaaatgttctaaaatgggattgtggtggccactgtacaactctgtaaattttcttcttttttttttttgagatggagtcttgctctgtcacctagactggagtgcagtggcacaatcttggctcactgcaacctccgcctcccgtgttcaagctattctcctgcctcagtctcctgagtagctgggattacaggcgtgcgccaccacacytggctaatgtttgtatttttagtagagacgggatttcaccaagttggtcaggctggtcttgaactcttgacctcgtgatctgcctgcttcagcctcccaaagtgctgggattacagttgtgagccactgtgcccggcctcaactctgtaaattttctcaaaatcattgaactttatccttacaagccggtgaactttatttatttatttttttgagaaggcgtctcactctgttgcccagtctggaatgcagtggcgcgatcttggctcactgcaacctccgccnnnnnnnnnnnnnnnnnnnnnnnnnnnnnnnnnnnnnnnnnnnnnnnnnnnnnnnnnnnnnnnnnnnnnnnnnnnnnnnnnnnnnnnnnnnnnnnnnnnnnnnnnnnnnnnnnnnnnnnnnnnnnnnnnnnnnnnnnnnnnnnnnnnnnnnnnnnnnnnnnnnnnnnnnnnnnnnnnnnnnnnnnnnnnnnnnnnnnnnnnnnnnnnnnnnnnnnnnnnnnnnnnnnnnnnnnnnnnnnnnnnnnnnnnnnnnnnnnnnnnnnnnnnnnnnnnnnnnnnnnnnnnnnnnnnnnnnnnnnnnnnnnnnnnnnnnnnnnnnnnnnnnnnnnnnnnnnnnnnnnnnnnnnnnnnnnnnnnnnnnnnnnnnnnnnnnnnnnnnnnnnnnnnnnnnnnnnnnnnnnnnnnnnnnnnnnnnnnnnnnnnnnnnnnnnnnnnnnnnnnnnnnnnnnnnnnnnnnnnnnnnnnnnnnnnnnnnnnnnnnnnnnnnnnnnnnnnnnnnnnnnnnnnnnnnnnnnnnnnnnnnnnnnnnnnnnnnnnnnnnnnnnnnnnnnnnnnnnnnnnnnnnnnnnnnnnnnnnnnnnnnnnnnnnnnnnnnnnnnnnnnnnnnnnnnnnnnnnnnnnnnnnnnnnnnnnnnnnnnnnnnnnnnnnnnnnnnnnnnnnnnnnnnnnnnnnnnnnnnnnnnnnnnnnnnnnnnnnnnnnnnnnnnnnnnnnnnnnnnnnnnnnnnnnnnnnnnnnnnnnnnnnnnnnnnnnnnnnnnnnnnnnnnnnnnnnnnnnnnnnnnnnnnnnnnnnnnnnnnnnnnnnnnnnnnnnnnnnnnnnnnnnnnnnnnnnnnnnnnnnnnnnnnnnnnnnnnnnnnnnnnnnnnnnnnnnnnnnnnnnnnnnnnnnnnnnnnnnnnnnnnnnnnnnnnnnnnnnnnnnnnnnnnnnnnnnnnnnnnnnnnnnnnnnnnnnnnnnnnnnnnnnnnnnnnnnnnnnnnnnnnnnnnnnnnnnnnnnnnnnnnnnnnnnnnnnnnnnnnnnnnnnnnnnnnnnnnnnnnnnnnnnnnnnnnnnnnnnnnnnnnnnnnnnnnnnnnnnnnnnnnnnnnnnnnnnnnnnnnnnnnnnnnnnnnnnnnnnnnnnnnnnnnnnnnnnnnnnnnnnnnnnnnnnnnnnnnnnnnnnnnnnnnnnnnnnnnnnnnnnnnnnnnnnnnnnnnnnnnnnnnnnnnnnnnnnnnnnnnnnnnnnnnnnnnnnnnnnnnnnnnnnnnnnnnnnnnnnnnnnnnnnnnnnnnnnnnnnnnnnnnnnnnnnnnnnnnnnnnnnnnnnnnnnnnnnnnnnnnnnnnnnnnnnnnnnnnnnnnnnnnnnnnnnnnnnnnnnnnnnnnnnnnnnnnnnnnnnnnnnnnnnnnnnnnnnnnnnnnnnnnnnnnnnnnnnnnnnnnnnnnnnnnnnnnnnnnnnnnnnnnnnnnnnnnnnnnnnnnnnnnnnnnnnnnnnnnnnnnnnnnnnnnnnnnnnnnnnnnnnnnnnnnnnnnnnnnnnnnnnnnnnnnnnnnnnnnnnnnnnnnnnnnnnnnnnnnnnnnnnnnnnnnnnnnnnnnnnnnnnnnnnnnnnnnnnnnnnnnnnnnnnnnnnnnnnnnnnnnnnnnnnnnnnnnnnnnnnnnnnnnnnnnnnnnnnnnnnnnnnnnnnnnnnnnnnnnnnnnnnnnnnnnnnnnnnnnnnnnnnnnnnnnnnnnnnnnnnnnnnnnnnnnnnnnnnnnnnnnnnnnnnnnnnnnnnnnnnnnnnnnnnnnnnnnnnnnnnnnnnnnnnnnnnnnnnnnnnnnnnnnnnnnnnnnnnnnnnnnnnnnnnnnnnnnnnnnnnnnnnnnnnnnnnnnnnnnnnnnnnnnnnnnnnnnnnnnnnnnnnnnnnnnnnnnnnnnnnnnnnnnnnnnnnnnnnnnnnnnnnnnnnnnnnnnnnnnnnnnnnnnnnnnnnnnnnnnnnnnnnnnnnnnnnnnnnnnnntcgagaccaggctgggcaacatggtgagaccctgtctctattaatttaattatatatatatatatagagagagagagagagagagacagggtctcactctgtcacccaggctggagtgcagcagtgcaatctgggctcactgcaacattgaccttctgggatcaagggatcctcccatctcagcctcccgagtagctgggactacatgcatgcggcctcacacccagctaattttgtatttttggtagagatcgggtctcactatgttgcccaggctggtcttgaactcctggttcaagtgatccgcctgccttagcctcccaaagtgctgggattataggtgtgagccaccgcacctagcctatgtatgtatgtatttatttttaattaattaatttttttgagacagtcttgctctgtcacacaggctggagtgcagtggcgcgatctcggctcactgcaacctctgcctctgaggttcaagcaattcttctgcctcagcctcccgagtagctgggtttacagtcgcccgtcaccatgcctggctaatttttgtatttttagtagagatggggatgtcaccatgttggccagggtggtctcgaactcctgacctcaagcaatccgcccaccttggcctcccaaagtgctgggattacagacgtgagccaccacgcccggcctgacatatgtatttaattttttaaaatgaaatgaagctctgagggctcaaatcaatcactcaatcaatctgctaatcatttcagtcccagctccagcactaattggcacggagagcccagatgagccgctttttctacgggttcagattgtacctgagtggggcctggactcgagacagctgaggttccagcagctggcccatggattgcatccagccctctgtgctttggtctgcatatcatttttgaaaaaaatgaatgaccatttaaaaaatatgaatttctggccgagcggtggctcacacctgtaatcccagcactttgggaggccgaggcaggtggatcacctgaggtcagggtttaagaccagcctgaccaacatgacgaaaccccatctctacttaaaaaacaaaattagccaggtgtggtgtcatgtgcctgtaatcccagcttctcaggaggctgaggcaggagaatcgcttgaacctgggaggcagaggttgcagtgagccgagattgccccattgcactccagcctgggcaacaagagtgaaactctgtctcaaaaaaaaaaaaaaaaaaattcgtcttccagaacaatctaaagatggagcaggatgcggttttctcctccactctggagacatatgatgtatgcactagactgcaccacagtccccttctctcaccaacgcctttgaatgaggcccaggttcctcagtcctggttctcgatggtgacatagcccaggaacacggtggaaaggatggtgctgagcagctcagtgatgcttccctggggcctgggtccgactacagctcacacaagcttctgatgggccctggcagtgctcgagtagccagaggctccatcatgcaccacacgttgtcacactctacctgtgttgtgccttctccccttgctctccagtgaagctgagagacttcgagtcagccgtgaacaattttgagaaggccctggagagagcaaagcttgtgcataacaacgaggcgcagcaggccatcatcagtgtgagcctttccacccgccgggcttcgggtgtcaggagtggggttgggtggtcaggccttcagttccccctcagcctgcttgggcgccattccacagccgtttttttgtttgtttgtttatttgttttgagacagagtcttgctctgttgcccaggctggagtgcaatggcgtgatctcggctcactgcaagctccgcttccgggttcacaccattctcctgcctcagcctcccaagtagctaggactacaggcgccccccaccacgtctggctaattttttgtatttttagtagagacagggtttcactgttagccaggatggtctcgatctcctgactttgtgatccgcccgccttggcctctcaaaatgctgggattacaggcgtgagccactgtgcccagccagaaacaaaaattttacaaaatatatttacctctgctacgtactctgcatgctgatatttcctattacattctgttttcttatttttatttatttatttatttattgagacagggtctcactcccgttggccaggtcagaatgcagtggcactgttatggctcattgcagcctcgacctcctgggctcaagttatcctcctgcctcattttaaaatttttttgtagagatgaggtctcactatgtcttgaactcctgagctcaggcaatccaccctcctcagcctcccaatgtgctgggattacacgtgtaaactgtacttagctttttttttttttttttttgagactgagtctcacttgtcacccaggctggagtgcaatggtgtgatcttggctcactgcaacctccgcctcccgggttcaaacgattcacctgcctcagcctcccgagtagctgggatcacaggcgcccccccaccacgcccagctaatttttgtatttttagtagagatggggtttcaccatgttggccaggctggtttggaactcctgacctcaaatgatctgtctgcctcggcctcccaaagtgctgggattataggtgtgagccactgtgcctggccataatttttgtatttttaatagagatgggatttagccatgttggccaggctggtctcgaactcctgaccttaggtgatctgcccgcctcggccttccaaagtgatggtattactggtatgagccaccatgcctggccttttttttttttttttttttttaaatagagatggggccatgtatggtgggacctagcctgggacccaacgtgttgctgggactcggcaacatggcgaaaccctatctctaaaaaataaaaaaaattagccgggtgtggtgactcactccagccacttggaaggctgaggtgggaggaccacttaagcctgagaagttgaggctgtaacaaggagtgatctcacccctgcactccagcctgggtgacagagcgagaccctgtctctaaataaataaataagtagagacggagtctcagtatgttggccaggctagtctcaaactctttgcctcaaatgattctcctgccttgacctgccaaagtgctgggattacaggcatgggccactgtgcctagccttattttcttattttctttttgctttttatgtatttatttttagacagagtgtctctctgtcacacagacttagtacagtggtgagatcatagcttactgtaggcttgacctcctgggctcaggcaatcctcacaccttagcctcccatctagatgggactacagatgcatgtcaccatgctgggggctaattttttattttttgtagactcagggtcttactctgttacccaggctggtatcaaactcctggactcaagtgatcctcctgcctcgggcttccaawgtgctgggactgagccactgtacccagccctcattttctcttatcagcagtccccaagctttttggcaccaggctccagttttgcagaagacagtttttccatggaccggtggtgggggaaatggtttcgggatgaaactgttccacctcagatcatcagacattagattctcatgaggagcatgcaacatagatccctcacgtgccgttcacaatcgggttctccctcctatgagaatctaatgccgccactgatctgacagcctaatgctcacttgccgaccctccgcttacctcctgctgtgtggcccggttcctaacaggccatggaccagtcagtggcccagggtctaaattgacgttaggacttgcagtttgaaaaataccacctccaggagacaagaaatctagtgtgatttcctcattctcttgcctaaaccttttattacttcctggctgtctctgttcctgactttttcccacaggggtaggaaggcactgggtaagctctcccctgtgggcctctccagcttcctgctggtcagtccccagcccccatcaccttgcattccagctccagccaataccagcttcctgtcttcctaaacaggctttcttttttcttttctttttttgagacaaggtcttgctctgtcacccaggctacagtgcagtggtgtgactacagctcactgcagccttgatctctgggctcaagagataagtatctgggactacaggtgtgggccaccatgcctggctgatatttttaatttttattttttgtagagatgaggtctcactatattgcccaggctgggcacttgagagctcctgcactcaagcgatcctcctgtctcagccttttaaagtgttgggattacaggtgtgagccaccacacccggcctaaacaggtttcttatgcctcataacatatgctgttatctctgcctggaatattctaaaccttcccttcccacctccttcacctggctaactcccactcaacctttaggtttcagcttagatgtcccctctttgaggcggccttctctgacccctcagtctgggtgaggagccctcacatcaggtttcacagccttgatatgtcccccatcaaagtccacgttgtgcacttgtaattgcctagacttccattgcttaaggaggcagctgctagccacgtgaggctaaagttaattaaaactaggctgggtgtggtggctcatgcctgtaatcccagcactttaggaggccgagatggatggatcacctgaggtcaggagtttgagaccagcctggccaacatggtgaaaccccatctctattaaaaatacaaacaattagccgggtatggtggcacacacctgtagtcccagctacttgggaggctgaggcaggagaatcgcttgaacccgggaggtggaggttgcatgagccaagatcatgccattgcactccagcctaggcaacagagcgaaactccatctcaaaaaaaaaaaaaaaaaagtaaataaaatgtaaaattctcagtcacactagccacatttcaagtcattatagccacatgtgaggcygggtgcggtggctcacacctgtaatccgaacactttgggaggccgaggcgggtggatcacgaggtcaggagattgagaccatcctggccaacattgtctctactaaaaatacaaaaaattagccaggtgtgatggcacactcctgtagtcccagctactcgggaggctgaagcaggagaattgcttgaacctgagagatggaggttgcagtgagccaagatcacgccactgcactccagcctgggcgacagagcgagactccgtctcaaaaaaaaaaaaaaagctacatgtggcctatgggtgctacataatacagatctagaatattcccattgtcacagaaatttctgttgaatagtgctggcctagactgtgtcaggaggcagagaccaggggagaaacttggaggtgctctgggctcccccaccccacccactcccagtgcatccaggtggacgcacaagcttagtaaagtctgcacaccaacttcacaggtgcacactcacccaggcctcttcctcctgcttctgaccagacagcttccttaagcccttcccacagccaaattccagagcaccactggcacgcagctggaccccaggaagtatctgctggagtgaagtaaatggggcccctgtccttggggagcttatgccatcattgaaagaagccagattgcataacttgtgggcagcaaaggggcatggcctcagggaccagcctggggtctgcaggcactgggcaaagagagcagggaccctgagaagtgaaggctcaggacactcccagtgggaggaagacctcatgctgtgctctgaaggacaaggatagcagagctggccaggccgaggaggggcaagtgcactgaagacgtgggaggtcggcgctgagggctggtggccggcagaagagagatcctggcctgggtcccagagctggggggttcccggtggcgggggatggtggtgacagagccccagacagtcagcacaccagcctggacttgaagggctgtggacagcagagaagtgatctgatcacctctgttttttgggaggcaggttcatggtgagctgtttgtgaggactgtggtaaggctaacactgccctctcatggcggagaaatcatacccaaaagaccccagcaggcgcagtctatcctctgccaccatacggcccagggaagcccaggcctagcatgttgtcgtcctcgtcataaatgccatgtccccagctctggcttccaggcgaagagcacccacctcactgcagccctgccagatgtaccatgcgccacatacttccatgtgatcgccctgcagacagacagcatggccgttcagttcaggaaatattcgccgagtgtagattggctccaggctgccaagctcaaatgtgtgcggccattgtcctagcccacaagaagattacaacgaaaggccagacacagtggctcacacctgtcatcccagcactttgggaggctgagggcaggaggatcacttgggtccaagagttctagaccagcctgggcatcatagcaagaccctgtctcttaaaaagaaaaaacaaacaaacaaaaaaacagttactcaggaggctgaggcaggagaatggcgtgaacccaggaggcggagcttgcagtgagctgagatcgtgccactgcactccagcatgcatgatagagcgagactctgtctcaaaaaaamaaacaaacaaacaaacaaaaaacaaagcacaaaccctggttcatgaccagtgccataggggactaggggaattcagagtgagagagccccagctgggaggcagagctggaggctttccaacaaggaggatctgaggtcaccttgaaggctaggcagtagtttgaagggttaggggcagagagaaggtacctgtgaccctcactgactcctcatgggaccaggcccccgacccctcaccctcctggattggcaactccaggtaggaaggctcacagtgggagggaggtggggggtgggcagaccaacaccacaagagagtgcatccaggccccggagctgctcagtagacactaccatgtgtagctggtgttctgtcagtgccagccacgggcctgctatgagcaagaaggcaagacctgccctccagaggctcacaggggctccaggcccctgtggatcatgcactcgagttggggaaactgcagacattctggaaggcccttctgaaggcaggccagcccccagcctgtccccttggtgtgtttctgggtcttttcagtgctgccttgctgagtgcttgcaggtttggattgtctttttgcattgactgaagccaaaagcagctttaggtagttcatctaaaggtagaaatgagtagatagacacaactcccaatacatgcctaagccaaagagaaatgcatttgactgactcgcagtcatgtatctcccagacacaatttgtgtggatcattctgagtcagtaagtgtagattaacctgagggtaggggtcattggaggggccagagggaaaccaagggtggcaggttcccaccagagccctgccttctgggattgatctgggtggggaaaattaatggtgtaggtgccaaacacaggggctaagctccctctaccatccacaggccttggacgatgccaacaagggtatcatcagagaactgaggaaaaccaactacgtggagaatctcaaagaaaaaagcgagggaggtgagttcctgaaactctgaaaaggcaacttcagcattctccctctgctttcttttcctctagtccgagacacatgcgacagcagctccccaatctgggggcttggcactgcccatcgtgcattctaatttcagtgccaccagcagccctagcctatctctggggcagtagagggtgaggattcagcccaccatgggctggactgtctggccccagagcgcactcatttctctcttcaattgattcatcaagtatatggtgagcacttgtcatgtacctggaaggtgttagattctggggagagaggcccatccctgccctggaggagcccatggccctttgggcaaggctgaccagtggagttgtcagctgctgggatcctgcacacaggtgctacaccgaggtggaggtgtgctgccatgagggtgcatgcaacggggcgtgggctcctctggggaggcagaggaggcttcgaagaggaaaaatcttctacctccaactccaaaagatgcccaggagttttccaggagagaagtgggagaagaaaggcatttttccagcaggraacagcagggccagaggcacagagacagaataacagtagctacactttgggggctcttactgtgtgctaggcactgggttaagcaccagacaggagtgatcttgttgggtctttaccccactaggaggtgtaggtgctgtggggggaaagggaggctgagtgaggtgagtgctctgccagagtcatgtagctagggaggggtgactcggggccccactctccccacctgcggcgctgctctcgggccagcagtgtgatgggcaggtgcagaggggcataaggtgcagaggctgcctgacagctgtgccttaccacattctttctcacaaggtctccagggagtaaacaggcctttggccccctgcctttgggctctcctttcctgcagggagggagtgagggaaggagaagcagaagatggctgagcagccctaccccactggagaggggcctagaggaacaggggtgttaagcgcagtagccgacccccattcrtgcttcccgcaggccaggcattctttcaaagactgtgtgcacggactcatcctatctgtatctgttcaggaacactatgaaggaagtgttattagcttgactttatggagracatggaggcagaggggttagaggctacagtggttttcagtcttgggcagtctgctctagaacccacgcgtcggcccgtgccacactgtttctagtgacacagacagccttttcctgccccagtctgtggagctctcactccagccagactgcagtgaacagagctggggctggaggtccgggaggacagagcccaatgcagattcttggctgcagccctccaggctgcaaggctgaaatcctttctggtccaggcagggcagcgggaggtttctgggcacctgagcagccagatgacagccctttattatccagcacctgctctgtggtggctggaccccctcagaggggctctgtctccrcccccacatgccctttgagctgctctgagaagccacaggagcaacagctgtggagagagactctgcggggaagcagccaacaccccagtctccctaccctggcctgcgtccttgtgcctggagaactgccgggcacgtccctctcagaacagcaggtggcagcattgcatctgttttcaccaccaaagggctgtgaccccctgagacctgagaccctctgcagatacctcagtaactagtggtttccaggaggagaatgtaagggagacgcagaaggggatgtaacttttctccataactgataaaaaaaaaaatttaggagcaaggatccctttgcttgtaaaataactcttcagctgaactttttgttagcagcgtatatctttataggaaacctatctttttccttatgttttttctatattttcataggaaacctcccaacaaataatgaatgtgcttcccagggacaaagagaaagtgtcagaatgaagatgctggagaaaatccttctgtcattttccagcacctatgctatttcttgcagggaaaagaggtgttctggggtcagactgtcctgggttcaaattctgtctcacttgcacacttgcagtgtgaccattgtgtgatttcttttctttctttttttttttttttgaaacggagtcttgttctgtcatccaggctggartgcagtggtgcaatctcagctcactgcaacytccatctcagcctcccaaagtgctgggattacaggcatgagccactgtgcctttttttttttgaaatggagtctcccctctgttacccagtctggagtgcagtggcgcgatctcagctcactgcaacctccatctcagcctcccaaagtgctgggattacaggcatgagccactgtgcctttttttttttttgaaatggagtctcccctctgttacccagtctggagtgcagtggcgcgatctcggctcactacaacctccgcctcctaggttcaagtgattctcctgcctcagcctcctgagtagctgggactacagtcttgtgccaccactcccggttaattttttttttttttgagatggagttttgctcttgttgcccaggctggagtacaatggcacaatcttggctcactgcaacctccgcctcctgggttcaagcgattctcctgcctcagcctcccaagtagctgggattacaggcgcctgccaccatgcccagcttatttttgtatttttagtagagacggggtttcaccttgttggccaggctggtctcaaactcctgacctcaggtgatccacctgcctcggcctcccaaagtgctgggattacaggcgtgagccatgccgcccggccgtgtgatttcttttctatcgatctcaggtcccttgactgcaaactcaaatcaacggcagtgcgcattttcatgatgtctggatgggataagctatacagccctcacgtgatgcacaggacggagctgggctcagtcaatgatggttccctttctctgcttttggaaaggtgtgctgtcaacaccaatttaaagagctggcaaaaacagtcattctcagggcctttctctcatcggcctctcaaaagcacaggcctccacagagatgaacagtttctttcttttttttcttctttcttttttggagacgggtcttgctctgtcacccaggctgcagtgcagtggctggattttggctcatcacagccccaacctcctgggctcaagcgattcttctgcctcagcctccgggtagctgggactacaggcgccaaccaccacgcctggctaatttttgtatttttagtacagacagggtctcactgtgtcgcccaggctggtctggaactcctggcctcaagggatctgcctgcctcagcctcccaaagtgctgagattacaggcgtgagccaccgcacccggcctgacatgaacaaacttttatctttcttcccgcttttctcttatttttcagaagcttcactgtatgaagatagaataataacaagagagaaggacatgaggagagtgagagatgagcccgagaaggtggtgaagcagtgggaccatagtgaggatgagaaagagacagatgaggacgatgaggcttttggggaagctctgcagagcccagcaagcggaaagcagagtgtggaagcaggaaaagccagaagcgatttgggagcagttgccaagggcctgtcaggagaattaggcacaagatcaggagaaacaggcaggaagctactagaagctggcagaagagagtcaagagaaatttataggaggccttcgggagaattagagcaaagactctcaggagaattcagcagacaggaaccagaagaactaaagaaactttcagaagtgggcagaagagagccagaagaactgggaaaaacacaatttggagaaataggagaaacgaaaaaaacaggaaatgagatggaaaaggaatatgaatgaagccatcggtagagatgaggatcaggaagctggtgttcagagggatcatgggattttattaaactggattttcaagcgatttgtctgttataggaaaaatgagggttttacttctgctgctttccatcactattttgccattaaataggtgtctttcactcttgcaaaccctgagtctgtcactttgcctcttcacccctgcccattcttggaagagcatcgtggaagaaatgagaaaggtgccaagaagaaagggtttcaggagggtgaagatacgggcgctacagggaacaagaagtcacagggaggagaggggaaggcctgggaggagaggtgcttcccacacaccggtgactgactgagtccctccagtgcgcaggacagcggggaggctttatggatggaacagtggtggggcggccccagctgtcacaggtaggagaatgccgcaagccagaaccaagcgaatgctgggagtgaggccaaagataggggagtggcctgggagtcgggagggcagacagactccgcctctgacacctctgggtggcataatcaggtaaatcaggctctccaagctggcttctcctctgaacaatgggatacctgcctcaggggttgctgcgaggactgagtgcttagcacagcacttggacaggaaactcaaaaatccaacggagctctcagtggtttcacagaggaggtggcagctgaggatctggcctcagaggatgttaggatttcactccgttactcatctgtccctttggccattgccatcctggtctgtctccacagctcctagaaggaaaggtcggggctgagactgactttcggctggcacagggcctggacgaatgaggccagtgaggcatttcagatgcagagtttaccggaatgccagcaaattgcatgataatattttaatccaatgtggtaaaaaaaaaagtttttaattaatgcaaaagtccatgatgaataaaatatcaaaaattaaagacaggatccgactttgcacgaccctgcctcactcacttcctgctaatccacaggaccggggagggtgactgagttacccctcaacacgcagaaaaagctagtggccgctcagctcgcaggcgcagtgggtgggtgcgcgtggggagcaggcgcgcgcagggggcgggaccgggccgaggttcccgcgcgcggcgagagtttcgggttttggttcgcagcgcctgcgcgcagaggagacggcccgcccccagcccgcccgggtgcccgctccgccccccgggctatgtaaagcggccgggctcgggtcgtgccaccgctggactcccgtgtccctccgcgcaggcgggcggccccggagcgctggtgccggcagaggcggcgacggtggcgcccctcctcatcatggtgagaggccgggcggggccgggcacggggtagcaccagggcgggaaacgagtgtcggggcccctcgggaggaagcgtcttgcaaacgaggacccggggctccgggttcgacttccagttttcttggtactcagggcggccctgaggtctgggagaagcggaggggttttggggtgccggagaggccgctgtaaagggaaacggtggtgtttctcaggagggaactcgggaccgcagaagctgctgcgcctctgggagcctgggtgggcctgggccgggagcccgggagctgctcccgaccccacgcaggcccgcgctggggcagccgcttcggcgccccctccccgggcccagtctcatcacgcggaaccgctgccccgcgcccgggtgcgggcgggaggtggagccagttcagaggaggggaccctttacggtaaaagctgccgtcccttgtggcttctagaagataggaaaacaagtggctccgagaggcgcttctgacacacagcacagcggcgggtagagctggatcctaattgcaggtgccctgtgctgccctgttctggacaggcacaaagaccacgactttgtgggggccgggagagggtagaggaggaggtggcaggcttggtgaaagagggcctttgtccagtgctctcctgccctgccccccaccagcccttctgtgggaccattgtacccgcatgccagacaagagagtattatctgttgcggccattgttgggggaagggaggcagtcttggggtaacccttctccactcccccccttctctgtgcactcagccgtggcagctgtggcttggcccagacacagagacccccacctccaaagaggacgtccttagtaggtgccaagcatataagagtgaggccagtcccagaaccgcaggctcctggcgcgccccgcatgcctccagcacgtttacctttccgaagtggcaggaatggggaaagcgcacgcttaggagagcttcagacaagcttccctcttcctcctccacgaccagaagcggaaaggtgctcccggaccgaaagggaaagaaggtccagcactgccccgcttgggaaggcacccacaaccagtctagggactaggggtaaggccggcggggagcccgcgaatgacctgggctgacatctcttcccctccttacacagaacagaggcttctcccgaaaaagccacacattcctgcccaagatcttcttccgcaagatgtcatcctcaggggccaaggacaagcctgagctgcagtttcccttccttcaggatgaggacacagtggccacgctgctagagtgcaagacgctcttcatcttgcgcggcctgccaggaagcggcaagtccacgctggcacgggtcatcgtggacaagtaccgtgatggcaccaagatggtgtcggctgacgcttacaagatcacccccggcgctcgaggagccttctccgaggagtacaagcggctcgatgaggacctggctgcctactgccgccgccgggacatcagaattcttgtgcttgatgacaccaaccacgaacgggaacggctggagcagctctttgaaatggccgaccagtaccagtaccaggtggtgctggtggagcccaagacggcgtggcggctggactgtgcccagctcaaggagaagaaccagtggcagctgtcggctgatgacctgaagaagctgaagcctgggctggagaaggacttcctgccgctctacttcggctggttcctgaccaagaagagctctgagaccctccgcaaagccggccaggtcttcctggaagagctggggaaccacaaggccttcaagaaggagctgcgacaatgtaggtggcagggtggggccttataagcccaccttgctgggcacagggtgctgcgggcaaaggaccatcattgtactcaaaggatggagcacgaagcagcaggaggcagagagaggctcacctcagcgggggcaggggcaagcggtgcgtcccagtggtagccttggggagttggcagcacattgggaacacgggggcttcccagagcgcctttcctcccaccacacctatccttctagccctcttctctccgacacccttttcccagcctgaatgtagaccactgtcccttgtcttggaggtgggaaaaacaaattactgtagtaacaggaaacatgtcctcttctaatgtaaccttagagggggaatcaagcccagtgttttccaacgcatttttagcagcagaatcatgttccaaaaaataataataataatcacatgaaattgtaagctgcaaaaaaattaaaactaggactattgtggcttcactggggatggttctcaggcctcggactactcaatttactcatgggtttgtggcatctgcagctccagaggacacaagtctcacacttaggccaaaacccgttttcagatggaaaaacatggacccaggagggatgtggggtttacgggctggaaccctggactctggccactctagcagggttctctcttggcatgggctttttgctccaatgataggtttgagataaagaagggtcctggtggctctcctggagtgacctgttggagaagtgccacccactaatccatctatatgcctttaggccatttctggttgcctccaattttatttatttatttattgtgacacggagtctccctctgttgcccaggctggagtgcagtggcgctatctcagctcagtgcaacctctgcctcccagattcaagcaattctcctgcctcagcctctcgagtagctaggactacaggtgtgcaccaccacgtccagctaatttttgtatttttagtagagacggagtttcacaatgttggccaggctggtattgaactcctgacctcaggtgatccgcttgccttggcctcccaaagtgctgggattacaggcgtgagccaccaccgcacccagccacccccaattttagatgatcttcatgcctgaaatagccccactctggtttgttgacattgtgtatattgcacagaagcagggaatttgtgcctgtatgggttctcagagagcttttttctcagctcctaaacttgaactctgcagtgaactgtggtgcttgcagtgacattggccaggagcaagccctgtacctgtgagctggtggctctgccctgggagtgactactgctcaaagttgcttttaatatttatttatgagacggagtcttgctctgttgcccaggctggagtgcagtggcatgatctcggctcactgcaacctccgcctcctgggttcaagccaattctctgcctcagcttcccaagtagctgggaatacaggcgcctgccaccatgcccggctaatttttttttatttttgtatttttagtagagacagggtttcaccatcttgaccaggctggtcggtagcacaaaagaaaggaggggcccttggcccaagatgggacgaatcaagcttgacaggatgattgccagatcttttttttttttttttttgagacgggggtcttgctctgtcgcccaggctggagtgcagtggggcaatttggcttactgcaacctccatctcccgggttcaagcaattctcccgcctcagccacccaagtagctgggattacaggcacccgccaccatacctggctaatttataaatttttagtagagacagggtttcaccatgttggccaggctggtctcaaacgccccgcctcaatttcccaaattgccgggattacaggtgcgagccactatgcccagcctattttatttgtaaaggaaaactggatttttctgcccaggattagagcaggagaaatgtaatgggccagcaaggctgctctcaggagaggccttcctcccctgtggagggcgagacatcctcatggggactcaattcagaacataacaggaaaaagcgagtgactccaaagacagccacaggtgtggagtctggaaatcaaaatcacagatactccactcctctttgtgtcttccagccccataatgtcaccccattatagtccaagacccttcctgtaccaggaggcccccccataggcctgcaaggtgtgtattaaactgatggtgacgttgtgactgcttgtccagatgggcccctgagtgaaatggggcactactgatagttccctggtggtcctgggaacactggggtatatggtcaccctaactgttgtgctggattgatagatagggttggtcacttgcccgaggccgatggctggtacatggcagagctgagatattcactgtgttctggctgtttccaccgtaccatgttgttcccagccctctgttttctttccaccccacttcccatgacttgcttcccctttgagacgtggtgctagtaaatcttagattcccttggcctgtactgcctgcctctgttacaaatgccttagagtttggagaagagatggaaagatctatacaatgtaaagccagagaattttaacttttttttttttttttttggagacggagtcttgctctgttgcctaggctggagtgcagtggcactatctcggctcgctgtatcctctgcctcctgggttcaagcagttctctacctcagcctcccaagtagctgggattacaggcgcccgccaccacgcctggctaatttctttgtatttttagtagagacggggtttcaccatcttggccaggctggtcttgaattcctgaccttgtgatccacccacct

SEQ ID NO: 96890 - DNA, 44666 bp, Homo sapiens
  misc_feature (1)...(44666): n = A,T,C or G
aaagagacaatcaactgagaataaaaaacaaaaagaatccaggaactaatagactctgtctataacagaatgaaagtttagacaactaaagataataaattatcaaagcctaaggcatgatatggggttagcaataatgcatttctgataatagaaaatgtaccatcatttaaggaaaacaacaactaaaagggaaagtaaaaagtaaatgataagaaatttgtaacttcaggccgggcacggtggctcaagcctgtaatcccagcactttgggaggcagaggcgggcggatcacgaggtcaggagttagagaccagcctggccaacatggtgaaaccccgtctctactaaaaatacaaaaattagctgggcatggtggtgcaggcctgtaatcccacctactggggaggctgaggcaggagaatggcttgaacccaggaggcggaggttgcagtgagcccagatggtgccactgcactccagcctgggtgacagagcaagactccatctcaaaaaaaagaaaagaaaagaaaaagaaatgtacaactccattatatggagagactatagaggaacagaggaaaagctttaagtcagaagaaaataacaagaatttcataacactactctgcaaaataattgtttctggttctaatccctcatattaagatgcttatcaatattttataatgaaacaaaatgagtacgtaacaaagacagatgttatataaagtacctaagattatgaaccattataccatcttgtggtaataaatgaaaaatgcaatttaaagcaagtaacacaaagctatgttctatggagttacaatattattaattaccgttcgtttaaatataaatcagatattcgcatgacatttttcatttggaaaactaaacagtttttccattgccacttacttacaaagtaacaggaatattttcccatgatctgtctgcttcaagtttatctaatgagcaaggactgtcatcctttttcatggactttggtaattcttcagtacactgctctagatttctcttggccttcaagataagcaattcaattttgtcacctaattgtaaaagatgactattaatccttgaagaaaaaaattaatgtaaagcatagcaaaatctcacaaagtcaacaagagttctgatcatttggaatgtacattcatctataacagcaaattatgttaaaatgtgacatttcaagcaaagaaaaaaatgggagaaaagacattttctagttacaaaatgctgtatgtgaagattataagcattccaaaaagatgtattacatgaaaacaaaacataaaagctcccagatatcacatcaactttacagcacttcttttggtttaaaaaaaagaaaaataaataactataagcaataaacaaagtattaccactgaatggctttgtggattgtcctgggagaagtggattctcacattgacactggctatgttcaaaatcacatttgtattcattaactaattctttatcatcactcaaggaatttgaaaagtttgagggttcaaaagcatattcaaaacaatctaatttattgataagccgagaagttccttgtgcctgatgactatgtctaggggaacactgatcatctttaaatatctgataaaccctttgactatttgcatcaggtagcaagtcttgattgtgcagccagactgggtatttgaaatcaggtatactagttatccctgaaacattaaggtcagatttctggctagtgagccatcttgggtaattcttttcaagactgtgttctgaactgtccttgaaagacgatttcttgggaaaagacaaagatgattcagaaatgcaattattagtcctattcataagttttgggtttttcagcctaccacattgctttccatttatatttgagcgtataacaggagtaacaaagttatccttgcccatggaagtgtagggtccttgaaaatgtggattcttctcaatgtccaatgaacccagtcttccacggcatttcttgtttttcttgctcgttcggtgactcggtccaacataagtataagaaaatgatccatctgctgggagtcttaatagatcatcagttgttaggctcatggagtctatgtcattaacggtgtgtcttctacaggatatgaagtttgagtgctttttgtgatcaaggttttcaaaagctgaaaaacgaagaacagttttgtttattacatacaaatattttataatatccaacagtaaatgagaattaagaatttaagaggcattttgctgctttccccttatcctcactaaagctttgattaaaagcataaaaaggtgtaggtggataaaacaggatgtgctttttttctcacgattcttcgttctgtgttaatttctacgtttctctccaacctcctgaattttcctgtgttctctaatttactgttccttcaactttcatcatctagacatatctgatacactaatacaatcacagtaacattggtcactcaatattggttgcagcatagaaaaaaatatgctattaaactaggtggaaaaataacttgttttctcacctacaaacccttcaatggcatggattatacatagagaacagctgttctcattctttgcttccggaatatattgaccacatccctccaagaactgaatacaaactttttctattctagggtcattctgcaagtgttaagtaaagtagtaattgacttatcaacaactgcattttccaaacttgtcttcaaggaagctttattatggacaaactcttaacatcttgtgaatattactgttccacagagaattatataatcattttacaaaaacacccagatctcaatattatgttatttttactccaaagtaacaaaaataatgtcaaactttacaatactacagtacatctcccaaatgcttcaaaacatctgaacacaaagaaaacaaagaataaaagcataccattgtttggtttgtaaatatagttgcagaactgtgacatattagtaaaatcctcatcaatgttaatttttccagtgcttgcaccaggatatatttggcctagatcaaaatcatcaatataagcctgtagagcttgagaagcagatctgtacagcttatctttatagtgaaacgagccatcagaattagaggaattactaccactcagggtgcagcttgccagcagggcagatactgaagattcctgagaacaaagtctatgttttgtctttgatttcgccatggcttcttcaaagtggattgtttctattcatttcccttaaaaacaactgtaatacaaaaacgaaatgttaagatgccaattaaaagtgaccatacacaaacaaaattactaaatatgtaaaccttttgtaattttctttaaataataaaatccattatctataacagacactccttgttaggaattgtagatttttgttatatttattattgtgaattccttcatcaatgatttagaaaacattttttgagtacctactatgtggctggaagtatgtatacaaaaattatctgagaatatacatggaaaataccaaggagagagtactcacttcttaaaaagtcctaaaaactacttatgaacctcttttctcttatggtgatatattctatgacatcacaatacctaatattcccctatacatcatatttttcaaatcataagcctactaccatgtgctgcagataatagcgctcaataaattttttaaagccatcaaatgaagtattcaaaacaagaacaatggagaatattcactttcaatgttataaatgctagtacatttacaacatttaactgtaaataaactgcaggtcttattctggaatgagttagcaatatacacttttcctaaaatagttaatcatttcctgaccttcgtttttggtaccaccctccctattttcaattcttatgttaaatggattcagctcacctctttcaaaggaagcttaaataatgtgaaaatcaactcaatgtgttcttctgtttttccattattaaaattgagagaatccctgtctacctcagtacagtaacaggatgtatatttgaaaacctaagaaatcacagaacgaaccggcactaattcagtccatgatgacattctttttaaaattaaatgaatggatttcctatactaaaaaagtattaatgttgaggacttaacatatgctatgatgttataatgtttaatttttggctataattttagaaatatttgttataacaacttttaatgtaatcttagtaactattaaatttggctttaaaacatcgaaagttttctaattaaataagagacaaagtaaaacatcatcctaccacagcgttagagcatgcaatggccattacaagagatctgaccgtggtcagtgcaaatggcagaacataaggtaacagttgtttcgtctcattgatttatctgaattctgtaatactggtatatctctgacgaatggctaaactaagccagctttacctttttcgtatcccttttatttaaagaagtttaaactcactcaagtaaatttgtttggataagcctgaccaaatgttttctgtctttgaatgccgaacaggctactgattttattttacaaaaccttgaaagagaaagctgttgtattggtctccgtaagtgggtgataacatttactagttatttcaactcacaggacagacaaaaagaaaatgcacaatttaagtttcattatgaaaagttttccaacttttccccaaaagagtatacaaaagtagaatcgttcaataaacccctatgtactcatcatcctgcttccaacaatcgctgaacagaccccaattgtagctaaagtgggtagggacccacccacttctccccacttcagccacaggattattttgaaccccacatatctcatgcaaatcccatatatcttaccatttcctccgtacaggcttcagttcgaatctccaaaagaaaatccatcacgcggaagaacagaatgttaaacttattgacaacaaattttaactaactttgattcaaaaacagaatgttcagtgttaaatagccaatgggaatatcgcacaggaaattaagaacaactcttggaaatagctctgtgactgctaagttaggaaagggaacgtttgtttactcggcagcagaaaaccaggaacccaccgaccggccagcgaaggtcgcccgtctccagcagtgcgcatcgttcccctaccccgggcgccctgaattccaatttttccagtcccaatcaggcgacaccctccctttggtgttccaccgcccgtcagtcacagacacagacaagttcttcagtgagatgcttttcactccgaaaccatttattcagcagccagggcgagcgcagcaatggactgaaggagaagtgttccgaagcgacagccccagagcgcaagccccttcctgtcgccgcctcaggtccgcagacgcccgtgtgagccccctccgccgcgtcccgcgaccctccctcgcccagggggcactccccctacagtgttcttccttccacagagactccacaagcgccctccctcaggagacgtctcctcctctttcctcgccactctcctttcgccttttctcggctgtcacaggatgggacaaccctcgaaaagacaccctcctttccgtcctaactcacccctaaggccccaaaataaaaataaaggaaaacaaaaacaaaaaccgcacacttccacagctctccgccgaaagctcaggcctgttacccaacgcgagacaccacaaagcatccccaacccggacaccgccccgcctcaggctcggctcactcgcagcttcctccgcagtcacagcagagctcgacacccgcgctcgctttcaaaccgccccaacatggcgccggcctgcggtgcgcatgcgcggcagtggggcgccgggcgcgagcggagatgagggagcggccggagaagagaggatgctgttgagcgttaggtcgcgacccctgctggaaggtgctgtttctccctcctttctggggctgggartggggggatgtgggctgcatccaagtcgctgccccccacgcccttccaacctccgtcacagctattctcggccagtttgcgcggggacttgctgatctcccttcagccggccccggggtctgcgggaggggactgggtggggagggagacttaagggcgctggcggctgtcgttccggtcgctgagagtctgccccacagctccagtttttccaagtgagttcagcctccccgcttccagagcatcccccgccaaaaataagayatcgtctcagctagtaggcagtcccccctcaccacttctttcactccctcttcagtgcctttcctctcacaccccggagcctctcacacacaaagcagatgggagattggagacccgagtttagccagggatgggatttaacaaactcctaggaagccttgattcccagggaagaatggcagtgaccccgcacggattggggacccagtcaggcagctcagaaagagggtcattgtacaaacagatgtaaagactcactaacatgtgtgaacctgtctgtaagtctggaaggaatccagtttcaaccaattggtgtatcaaaaaaagaggccatcccaatgttggtttatgtttattttccactgaccctatgagtgaagatatccttgaccatgagtccatctgaatatgttccagctcatccgacgttccaccaccatgtaatacaattgtagtcttactgtttgcactttcttctttttaccctttgtagcctactaaattttaccttcccttttctcttagcaaatgaaaaagtccggaagctataaygttcagtttagtggttaaacacaggtctattgtggcagtaatagttggtgatttgaaaataagacataccctgctagtggtatgtcccaataatcttcaaagtctctagatcaattaatatcaagtaggtttccaataggaaatcaagaacggtgttttatatgctaagacgagccctgstcrgggattaacaatccttgttaattgttartgacgtaagcttaaaaacttaaatttttgtatccacgttccacctaagtgtctttttaaactgagttcctttaaaatagtttcttaaagattctttttataaacagtatcttttaaagttttttgtactatatttttctttcatcttggggcatatatgtagcaaatgtttcctaakgaagacaaagtatagataaaggacactgagaagatataaagaaaattatcaaatatattgacctaattcatggatcaaaataattctacttctgccttgtttcctcacaggttaagagatatggagatttccacaaggatttggagaggarccccagtagttactaaaattctgcattagatctgtcaggaaaggtaaagaaaccaggactctgctaggaaagaggaggttataataatggtttactaaaacttttcaaatatagagactatcaactacctgttgtgccttgctggagaattaaataagagaaaatagatttatgatccaacctgaagagttttaagtgagagctaaggaagaaatgttccaataattaaactttaagaaggtttatttaagtgcttaaggaagcagatctttggagagttttttaaatgatggatttatatgtgtccatttttttaaagagaaactaactattttgataacctrgtatrgggctccacactgtttaaagcatttttacatatattaactcaactaatccttataatgattcggtgagatagatattattatccccattctatagatatggaagtkgaagttcaaaggttaagcaatttatccaaaataatatagctgtactaagtgacaaagtcaggatttgaatccagttctgttttcaccttacctgccagcttcccctaactgaaagctggatgatgacccgaaggaccagtgagactgcagcttccggaactcattcacagcagtaatagttatgtctagtatcttactcaactgttgttgctacatctaccacagtgcctgtctcagtccttttgggctgccataagaaattaccaaagactgaatgacttgtaaacaataaatttatttctcagagttctggatcctggaagtctgagatctgggtgccagcatggttaggttctggtgagggccctcttctggttgcagactgctaacttctggcagtgtcctcacatggmagaaggggccattgagctccctggggtctcttttgtgagggcactaatcccattcataagggctttgccctcatgacctaatcatctcctaatatcaccctgggagttaggatttcaacatatgaattttagggagacataaacattcagtccattgcagtttctaacttcaagcagggttcaatgtgtttaaattgagttgatttaaacttgatcctatctgaggaggtgacatttaagcaaagatacctatgaaacagtcagttatatgaacacattgcagaagacagtgacaagcagaaggaacagcaagtacaaagaacctgaagtcagaaattgctttattgtatgtgaggaacagccaggagatcaaatgaytggagctaagtggacaagaagaagactggtaggaggtatatttgaagaggaagccaggggtcagatcgtgtagtgccactgctacgcactttaaataatcctcaagaacacataaccaacagctcataatgcttcacaagacaaaggrcgygtgattaaactgttagaaattaaaattatttattgaatgactatcgcatgccaggcactggatagaaccttaagcatatcatctcatctaatcctcacgctaattctacaagacatatattatcctaattttaccttgagagaaatggaaaaacagaaatattaagtaacatgcttcacacaataggtggcagagacaagatatgacccaggtttctgatttcaaagtctagatttttcyactataccacagtttctcatttgaaagactgtaaggagagaggggttcatgcatacatgcattcatcmagtaattatgttcatttctatgtgacaggcattatagaaataatattaaaatgtaagatagcactttttaagtttttatatgrttatattcttaccagttgtttgtttttaaaacttgcagatagatggacttcaaggcaattgcccaacaaactgcccaagaagttttaggttataatcgagatacatcaggctggaaagtggttaaaacttcagtaagaaaataarttaaattatgtttcaagactttgtttttaagtaagaaacaattcattgtaaagacttttttaaaaaaatattttctgtkccaggtgcagtggtgtgcacctatagtcccagctactcaggaggctaacacaggaggactgcttgagcacaggagtttgaggctgtcatgcaccatgattgtgcctgtgaatagccagtacactacagactgggcaacatagtgagaccctgtctctgaaaaatatatatatwtwtttttttcttttacaaaccagaaaaaaaagtgtttttacttttgttagtttttcattttcatttttcctgcatttgacagctaattatttgtggatttttattcccctttgagaaaaagataactgtttccagtaaggcttctagaaaattccatggaaatctgtgagtacaatcttctatttacaattactgttttaaattcaatgccattgatgtatctggaatttcagtgctgcttcattagctataataaattattttatagtaataaatagaaattattaagtcactaggcagaaatgtgataataataaaatacagcaatcagataccatctaatcttctattttcaaatctgatgacaatcagataaaaaatctcttctaattactaattcactaaataggaaattttcacttcaagaaataattactataaaagcagattggtattttcttgctaacagtaatattttatggaattttaaacccttcatgtgtccattaaatgaaccactaacaagtaaagtgtatttcttcattttattttattttcttgagacagggtcttgctctgtcaccaggctggagtgcagtggcacaatctcagctcactgcaacctstgccttctgggctcaagcagtccttccgcctcggcctcctgaataactgggactacaggtgcacaccaccacacctgactaatttttatatgtttttgtagagatggggttgcccaggccagtctcaaactcctgagcccaagcgatctgcctgtcttggcttcccaaagtgctgggattacaggtgtgagccactgtgcccagcctacttcctcattttaaatatgcatttttttctgtatgcttcttttaaatatacttttaaggataaaattatttcaaatacaagtacactaagggaaagtatattgactttttttagcttaatctttcagagttcatttattgctcatgatagtacatcagggccatcagatcatcaaattttattcaattccttttcttttggagtccactccttctttcaactacctcattttatgtttcttgcttttttaaaatttcaataaaatttacctatattatatttcagcccaattttttaccattggacaaagctgatatgctttctcccactcactttaacaatgatcaggaaaataatccctaccttattgaaataatggttctaatamaggcactttcaaaaataaacagggaggagtgggtatggtcaagcctaggtacactaggggaattaacttttggataatttggctttttggtatcttacagatcagaccagtgtagacagcaaccttggcattttttaaaagcttggaagttatttatttagtctacaagtaattattgagtatttatttagagagtgctatacaaatgcctagagccaaagaataggttctgttaagctgttctaaagctttactggaaattttcatcagagatattttactcttacatgcaaaactaaacaattggtactttttgcactcacagtttgagtgaaatttatatgcactgtatactaggtatttattggtgcacaacaaattatcccataacttagctacttaaacatttattatcttatggcttctctggattaggaatccaggaacagctttgctaggtgcctctgcctcaaggaatccacaaggctgtaatcaaggtgtcaacagggcttaggtctcatctgaagactcaactgaaggaggctatgctccaaactcactcacattgttgttggcaagattctcaagtagctgggaccacaggctagttctttgaaaagaaaaaaatggcagaccattagtaagattaaccaagaaaaggagagaagatccaaataaactcaattagcaatgaaatgggagatattacagccaataccacagaaatacaaaaagatcattcagggctactgtgaacacgtttacatgcacaagctagaaaatctagaggagatcgataaattctgggaaaaaatacaaccctcctagattaaatcaggaagaaatagaaaatctgaaaaaaaaaaaacaawaacaagtagcaagattgaaacaataattttttaaattgccaacaaaaaagtccagaacgagatggattcacagctgaattttatcagacattcaaagaaaattggtatgatcttactgaaactattccaaaagatagagaaagaaggaatcctccattctatgaggccagtatcaccctaataacaaaaccagtaaaggacattaaaaaaaaaaaaaaaaaaaaaacggaccaatatccctgattaacacaaatgcaaaaatcctcaacaaaatactagctaacctaatccaacagtatatcaaaaagataatatataccatgatcaaatgcatttcatacccaggatgtggggatggtttaacatacccaagtcaataaatgtgatagatcacataaccaaaattaaaaacaaaaattttgatcatctcaatagatgcagaaaaagcactggacaaaatccagcatctctttttgactaaaaccctcaacaaaataggcatagaaggaacttayctcaaagaagtaaaagccatcyataacaaacccacagccaacattatgctgaacagggaaaagttgaaagcattcctcctaaaaactggaacgggaaaaggatgcccattttcaccacttctattcaacatagtactggaagtcctagccagagcaatcatgcagatgggtaaagaggaagacagactgtcactgttgatcagtgatatgattgtatacctataaaaccctaatgactcatccaaaaagttcctagatctgataagtgaataaagtttcaggataaagtcagtgtacacaaatcagtagcactgctatgcagcaacagtgaccaagctgagaatgaaataaagaattcaacccctttttcaaccactgcaaaaaaagaaatacttaagaatatatctaagcaagatggtgagagatctctacaagggaaactgcaaaacactgctgaaagaaatcactgacacaaacaaatggaaacacatcccatgctcatggatgagtagaatcagtattgtgaaaatgaccctactgccaaaacaatctacagattcaatgcaattcccatcaaactcccatcatccttcttcacagaactagaaaaaacaatcctaaaattcgtatggaaccaaaaaacagtccacatagccaaagcaaaactaagcaaaaagaataaatctggaggcaccacattacccaacttcaaactattctacaaggctctagttaccaaacaccatgggactagtataaaaacaggcacgtagatcaatggaacagaatagagaacccagaaataaagccaaatacccacagccaactgatccacaacaaagtaaacaaaaacataaagtggggaaaggacaccctattcaacaaatggtgctgggataattggcaagctacatgtagaagaatgaaactggatcttcatctcttaccttttacaaaaatgtactcaagatggatcaaagacttaaatctaagacctgaaaccataaaaactctagaaaataacattgggaaaactcttctagacattggcttaggcaaagagttcatgacgaagaactcaaaagcaaatgcaacaaaaccaaaaataaatagwtgggacctaattaaactaaaagccttctgcatcgtaaaagaaataatcggcagaggraacaggtaacccacagaatgggagaaaatattcacaaactatgcatgcagcaaaggactaatacccagaatctataagaactcaagcaaatcagtaagaaaaaaacaaataatcccatcaaaaagtaggcaaaggacatgcgtagacaattctcaaaagaagatatacaaatggccaacaaacatgaaaaaatgctcaacatcactaattatcaagggagtgaaaattaaaaccagagtgagataccatcttacccctgcaagaatggccataatttaaaaatcaaaaaataatacattttggcatggatgtggtgaaaagggaacacttttacactgttggtgggaaggtaaatcagtacaaccactatggaaaacagcatggagattccttaaagaactaagagtagaactgcaatttgatccagcaaccccactactgggtatgtatccagaggaaaagaagtcattatatgaaaaagacacatgcacacacatgcttataggagcacaatttgcaattgcaattatatggaaccaatgagtggataaagaaaatgtggtatatataaacyatggaacactactcagttataaaaagcaacaaaataatagcattcacagcaacctgaatggagttggagaccattattctaagtgaagtaactcaggaatggaaaaccaaacatcatcttttctcacctataaatgaaagctaagctatgagaacacaaaggcataagaatgatataatggactttgtggactccagggaaagggtgggaggaggaggatggataaaagactacacattgggtacagtgtacactgctcaggtgatgggtgcaccaaaatctcaagaaattaccaccacagaatttatccatgtagccaaaaaccacctgtttccccaaaacctattgaaataagtccaaacattttatcrtgatgtgcaggtaactatctgggccccacttacctctctgacctcatttctgaccacttctcttcattgtccctgtgtcacagccacaatggacttctgttgtttgaatgcactgaacttaaacccatctcagagccttcttagttgctctcctcttgcctggcaagctattcccccaaatgtttccaaggctaatgtcatttttatgttcaagatgtcagtttcattatctcctcttcagaatgaccttcctagccacgtrgccaaagttcccaaatacacacactmaacctctatttactacattgttctgctattatcttcttcatagcacttcactatatgaaatttatcttctttgttttcttacgtattatatgtctctcatattagaatataaacttgatgaggatactaactttaataggcaccagactagaaataaatcactgcattcattgcagtatccctagcacaagaacagtgtctctcaccaagacacttaataaatattgaatgaatttatggacttcagttatattatattsgctaccaaatgggaagttatatatcttataactgcagtacaaaaaaataaactcaagataatttttcaacacttatgccttttcttaataatttgctactcaaaaagggccttttgtggttagctttaagcatttgcctggaagagaagcagttctttggttggaatttcgttcctttctgctcttaagggatgaaatacagacctaccagcacataggtctacacatttctctcagtgttagaagcagtgaacagtaatgtcctactatatgtcaggcaccatgctaaatacttttctttcattttctaaatatatttctcatatttcccacaatgtaagcactgttattatccccattttacaaatgaataagggcctatgtaagttactatctccaagtcacctaactagtgttagtgagacaaaaacttagacaccaagactttacctcaaaggctgtactttcttaatcattattctctctgacctcatcaaaactgtcaagatgtatctgtggaataatgaaggcagattatccagagatggattctggcagaatgtaccttttctgcctttaggcatttcatgcttgtttaggatactactttctcctccattgtcgttactacttattaccaccatcattaccaccactacatttaatcctctattctaccttctgaggcagacatgtgagacagtttgtaagttttataaattaaagcattcaggtttaaacaggttgtattagttcattttcacgctgctgataaagacatacctgagactgggcagtttacaaaagaaagaggtttaatggactcagttccatgtagctggggaggtctcacaatcatagcagaagatgaaagtcattcttacatggcagcagacaagagagaattgagagacaagtgaaaagggaaaccccttataaaaaacatcagatctcatgagacttattcactaccacgagaacaatatgggggaaaccgcctccatgattcaattatcttccaccaggtctctcctacaacacctgggaattatgagagctacaattcaagatgagatttgggtggggatacagaaccaacccatatcacaggttaaacattttttaaagtaacaaatgtaattaataaagttgctgtgaccaaaataaagagttctaacagctcaggattcatcctggttctacataatgtgtagatatatttggaggaacaatgaaaaacaccccagtttagtatcttcataaacctggttcaatatcttcctaaacttaacatttttcttaactacaaaaataattcagatattattaatataataatttggaaagygttgttcaaactctgctgccattccattttatgaaaaacttaaggaatgaaaagttatgttattcagtgatgaatattgtagtactatttttaaaatagaatttggggtttatattaggtcatttcacacaattctctttcacaaataaaaaattggtaacatcagtatccatcaataactccacaaccattaacatcagctggtttatagttaatgctgggtgtgggcagagcaggaaattaggaaatatatttataatgagtaaatacaagttgagaataaaagatatgataacaaaataattgctaaagactagtttataaaatackttattgaatcatcttattttggtttgcagtttagagcaagttacttagataaaatataggttctctacctactcaagagacattaagaatttttgttgtaattgtttttatgcaatagattagatgagaaataaatttaatgtcattctctaattcagaaaaaaaggacttgtggaactaattcatttttaacaattttattgagataatttatgtaccctaaatttcacctactttaagtgtacaaytcagtgattgttagtatatatacagagttgtaccaggatcaccataatttcatttagaacattctcctccccaaaaaagaaacttgtgcctactagcatttacttcccattatccgattcaccccagccccaggcgactaggtgacagtttctgccttttatatttgcctattctggacatgtcataaaggagatcacatgctatgtggtcttttgtgacttgcttctttcacaaattcttttatcatgtttttgaggtttacccatgttgtagcttgtgtcagtacctcatttctttttattgaagaataatgttctatggtacggatatgccacattttatctattcgtcagttaatatatacttagtttctatcttttaggtattataaataatgctgttatgaaatttgtgtacaaatttttgtgtggacatatatttttatttctcttggctatagatctaggactggaattgctggatcatatggcaattctatgtttaatattttgaagaactactagatcattttagagactggccgcaccgttttatattcctaacagcagtgtatgtaggttccaatttctccacctcttcagcaacatttttcatatctgtcttcttgattatagctatcctagttgggtatgtagtggtatctcattgtggatttgatttacatgtccttaatgacttgtgaccataagcttcttcttacgtgcatattgaccattcatatatcttctttagataaatatttatccaaactcttttttaaaaaattgaatttctttttatcgttgagttggaagagttatttatacactgtggatactagtttagtatcacatatatgatttgcractattttctcccattctgtaggttgtcttctcactctcttgatggtatcctttgaagcacaatttttaaaaattttcttgaagttcaatttatccgtcttctgttgtgttacttgtgttgctggtgctgaatccaagaaataattggctgacccaaggtcacaaagatttatccctaagaatttatggttttatttcttacatgtaggtctgttgtgatcactttgagttaattttctgtatggtgtgaggcaggagtccaattcaatctttgcatgtaaatatccaattgtcccagcactatttgttggagattcttctttccccattacattgtctgggctcctttgtcaaaaatcaattgaccatatacattaggagtttcctttggatgcttaattatattcagttgatctctctgtctgtccttatgccaataccacacaaccttcactactatagccttttagtaagttttgaaattaagaagtgtgagtcttacaacttttctgtttttcaagactatcttggctatactggttcccttgcatttccatatgaattttagacactccagcctcagcaayagagcaagaccccatctcaaaaaaaagtcagctgggattttgacaaagatgctttgattctgtagttcaatttggagaattattgccattttaaaaatattaagtcttccagtacatgaacataggatgtctctctgtttattttgagcttctcaaacttctttcagaatgttttataagtttcagtatatgtcttaaacgtgttctatttttttttattttactctaacaccattcaatgacttttgttaaatttatttcaaagctttattctttttgatrttattgtaaatggaattgttttctgaattacttttaaaaaattttaatcctagcrtatagaaatacaattgatttttatatattgatcttgtatcctgaagctttactggacttcttagttgtattattttagtggattctgttgtttttttctatatataaaatcatgtcatgaagagttttacttcttccttttcaatctggatgacttttatttctttttctaacctaactgcctgggctagtacctccaatacaatgtttaatagcagtgacaagagtggacatccttgtcttattcctgatcttaatagaaaagtatttagtttttccaccattaagtttgatgttagcagtggatttttcataggtgccctttatcaagttgagggcatttccctatacccctcattctatgaatgctttatcctgaatgggtgtyggattttgtcgtatgctttttccacatctattgaaatgatgtggttttgttgtttagtctattaaaattgtgtattgtagtaattgataattcatatggtaaaccaaccttgcattctgggataaatcccacttggtcatgctttataatcctttttatacattgctagatttggtaggctggtactttcttgaaggtttttgcatatacataagagatactggggtgtagttttattttctttttttttttttttttaatttatttttttattgataattcttgggtgtttctcacagagggggatttggcagggtcatgggacaatagtggagggaaggtcagcagataaacaagtgaacaaaggtctctggttttcctaggcagaggaccctgcggccttccgcagtgtttgtgtccctgattacttgagattagggattggtgatgactcttaacgagcatgctgccttcaagcatctgtttaacaaagcacatcttgcaccgcccttaatccatttaaccctgagtggacacagcacatgtttcagagagcacagggttgggggtaaggtcacagatcaacaggatcccaaggcagaggaatttttcttagtgcagaacaaaatgaaaagtctcccatgtctacttctttctacacagacacggcaaccatccgatttctcaatcttttccccacctttcccgcctttctattccacaaagccgccannnnnnnnnnnnnnnnnnnnnnnnnnnnnnnnnnnnnnnnnnnnnnnnnnnnnnnnnnnnnnnnnnnnnnnnnnnnnnnnnnnnnnnnnnnnnnnnnnnnnnnnnnnnnnnnnnnnnnnnnnnnnnnnnnnnnnnnnnnnnnnnnnnnnnnnnnnnnnnnnnnnnnnnnnnnnnnnnnnnnnnnnnnnnnnnnnnnnnnnnnnnnnnnnnnnnnnnnnnnnnnnnnnnnnnnnnnnnnnnnnnnnnnnnnnnnnnnnnnnnnnnnnnnnnnnnnnnnnnnnnnnnnnnnnnnnnnnnnnnnnnnnnnnnnnnnnnnnnnnnnnnnnnnnnnnnnnnnnnnnnnnnnnnnnnnnnnnnnnnnnnnnnnnnnnnnnnnnnnnnnnnnnnnnnnnnnnnnnnnnnnnnnnnnnnnnnnnnnnnnnnnnnnnnnnnnnnnnnnnnnnnnnnnnnnnnnnnnnnnnnnnnnnnnnnnnnnnnnnnnnnnnnnnnnnnnnnnnnnnnnnnnnnnnnnnnnnnnnnnnnnnnnnnnnnnnnnnnnnnnnnnnnnnnnnnnnnnnnnnnnnnnnnnnnnnnnnnnnnnnnnnnnnnnnnnnnnnnnnnnnnnnnnnnnnnnnnnnnnnnnnnnnnnnnnnnnnnnnnnnnnnnnnnnnnnnnnnnnnnnnnnnnnnnnnnnnnnnnnnnnnnnnnnnnnnnnnnnnnnnnnnnnnnnnnnnnnnnnnnnnnnnnnnnnnnnnnnnnnnnnnnnnnnnnnnnnnnnnnnnnnnnnnnnnnnnnnnnnnnnnnnnnnnnnnnnnnnnnnnnnnnnnnnnnnnnnnnnnnnnnnnnnnnnnnnnnnnnnnnnnnnnnnnnnnnntgagcactgagtgaacgagactccgtctgcaatcccggcacctcgggaggccgaggttggcggatcactcgcggttaggggctggagaccggtccggccaacacagcgaaaccccgtctccaccaaaaccagtcaggcgtggcggcgcgtgcctgcaatcgcaggcactcggcaggctgaggcaggagaatcaggcagggaggttgcagtgagccgagatggcagcagtacagtccagcttcggctccgcatgagagggagaccgtggggagagggagacggagacggagacggagagggagggagagggagagggagagggagagggagagggagagggagacggagagcattttcttatgatatctttatctggttttgatatcaagctaaaatttgggaaatgtttcctcctcttttattttctggaatagtttgtggaggatttatgtaaaaatttttctttaaacttttggtcagattcaccggtgaagccatctgagcatgggctctttttgtggggattatttggattactaattcaatctctgtcttgttatagataattaagatgtgctattgcttcttaaatcagtttcagtaatttgtgcttttctaggacgttgtccatttcatctaagctatctactttgttgacacatcattcttctcttacaaccctttttatttgtatagggtcagtcttgattttagttgagtctattctctttttttgcgtacatctagctaaacatttatcaattctgttgatcttttcaaagatacaacttgtggttttattaattttcttatytttctattcacaatttcattactttctactgtaatccttattatttcctgccttctgctagctttgggtttagtttgctcttcattttctagtttcctaaaattaaaggctaggttattgatttcagaacttctttttttaaaaaatatagacatttacaactataaattttcctctaagcactgcttttgcagcatcccataagttttggcatgttgggttttcattttgatttatctcaaattattctctaatttttctttgacttaatttttcttctttgacttactggttatttaagaatgttttaatttctacatatttgggaatttcccaaatttctgttgttaaaatttaattccattgtgatgacaaaaatactttgtaaaatttgaatccttgaatttgagacttgttttattgcctgaacgatggtctctcttgtagaatgtaccagatgcacttgagaagaatgtctattctgctatttttaggagtgttccataggtgtctcttagatctagtgttgttcaagtcttcaatattcttgctgattttcttctgattgtttcattcattattgaaaatgacgtgggccgggcacggtggctcacgcctgtaatcccagcactttgggaggctgaggtgggyggatcatgaggtcgggagatcgagaccatcctggctaacacggtgaaaccccgtctctactaaaaatacaaaaaattagccgggcgcagtggcgggcgcctctagtcccagctacttggcaggctgaggcaggagaatggcgtgaaccctggaggcggaggttgcagtgagccgagatcgcgccattgcatgccctccagcctgggcaacagagcragactctgtctcaaaaagaaaaaagaaaatgacctattgaggtatctaattattattgtgaaattatctatttctccctcgagatatgtccattttccctttatgtatttggggctctatcattagatgaatatacgtttatagttattacatcttcctaacaggttaacccttttatcattgtaatatatccctctttatctctgctaatagtttttatcttaaagtctactttatttgataccagtaaagccacctcagctcactatggttccatttacagggtgtatctttttcaarccttttacattcacctatatgtatctttgaatttaaagcgtatcttttatagacagcaagcatatagttggaacttgtttggggttaaaagaaatactgtcgacaatctctaccttctgattggcttgtttaatccagtcacacctaatgttactgttatatggttgtatttatgtctgccrtattcagtcacacctaatgttattgttatatggttgtatttatgtctgtcatttttcctgtattttaaaaatttattttgttttctgtatgtctcatggctattttgttcctctgttcttttactatcttcttttgtattaagtaggttttgtcaagtgtatcatctttaattcctttaataattttttgaactacattttttggttattttcttagtgataactataggggctacaatatattttaattcatcagaatctactgcagatgtatacaaacttaattccagtaagatataaaagctttacttctatatggttccagtcccttccccaacattttgtgctgttttttgttgcacatattatgtctatatatgttacaaatcaaataccatattgttataattattgctttatatagtatcttttaaagaacttaataggagaatacaaacatrcttcaagatatttctatcttacccatctaaatacacatatatatccgtaagaatacatctatatagaaatatagctttagaaatatattctttcttatttaccatttctggttctcttcattggtttctgtggatttgagttactatctgctgttattttttttattcacatatagctttatttccatccccctctgttgtgtttattgtcaattatatgtatacatkttataagcccaataaaatgttatattgttttaggaaattgactttaatcagttaatagaagaaaggggaagaaatatgtaattatactgtattgtaacattagctacatactattgttactgtaactctttatttgtaaggatttgacttactattttgtgtctcttccttttgcctgaagaacttccctttagcattttttgtaaggcaggactactaccaataaattctctgtttttatttatctcagaatgtctttgtttaacctttatttttgaaagataacttagctggatatagaattcttttttggtagctttttttcttcagctcttcaaacgtcatttacttccttctggcctccattgtttctaatggcatgccagctgtcagtcttattatggttcycttctatgtaatgccttttttttttttaactgctttcaagactttatttttattttcatgttcagaattttgactatgatatatctggaagtggatgtttttccacctatactacttagaattcaatgaacttcttgaatgtagtattttcctacaaatttgtaraaattttactcattattttatttctatatttttttgcatattttyctttttctctatcctttcttgttttgagagacgggtctcactytcttatccaggctggagtgcagtgtcagttctttccttctggtactctcaaaatgtgtatattgatgtgtttaatggcatatcacatttctctgaggcactgtttatttttctaccttttttttttcctgctttcgttagttctttgaacatatttacaatcattgctttgagtttttttttttttttttttttttttttgatggagtctcactctgtcgccaggctggagtgcagtggcacgatctcggctcactgcaacctccgcctcctgggttcaagcgawtctcctgcctcagcctcccaagtagctgggatgacaggcacatgccaccacgcccagctaattcttgtatttttagtagagacggggtttcaccatgttggccaagttggtctcgatctcttgacctcgtgatctgcctgcctcggcctcccaaagtgctgtgattacaggagtgagccactgcgccccgtccaaattttttacatgataattccaacatctttatatgataaggcctcctaaaatgtagtttctcctgcttgctgtttttcctaagtataaatcatacttttcatgtttctttgcatgactcgcagttttttttttaaaacaacgttttaggtaaaatagtgtagcaactctggatactgactccatccacccatcctgggtttgtggttatttgtttggtcatttgttcatctgtttggtgatttggctggactaattctgtgaagtctatttcccccgagtctgtagcctctgatatctctgctctgactttttacttgcggttatcttttagcctggcctcctatggatcactccttggtcaacataagccattttgtggtaatttttaccctctactgtcaaatatgtatgtggattgaagaccgcttttgtaattcagggagttttgtggttttgctctggatttagccagggwctggtagcttggaagttttgtcaccagtcactcctcagagggtgcagccttcagcatacacagtcttccagacccagctatgagtatattttattttaaagtggatagaatatattattttccagtcagtgatgcattacaggttgtactatacttwtgtccctgagtcagtaaggcatcagctctttgctaatcaatctgaatgtggcttgggaaatacttacaagtctgcactacatcttgctctgactggtactgagtaggcagagccggtgcataaacacagccttccagaccccagagatgagtgtgctcktagtgggccactttagctgtatgtttccctgcttctctctgttaaacttctggctggtcgtctttgtttctttgttgctattagttttatgcagctattggccttctaattgttcaccaacaaaaaataatttctgccttacagccatataactgtaatttgtacttttcttacctttacaaagtgactggaaaatgcaagattagccactgaatggataccctaagccaggggttggcaaagtttttcagtagagggacagacagtaaatactttaggctttgcaactcatttggtctcttgcaactactcaattctgtcattatagcacaagagcacccagagctaacacataaatgaatgagtgtggctatgtttcaataaaacattacagttgacccttgaacaatgtgggagttaggggtgccaacccaccrtacagtcaaaaatcccattataagttttgactccccaaaaacttaattactaatagcctacttatagaaaaatgaattttgaaataatgtatttattgcagtgcatatttaaataaaccttgctacttccaattgaatattaatatattgaattgctgatagtaccttcaagttttcttcattgctgtttgctaaattagcctacctttatgctttgatagtattatattttcagcttagactaaactttttaagctttgaattttctttattttgttaactgtagatatcgtgttgaagggataattccagaatcaccagctaaactatctgatttcctctaccaaactggagacagaattacatgggataaatcattgcaagtgtataatatggtacacaggattgattcggtaatttgttgtttaatactggacttctagaacattaatatatttttagtttataccttagtgagttgattaaaactatgttatgtagacacagtattttatagtttcaaattgacttgaagtctttataaaagctttaaaacttccctactttccaacagtttaattccaattagctttatgctacttgtaaatgcatattacattttgaatctggtaagctctcctgcaatgtgtgccatttgttataaaggaacagaactcagggattcacctccattacatggaaaacaaaggttaagtatgccttattgatgggaagtctgtagacttattttagtcatattacatcagatattaggaaacttacaatcatggcagaaggcgaaggggaagtaagcacattttaccatggcagagcaggagagagagggagcaaagggggagatgccacacatttttaaaccaycagacctcgtgagaactcactcactatcatgagaacaggaacaatgcagacatataccataaggacttaaagaacgaacggcatataatgtttaagagtaggtgtatgagtccgccggctatgaagaaatacccaagactgggtaatttataaaggaaagaggtttaattgacacacagttccgcattggtggggaggtctcaggaaacttataatcatggtagaaggcaaaggagaagcaggcaccttcttcactgggcagcaggagaacagcatgcgggaaaccacccccatgatccaattatctccacctggtcctgcccttgacatgtggggattacaattcaaggtgggatttgggtggggacacagagccaaaccacatcagtaaagwtaaagtaaggaaataacattatatagaaggttgaagtttaggaacactttcaaatacattatctcagttaaatagatataaagagagagaataaaaacaaagagaaaacaaaaatgtaattggagtagaaagttgagagaagggagaatgtgagaggcaagtatggtttacagagaaacagaagaaaggatcagtatgaggtaagggcagaatgaaagctcaggaggagaaaaaatgaatgaaatgacaggaataatgatacatggtgaaaagaggttgcattagtctgttttcacactgctctaaagaactacctgagactgggtaatttatgaagaaaaaaggtttaattgactcacagttctataggcttcacaggaagcatgactcggaggcctcaggaaatttacagtcatggcagaaggtgaaggggaacaccttggcatgaggtaacaggtaactcttctgttaccatggcagaacaggagagagggaactaagggggagataccacacacttttaaaccatcagatctcatgagaactcactcactatcatgagaacagcaattgggaagtctgccccatgatcgaatcaccaggctgatcctccaattcaacatcatatttgggcagggacacaaattcaaaccatatcacaagtagaaacaaggatgaagaagtgggataagtgattccaaactttggtccagcacactatagatatctcatttatgtattaaggccatgataaaaataaccacctggggctgagcgcggtggctcacacctgtaatcccagaactttgggaggcagaggcgggtggatcacctgaggtcaggagtttgagaccagcctagctaatatggtgaccgcgattctactaaaaatacaaaaaattagccaggcgtggttgcatgcgcctgtgaccccagctactcgggaggctgaggcaggagaatcacttgaaccaaggaggcggaggttgcagtgagccaggatcatgccatcgcactccagcttgggcaacaagagtgaaactccatctcaaaaataaataaataaataaataaataaataaataaataaataaccacctggagggatggggggatgattctcctctcttccattaatgtattaaaattcattctccattccagttgtttgtgttttctccatcttaggaaatctgttttggggggaatcctgactttgttccatactcttccagactgatgtttatgttcttttgactaattaattcacttgacaaatatttcacaaaatacttcacacttcacaaatactttttgagcaactattgtgaactccatactgtttcagttcactagggacacataagggaagaagacagaaattgtccctgctttcacaaaacttacgttctcatcagaagagacataataaacaaataaacagttttttaaaacttaccagataatgaaggctaggactggtaagaataagtgttatgtaggataatagtataggcaataaccaggagaagctaatttatagctagagaactgggaaaggcctctctgagtgagacacattagaaacctgggtaacaaaatggaggttagggagacagacaagcaaagatctgggagagagtagcagacacagggtaaagcaaatgcaaaggccttgaggtagaaagagtttggcagtgtttagtcaagagataaacaaagtctgtggggtttgaccataaaaagcaaggagaagagtggttaagaggtgagaggttaggctgggatcagattctgcaagagtctcaaaggtcagggggagaagttttgctctacgttcagtgggaagccattggtgtgttttaagcagggaagtgactgatttgatttacacttttaagagacagctgctgaaaggagcatggattataaggaggtaagaaagaaatcagcaaaaacagttatgaggctacgaaatcagcaaaaagttatgaggctatgagagtaatctaaatgagacattatggtggcttgtgcaagggtggtagacgtggagagggaggtaagtcagggarcccaaagatatatagagtcaatagggcttactgatgcagggagagaggaatcagataagtcttctaaaactggattgtgatgaaattgcacaaataaagttcctttgggaaattcattgaactacatacttaaaataggtgaattcatggtatgtatattatactcaataagctgtttttaaaaatgagtcctagatttttggctaataataactttatttaaaagagatgagaatgtgaatgatggaataaaactaatttttatgattttcacaaatgattgcatttgtaaaatttcagatcactaggcctttagttctttaagtctccaacctgcatttcatttatcaaagcaaacaaaaataagtaaataaataaataaacatcccacatatctgccatcatattatcatttatttagaactctgtaattttacctacttttattaaactcatcttaaaatctaggagagaagagttatagaaaagcccatgaaggtaaatctgtttcatcttgtagaaagtccttgatcttcatcttgtaaatcagttttattttgtagagaggaagttcctatccacagaaaacacatgtccatgatcttcttgggatttgaacattcagtttgagaaccactgggcatcacaaatgaaaatccaaaaatttaactatttcattcatctttgtatgatactaatcatacagtttgattagcacttcagatatttctttttttgagacagagtctcgctctgtcaccccaggctggagtgcagtggcacaatctcggctcactgcaagctccgcctcccaggttcacgccattctcctgcctcagcctcccaagtagctgggactacaggtgcccgccaccacgcccggctaattttttgtatttttagtagagacagagtttcaccgtgttagccaggatagtctcratctcctgaacttgtgatcagcctgcctcggcctcccaaagtgctgggattacaggcgtgagccaccgcacccagcccagaaatttctattgttgttgcaagtcatatgttataatagaaagaatactagacgtgacatccaaaaacctgaaaacaaattcagagagattatatgacttattcaaggatgatgcagccaatatgtgatagaaccaggactcgtacctggtctcctaattctaaattagaattattttccctttttgtaaagatttgtagtattcatctccaggagtatgttttatttacttatttatttttataattattattctttttagagatagggtctcactctcttgcccaggctagagtgcagtgttgtgatcaaagctcactctagcctcaaactcttgggctcaagtgatcatcctacttcagcctcccaagtagctggaattacaggcatgtgccaccatgcctggtcaaggatgtgtcttaactgcctcctcttcaacctactggtgagggagagattcccactctagggttatggggatggccaaacacataatacccaccaatggacaagtgaggtagactgaagtttattaatcattaatcacagaccaaggagggagaacaaactatgccacacagggcaacatgggaacagggtgaacacctaggggctgtgggaggtagcctttgtgtcaacagggtagggtgagccccagttcctgtagaagaatgtgattgacttgtttgaatgattccatgggccaccagggaactgaaaccgctcaacagggataaatagtaactgtgctggtcctgttgagaaggagggttgtttggctaggggatcttatctgcaggaatgaagagggaaaggaatgtgcagttaggccattcaagaccctcctggtttcaccctatgctggttttaccagcatacaacattggtctttaatgttagaccttacaccacagggtgctaaatcaatgtatttttcagaatatattacttagcctatgtggagtagtagaaatagtactgtatggggaatcaggaaacctgggttctatttctgtacttatctctagatgtgaatgtgatttaatctgttaggcttcaatttctccatctaaaaattgaaagagtagatgataycaagattgcttcttgaattttctacactcgtagatttaatgctcctttaacactcaaaatccaagctgatttggtgacgagatcttaaaatttcaaagccctgctttttccaaatagaggccaatcatatgcaataaaatttgggggggaaacaatacaaagaatagatattaagtaacgtttgttatctttacggtttgatttgttgcaggacacattcatatgtcataccattacacaaagytttgccgtgggctccatttcccctcgagactttatcgacttagtgtacatcaagcgctacgaaggaaatatgaacattatcagttgtaagttgaaacattttgcccatatcttggaattactgcgagccattaataaatgttttccctttattcacagcttcaaagaaattatattttaattatttcctttttaaatttacttagtgggatcaacaattagacgtatcatgtagatatgcctagtgacactctgaaggtgccatttatataatggtcaatatttgcaacatctctkagacttttgcagcatatatcctgtagcactgagtatagatagatacttgtagcctaaaactttgggtatacattttttaaatcctaagaaacaaaattaattgtcagatataattttatatttgaattgcttataatgcacatatccagtaactgataaaactgttaaagaaatttccactagatggctctttacataaatgtgcttttatttcttttagaaactgcsggttttgatgtatccctatccccactcccaaatatgtcattctgtaaaatgcaaatgtgtaatcatttyctaacttgcattattgatgagaacataccatttcataccatacagatctatggactcagataacttaagataactcatggtgaaggaacttgggtatcacagtggcatagagcccgtttttctctataatttgaattaatttcaccatttctacttggcaccagggacaactacgtttcgttaattattatttcccaacaagatttcagttcctccgagatatctttagtactctacatttcagagttcagactaagtcatagcactcattcaaacccagttagctctttctgcagcataccactaagggctgatgttcataatgttcatatatgtttcgttgtctcatttttgaaatgagggcacatataatgtattcactgcctacaacataaaatagtttgtctgaacagatcatagatctgttattttccacattttgaaagcagaccatttctatataattattagtgatcagagggaagctaaaaaaagaagtagaggttaaaatcaacaactagaggtaatcaaccacgtggtgcacaaatcactactcaatttgcttttaaaagtttccattgaatgaattttcaatcagtactcatagttttcttaacatttctttttttttatcctgccctgcaccttgctttaagctaaatattttgcttgcattatctcactagtgaggaaactgaagttcatggaaattaagcagttaagaaagtaagttacatagctaataagtaggtaacccagaattaaaactcagatctttctgattttccaaaataagtgctaactaccacaccatatgcttcataaaagacccatacctgtttgtagactacaacagatttttttaaagaagacaagcataatttccatatttcaaacagggaaaaaatcttttataataagatcactctggcagtactattataggctctgttaagataatgatataagtcataaaaatggaaaattcattcaacaactctagtctccttagtgttttacattgtatttcccatggaattgatttgctttatgttaaaatcatatcagaaaatccatcttctctgacaagagcaggattcagttgcacagaataaacaaatatatcttttaaaatagttttagaagagtatatatattatcataaatgaaatcataaaccacccccctctgcattcacatagaatacagayactaggttgcataattctaaaataaactctattgatttttagttagagtttgaagttagctacagggaattgcagaaggaagcattttaaagtacctttaytgacagaccatctaactactttgaatattttatttaaaaaaaaaaacatgattaacacaaaaatctatgaacccaggaccctagcagaatagtattcacccaaagccagttaacagttttcactcaaacccagtgagatttaagttagttatcagcattaactattttctgagatttgagctatcttttgcttcaaatctcagaaaatagttcaatgayacttttaaccatttttcttgtatacagaagttgacagcatctttagaaataactagcaggaaaaagttcaagaggacaatagtgttgatactggtattttctcaattttggcttcacatgtgcaaatacacattcacatatataaaactaatgttaatgctattaactaacttaaatgctatatgtttctaaaaatatgctgctggaaatagtttttcctctttgtgaataggtttcattttaattttttaaaatctcttagctaaaagtgtggattttccagaatatcctccatcttcaaattatatccgcggttataaccatccttgtggctttgtatgttcaccaatgraagagtaagtgttgtttgcacttatttattttaacaggtttttttagttcaacttgtgatttagtttaagattgctggctcatcagtagaaatatgtagcagcatattctgttgcgggaaaaaaacttcccctaaatatgatttttaaaataacttcttataatcgttttcattttaagtataatcagaatggatacttccctataaagtatgatctgaggtttctgagaacagtcaaacacacacaaacatttcccagcagttaagcttccttgatgttttctatttctccattagagtcatttctgtaaattattaaggaacttttgtgaattaaaaataaactttcctagaattatagcacacttaacatttatcagtaatgaatgttttactttgaatgaattcttcccaatggactacctactaagagcagatacctgcaaaatgagatccagtaggtacattcagataaaaagaaaagccgaagaaatcagagatgagtcactgcctaaaggtggccttgggataaaatggcagcataaaatatacttattttgtaaaagcatatactcaaattcaatgtatatcatttcacaagttccttaaattttaatgtttgctaaatgattttttattaagtaaaagatattggcacgtgataacagatgtattggtcagatataaatgtctcagtacaaaaaaaaaaatgtatgtgaaggaagcccaaatgaaattaaattttggacctgtattccttaacatttcctctactgaactggaaaactaaaaaacctcacaattattcatgttaatgtatacgattgttgatgcagataataataataacaatgtatggtctttctacccatttgtcaattttgaatctatggccaagactttattctccatagcaggagaaaacaaaacaaatgaagggtaattactccaattcagcaaggtaaatcaactgctggcatggactagagwtggaaaattacacagcttaaagtgtgcttcacaggccaagtccccttcttgcaccttgtcaatgtagaagtgcactccagtaaatattagaaaggctttctcatgtgtgtaaagccattgtaaacacaaataaagatttaagaccatacaaactactagtaaggacagtagttcccccatttatccatggagatacgttccatgaccccaagtaaatgcctaaacccatggatagtaccaaaccctatgtatacaccatggtttttttaatctcataatcaagagggctactaagtgactaacgggtgggtggcctatacagcctgaatacactggtaaagggatgatttcacatcctgggtgggacagagcaggacggtgtaagatttcatcacattactcagaacaatgtacaattaaaagcttatgaatttttcttatttctggaacaggttgaccttggataaatgaaactgcagaaagtgaaacagagtataagagggaactactctgttctcggtgtagccatttgaggcactgtaaaaatagtataaaccctgcatagagaaaagtataagaaaatggacgctcacactatttgttggaagggtagtctcccttgaaaattttataaaactatattctctcttgcacatttttaagttgacattaaaatttttcatagggattacattgatgaaaagtaaattacgttgatgaaaagtacaattcccagcatgcgctaaacattgacattttttaaaaagcggttataccatccttataaacgtatccagtagattataaataccataacttgaaacccaccattaaattattcatttcaaaataaatacaacttttaacagtcagaaactttacatcattcctttcctccttgaactcacatttttatttttccctcatataattttattctaatagaatatattttatgctttgaattttttcgtagtcatcctaattctctgtaaaaatgacatgtgtttaaagttttaaaatgtgttttatttcctataaccatactatctaacaattaaaaatatatatatgccttctggattaagttgttatcattatatattgatcaaaattaaaaatgtttgtatacaaatattaaacataatgcaaactgttattagaaacacatattttattattagcaaaactgaaatagcacttactatgtgctaggcactattataaacaatttgtatatattgactcatttgatcttcaaagtaaccccataaagtaggtagtgtgactatgcccaatgggcaggaaagaaagtggaagcccaaagagattaactatctgaaggttacatataggtaatagcaaagctcagtttcaaatcaaggcagactagttcctgagtccacgcttttaaccattacactcatttcatttaactgtgggtgtatattactgaaaaataagacagcattcaatatcaagtctactactgctttcattttaagaaaatcaaagaaaatttattaacataaatgtgttgaaatggagagagtataattccagcactgtcattcaattaatttttgatttaataataaataaaaataaaatttgagaattatataaaaatattttttattttatttttatataaaaaatttatgaattatataccataaattatgtagtracctatcatcaaaaaatgtttatcattaaaaaaagacctggccaagcacagtggctcacacctgtaatcccagcactttgggaggctgaggcgggtggatcacctgaggtcaggagttcgagatcagcctggccaacatggtgaaaccccatctctaccaaaaatacaaaaattagccaggcatggtggcacaggcctgtagtcccagctactcgggaggctgaagcaggagaatcrtttgaacccgggaggcggggcttgcagtgatcccagatcactccacggcactccagcctgggtgacagagtgagaccccgtctcaaaagaaaaaaaaaaaaaaaaaagacctgtcagctgacaactcaattagatccttaagttttactgaaaaaaaaaaatggcatgacttggaaaagaattttttctcaactagccactaatcagattttccctttagcatctcaaagatttttatataccaaggtaaagcaccatagtaccacttagtgtggataacaggtatgcctttgttgcataaagcaagagaagggcgattttgaacaggctgataggaaagaaaaagcccacatctccaacagagacatatttacagatctgattacggaaaaaatgcatatggaagttagagattggaaaatttattctcttaaaagtattcaccctttctgaccccagtgtgaagatcaatgggctagaatataaaataccacttagagtgcagtttggaattaatgtgtcaaaaaccttaatgcacaaacctttgacctagaaattataagtatttataaaagtgtaaatggggctgggtgaggtgggtcacacctgtaatcccagcattttgggaggccgaagtgggaggatcgcttgaggcaaggagcttgagactggccttggcaacataatgagaccctgtctctttaaaaaaattttaaaatctagccaggcatgattgggcacacctgtaatcgcagccactcagaagactgaggctggagaatcgcttaaattcaggagttcgaggctgcagtgaactagaatcacgtcactgcactccagcctgggcaacagagtaagaccctgtctcaaaaaaaaaaagcataaatggatacattacaaagatattttattgcagctttacttacagtagccaaaagtgagaaacaacctaaatgatagtcaataaaaggactgttaaatagaaaatgaaatactgtctgtagccatgaaaaacagttaagtagattgtatgtacagacacagaaggaagttcatagtgtcctattaagataaaaataaaactagttgcagaaaaatatctccattaaaaaataaaactatatttatatatgtggggaacatattcatttatgtacaaatgtatgctgtttttgtrtatatatatakagagagagaaagatagtcacgcgaaaatataacaattaaaactgtaaacagtgattatctctgggaaacaggataagggaaatgagggagggaaaattttctttaattatgaaaaatttatattgtttaaattttcataataagcatacattactgttagaattttttaaagtcaataaaatgacaaaaaggaaatggtgcctaaaactcaagattttaagaaatattctagccacttaatatttttaagtacaatttttaagtatgtcaacggtgaataagataagaatcctgctctccaaaaacctgtaaagtcagtagttaaatctaaaaatttcttatctttttttaactcttcttttgcttacagaaacccagcatattccaaactagtgatgtttgtccagacagaaatgagaggaaaattgtccccatcaataattgaaaaaaccatgccttccaacttagtaaacttcatcctcaatgcaaaagatggaataaaggcacacagaactccatcaagacgtggatttcatcataatagtcattcatgataccaaaagaagaaatgaggccgttctgctataaaatcatgtgtagtagttattgctgtttacttctaagtcaacgcacataaataatactgttaaactattctagacagtattcttgtacacatggctgaagatagttcataaaaataagaactcatagttgtacaagaatatggcattaaataccgtttttaatctcacgtaagaatgatgttaaataagtgttattagtatatttttatcttttgcttttgtccctgtaaaatcctctgtataaggaccaataagaaagcagatacagtcagaggtcagcattaactaaaagttaaaatacattttaaattgtttttctttcacttactgcttaaactgacaattgtaggaaacatgaacataaaaattgaaaagaattccactaaaatgtatgaccaatgacatttagaattttaaatgcaatgagtcatcaaacaatttctggtgtggccaagatgcaatagcccattcctcccaagtctttcctcttaaaacttaaagaccctgcacataacacaataaacaagcataggaaaactcaagcataggtggaaagaatgcagcaagctatctatggacgtcgggacttaaggaatgacattcagtgagttctctgggtttccttattgcctcccacatatcccaggtgggaaagaaacacacacacatgcacacacacacacacacacacacaactgcatgcatgaaaagccttctcctcctagtcataggaccaggtgcctaacagaacaaaacacttttttataatgcctaccctacaccagccaagcatcaacctacaaaccacccccatggtttcagtgtggcagagcaaggagacacttttctatcctacccacccctgtcccacagaagcagatggtggtgccctgacacacccctatcccatggtgtctacaaagctgagcagggagctaatctcccatcttctacctggcagatgcagacagcactgattgcccttccaggtgatgtagactgaccaagcagggagctgatttctatcttccactcagcagaagcaggaggtaacataggcagtatgagtgaagtccagagacaaagacagcttccacctccagctggcagcaatgagacttaaccaatgtcttagtccattttctggggctataacaataccacaggttgtataaattataaagaaaagaagtttatttagttcacaattctggagactgagaagtccaagagtgtggtaccgacacctggtgagggccttcttgctacatcataacatggtggagggtatcacatgacacgagggtaacagcaagagagagctcacttttataacaaagccacttctgtgataataacattaatccattcataaaagcagagggacattcaacccatagcagctaggtagtgcaaagaaaggctagtgaccagggagcttcactaccctctcccacccctactcttacccctggagtcatcaaggcccagcaggatgctaagcctccatccccaccctgcatcagggtgtagtgggaacagtgacccaccaaaaaaatgtccatgtcacatccctggaacttgtgaatctgacctaatttggaaaaagagtctttgcaaagataattaaagacctcaagatgagatcaccctggattatcctggtggccctaaatccaaaaacaaatgtccttataagagatacatagaggatagagacacgtagaagaggagaaagccatgtgaagacagaggtagagactggagttttacagccacagcccaggaacacttggagccaccagaagctggaagaagtgaaaaaggattctcccctagagctttcagaggcagtgtggccctgctctcagacttctggcctccagagttatgagacaacaaatttgtctttttaagccactaaatttgtggaactttgttatagttgccaaaggaaactaatataccctctctggtgttagcagggttcagcagggatctgagcctccattcccacctgggtatcaacaaggtgaaacaaagaggtaggacacgggcctacgcagcactccacttccttgtcacctcccctgtgtcatcaggttccactggggaggtaagcttccagtcccactggaaagcaaaaaggatgtgcaaatcagtgccccacctttgccaggaggatgtcagcagggccagaaggggagctgagctgccacctcacccatctgcaatgagaggcagtctgtgctctacttttgccagagtggtgatggcagggcccaatggaaggctgaaccaacacatccacccagtccttatactacacctgaacagcaggactgcctgctaaaaatgaagattaaataggatccagaggtcttcagaaaggaaagaacactgtaatgggtaaaaataaagtgttctcatgagtatattaaatcacatttgatgggcgacaaaggtttaaaaacaattcagtggaacagcatttcagcaaatggtgttggagcagctgaacattcataggccttgatctaaccttacactaagtatgaaaatttacttaaaatggaatatggagttacatgcaaaatataaaactataaaatatttagaagaaaaacacaggataaagttttcagaacctacaactaggcagagttattacacttgacaccaaaagcatgattcttaaaagaaaaaatgataaattgaccttatcaaagttaaaaaaatgtatgctatgtgaaaaacctgtgaggaggatggaaagataagtgacagactggaaaaaaaatatttgcaagacatttccaacaaagtacttgtaactaaaatacataaagagctttcaaaactcaactgtgtaagaaacaatctaattagggacaaagacatggacatttcactaagatacccatatatcaaaagatgttcagcatcattggctattaggtaagggtacatatcagtacaagcttaccagaatagctaaatttttttttaaatagtgataacatcaggtgttggcaaggatttggagaaagtggatcactcagacattgcacctggaaatgtgaaacagtaactgcctctcttgaaaagtgcggcagtgttttgcaaatcaaacaaatacttactgtacaacccagcaattgtactcttcatcccatagaaatgaaagcatttacacaaaaacatgtacacaaatgttgatagtagctttattccaaatagccaaaaactggaaacaacccacatgggtgaatagctaaactggtaatccatacacggaatactaccaagtaatgaaaaggaacaaactattgatgcacacaacaactggaattgtctcagaggaataatactgaatgaaaaagccaatctcataaggttaaatagtggattcttccatttatttaacatttttgaaatgacaaaatgataaagatgaacagaattagtggtttctggggttagggaggtgggggaggagcagaaagaaagtggctttcgctttgaaagggtggcaggagggatccttgtgataaacctgttctgtgtgttgactgtggcgtggtcacatgaatctatacacacaataaaactgcatagaattaacacacatgcataaatgagtgcatgtaaaactggtagtatctaaataatggcagcgggtagtatcaatgtcattttcctagttgtgatacagtactgtaggtatgcaagatattaccatggggagaaactggataaagggaatatggtattattattatgtattattatttttcaaaactgcatgcaaatctacaattatctcaaaataagtttaaaaaaaaaaatagaaaagcctatccaagccaaaaaagaatgtcattaaaaactatatcataatcgatagcatttgtttttcatttatctaccatatcactcattatttaccaatatatagttaatgtgtttacgttattaatatttgtttgacattacactttacaagcaatttccttagtaaagattttgtaatctcactctatggattggaatgattgttaaagaatattaatatttagccccagcaaaaagcctacttttattcaaaaatattatgtatcaaatctaaaaaagcacacacccttttggaattgtggcttgaacagctctgatgcttcatagaaaaatattgtcaaaattcaagtgtaggaacatacagaaataccattctccttaagaataattaggtcttttcatggcactcacttgaaactcctttagtaaaactcctttagtgtttagtaaaaacaccctctagcttcacaagtttgtcttccagccttctttgcatgagagaggatgcacagaaatctggggactggagacctgtgggaagaagaagggcacagtgggggagaagctggaaggcacataaaaaaccactactatttaaaagaggagcaaaactaaagggagactgtcttctgttcctaactctcttcctaaatctactgggattctgagtgttattttcccttttctactgaatgttcgggagacataattaaagatgtagttatactatgatttagaatatgcctaattttgtgagtatgcaatttttactattttccaatttagactttactcttagaagaatgtgagactttcagccacccctaaacttcataaacatacaaatcaccaaattacacattttaataaaatacatatcccaagaaagataaaaatcttgaaatcagaaagccaaacataagttttttctttgtcttacaaataggaaaattggatatttaattaacttgtctcctatttaaggtaaaatgtaaataataatagcaaacaaattaaaaggaaataataccaggtactgcatgtttgattccttctccttgccctgtcatcatctccatatattatggtattttgtcacttcgattacttctaaatagctaggtattgcagaaggtaccatatataataataacaatcccacaaaacggaaaggtttaaaggtaagtaatactggtatccaaacaatatgacaaataaaaataatttaacaattctgaacttagatttttctataaatcttatctttcttaccatataactcctctaatactttcagatattcagacattactggacttaccaaaacaaaaatgtttatatttaactaaatataaatagtcatagtcttatcgagaaattatcaagactatttatgccccatgccccatgtcccttttcaatgtcccttctctaccatggttttggacacataatactaatgaatcagaactgtggtttccatagaggggagtgcaacattattatatcagttaagaaaacgttggctgcaaacaacaaaaatatgatttatagaggacataaatgttgagaggtttattgatctcacacaagaagtctgggagtctgcagtagagatctgatatgatggcctaataatgtcattagggaccaaggctctttacagcactcagctctgccatacttagcttatagcatttgtctttctggtggcattgtcccaatgttctaagcaggaagaaaaagagtgaaaggcaaaagatattttagctgagtttagccctatttcatagctttcttgggaaccccaagaaagatgcttacatctcattagccagaaatggaacactgttcacacctggctgcaaaggcatctggaaaggtattccagtatctatagtaaaaaagcaaagaagctccaccagagtgcagaaataaaatagcacaacttatatttatatttatttttttagaaaattaagctttactaatacagaatatgcagcttgactctggtgcctcacctagccattcatgagcataaaagatattctgagaaataaggatgagttccacagtgtggaaggtttgaaattggttgttggctttcagtatattttg

SEQ ID NO: 96891 - DNA, 15129 bp, Homo sapiens
tgaaaggaaggtggatataagcggaactgacaccgtatactgatcacaacacttactgattccaccggaagatacaggtttattgctatgtcacacatatgcattcattcacttagcaaacactgccatctgttctatgccaggctctctgtgttgcgtagcaagaatacagagatcagaatagatcctcagtctctcaggtgggtaagtgttggttcagagctgtgggaccctcagaaagggcatcgcaccatcctgggggttatctgtggggtagggttgccacatttagcaaataaaaatacagggtgcccacaagtctgaatttcagataaataacaaatagttttacaatataagcatgtcccaaagattgcatggggttacttatatgaaaaaattattcggccgggcacagtgactcacacctagtactttgggaggtcgaggtgggtggatcatctgaggtcaggagttcgagaccagcctgaccaacatgatgaaacctcgtctctactaaaaatacaaaaattagccgagggtggtggtgggcgcctgtagtcccagctactagggaggctgaggcaggagaattgcttgaatccaggaggcagaggttgcagtgagctgagatcgtgccactgcactccagcctgagtgacggagcaagattctgtctcaaaaaaaaaaaattcatctttatctgaaattcaaattgaattactgagcatcctatacctcatctggcaacactactgtgggggtatcaagtagtgtgttgttactggaaagtgtcgtgttatagaggccgaagttagccagcagccatcggattatggaaagccttaaaagtgaggaggtgggggccgggcgcggtggctcacgcctgtaatctcagcactttgggaggccgaggtgggcagatcacctgaggtcatgagttcgaaaccagcctggccaacatggtgaaaccctgtctctactaaaaatacaaaaattagccgggtgtggtggtgggcgcctgtagtcccagctactcgggaggctgaggcatgagaatggcttgaacctgggaggtggaggctgcagtaagccgagattgtgccactgcactccagcctgggcgacagagcaagattccctccaaaaaaaaaaaaaagtgaagagggggcactgaaggggtttgaaagcaagtgggtaacaataaaaattgggttttaggaagaggcttctgctggtttcttggatgatccttttaagagcaacaatagtggagtctgaccagttgcaattgtacaggcaagagattttggatggtgataataggaaagtaggtgggaggaggtgccagatccaaaaagtatgtaggagttaaatcagcaggacttggcagttgcttagatggggtgaagagggcgtgagtcccaggatctggcttgggtgtctgggaagttagtactgcaaccaattgagatacagcagttttagggggcaatgattgagtttaatttagggcatctggtgtagagggccagcaaattatttgctatatgattctgaagttcagtggagaagatgagctcaaagtagagactgggaagtcctcagcagagagggagtattgaaaccaggagatggataagctccccagagagggggcagaagaaaaagaacccagggaagagacaaaagaacaatcaggggagtacaagaaaccaggagagtcaggcttcctggaagccaagtgggagtttctaggaagagcaagtgatgaatatgtcaaatgcagccagaaaggtctgattacacaaagcctgaaaaattacagttgatttaggcaacggtaaagtcaccataacctgaggctgtcatccttcaggttcattcagacatcagccccatttattcaagtggcaaacactcagccaacatgcgtcctcagcatcctctcaaacgctcgccacagtaattttcatgtcccctgcagtccttcagcgtttaaaccaatcattcagattgtgccccagctcactcagaaatgacaggctctgtataatcatcacttggggttcttcttttcccctcacatagatgatgatataattgggattctttatatttgtcaatgtcacctcagagccagctggaaccagtgcagctctgtctttgcagaggtaactgcaggtgcccacaagagttaaatgggttatcttgtggtttttatctcccaggagtgaagaccacccaggagtaaagaccacctttattcttctctgtttcctggcagggctaatttgacacaatgctgcgtgttgcttgttttggtgtccttgctgggcccctttgcgcacctctggccctcaggttcccatgagacatgcatccaaactgttgagtatgtgcgtgtaaaggttgacatcactttattccctatttttttgtgtgtgtggagacagggtcttgctatgttgcccaggctggtctcaaactcctgggctcaagacatcctgctgcttcagcctcccaaaatgttaggattacaggcgtgaaccactgcactcagcccctattccctattttctaatggttttgagacagaggtgcgtgcaatcaagagagaggatgctcagtagcagaaatccccaagaaagtgggaggggctgggacacaaaacccagtggaagggtgagccctaaacaggacatctctgagacccaaggaaaggatggtgtgggtgggtagagacaattttggaggtggcaagagagaagtattcactaatggcttccgtttgctctaaaaacagttcttttaattgtgcagccctcagaaccagaagaagttcagagagctccctctaaacacagttcttaacccacaatccaaaagacccctgaggagtcagtgaatagaattcaaagagcccatggacttggatagaggggaaattgcatcattattttcactattactaacagaaatatagcatatccttccaggggatgtgggtaacaaactgcagtaatattagcacctgtgactttgacactaagagagatcagattttcattattacggttgttgcatatctctcaaaataacatcactatttcaaaaatcatggttgtcactagacctgttgatagagcttgctatttaatgtgttaataaagaagcacatatattactacattacaggtgcgtttccttttattttgaaaattgtaccccaatataattggtttcttttgtaatcctacttataggacgcatgcattattctgggaaggggttcctaagacttcaccagactcccataggtgtccgtagcatagaaaaggatgagaaacactgctctgaagagtaaccatagctaacacttatatagctcttgctaaaggccaagcactgttccaagtcctttttaaatacatagttgttaactcatttattcctaacaaccctacgaatagtcatttgtttatactcattttacagaagaggaaactgaggcacatcagttaagtaacttgtccagggtcattcggctagtaaataatagagctgaggctgggcgcgatggctcatgcctgtaatcccaacactttgggaggctgaggcagggcggatcacctgaggtcaggagttcaacaccagactggccaacatggtaaaatcccatctctactaaaaatacaaaaattagccaggcgtggtggcccatgcctgtaatttcagctactctggaagctgaggcaggagaattgcttgcacccaggaagcggaggttgcagtgagccaagatgcgccactgcactccagcctgggcagcgggagactccatctcaaaaaaaaaaaaaaaagcggtagaggggaagagatccaagacaactcgagaacatggtcagagagagaaaagatggtgtgtagatgctggggagggcaggaggttattccagggaatgacaagtgcaataaggtggcctggacaggtggttaaagtagagaggaggtgaaggttcccggagttgggcaggtgaaagaatcatgaaactgtgcctggaaattcttccaagattaattcattaattcatttatttcacacatttgttttaagtgtcttgtacacgccaagcagtgttctcggcattaggtgaaccagctggacaagcccctggtgccatggggcttaccttccagcagggggagaactacacaaacaaggccaggttagcggagcatgcaggctcacaagcctgtaggcacaatcctgcaatgccaaaacttctgaaaagcataaggttgttttttcatactttggagcccaaactcaatagatgacaaaacctgacctgaagtagtgtgaggctatttatagtctttattcacacttggtgtgaattttcatacctttcacttcagaaatattaatatttcattacgatgctccaggcttttctcaatagttatataatatagactatacaaaaagttatgtttgactagtttttttaaagagttatgtaatataaattacatgtcttcctttctcaaattgaaaaaaactctgaattccacagcacatctggccctaaggttggaaaatggattacggacatgcaagtgctatgaagataattcaaatatgcaatgggatagtgtctaggtggctacagtttgaatatttagggaggacccctctgggaaggtgatatttaagcttagttctgaatgaaaaaaaataaaagcagtcatgcaaagatcaggggagagcattccaagcagagggagcagctaatgcaaagatgaacacaaaggaggccactgtggctacagcatattgggccggatgaagagtgctataaattgatggaagcacttcatgtagataggaaaattgtgagaccggtgtgctaaatcctttggtaaatacggtgtagtgattatgagtgtggtggctgtcaacaactagaaggcctggaggggaatcttcctgggtgagaaagcaagtggggggagatatttcagatagagaaaacataaagcagttctgaggctgaaatggtgggctaagatttatggcctgaagaccttggtttgaggaaaagtatagaaggaagacagattagatatctgggctcaagactctaatgacatagcttctggaagctgcctgaaagatgttctaggatgacaaagacctgggtcttaaataatagtctctggttgaagtccaatctgcagtgtgtgatctgggcttttggacttaaattagacaaagatagaggagagtagcaaagcctgaactgatgaaagatgtttttgcctctttaggtttgtgcttctcagcagctgtcctagaatgtctgtctccaagcatctctcttagcggctttccacattcatctctctgtgatcctacctggcatctctcttcctatctcggcctcaacatatttctctttacatggctctctctctctctaactcagactcctcatctttggatctccttgtctgagtgtcccagaatctggttccgtccattcgtctgtgtctgtactgtaattctctttctccacctggactgtgccctcctggaaggcatgaatcttttattattccgctgggtatcccaggtgccccgcacaccgtctagcatataggagtctcaaatacattcatacttgaattaagactttttcagaggagaaaggcatccgttctcaatatccacccctcttcccccacgcggagcaggccacttgccaaaaggccagctagagagtagggcgaggggtgttgtggtattgtacttctgctattggtctctttccccagttgaaataactctggggataccttagcaggcggaatccgccctctggccaaaggactagcgtaccaggccacgcccccacgtctcatgcggcagcggcagacgccccggcccgtcgcatccgccccttccgccgcttcgcctcggccaatcaacgagcgcccgcgcccccatccccatcccgtggagtggccggcgacaagatggcagcagcgtgtcggagcgtgaaggtagaaggttctttgcctctgttgcttgccttcctttacgggccgggacagcgcggccgtggaactaggagaaagagatcggtttcgagggaaagggtcatgcttatgtaggcctggtattgtggccgttgggctcaagaggtgaaagtcagcactccgcggcgcatctgtctgtctgtctgtctgtctatctatctatctatcaatcatctatctatctatcgtcacgggacgggctgtctggggatgagatcccttctgcccccgaggtcccaacgctgaggagaagcagcacacctagtttacccgcaggggtgaccacgacctctcccctccccccttctcctcagaagcctggagaacaggcaggcgacagcgtggggatggtctgggcaatgtaacagctgaccctgaccatgtcccttttgacagggcctggtggcggtaataaccggaggagcctcgggcctgggcctggccacggcggagcgacttgtggggcagggagcctctgctgtgcttctggacctgcccaactcgggtggggaggcccaagccaagaagttaggaaacaactgcgttttcgccccagccgacgtaagtggggtcacctctcctctcccagggtgtgcatgaggtcaccaacaccggcctgggaacctgtgggggtccctcccataagggtctcctctatgggggcggtagacccatctccttgtctcttttggcctgagccttcaagcactgtgggaccacctgtgataaggattctctaaagctgggattcacaacaatgaggatggggattggacgtaacaatctcctggaggagttatgtatggtttgaaaatgcattttgtgccttgtaattttatatttacaaagtcaaaaaacttgttttcatgaaacaaactacagaaagtgaaacttgatgaaatcatcttagcaggtaaggatacaaaaaagctagtttatcttcctatcaataattctcacaagagggttattttttatttttatttttgagatggagtctcgctctgttgcccaggctggagtgcagtggcacaatctcagctccttgcaacctccatcttctgggttcaagcgattttcctgcctcaacctcccaagtagctgggattacaggcacctgccaccacgcccagctaatttttttttttgtatttttagaagagatggggtttcaccatgttggccgggctggtcttgaactcctgatctcacgtgatccgcccgcctcggcctcccaaagtgctgggattacaggtgtgagccactgcacccagcctcacaacagggttgcattagtgctctgatccacagcaattaagaatcttcaggagcatgtgaatttatcaagaaggtattgatttgaaaaatgttttgcaacactgctctatattacctaatattttcacctttgacctactctctcaatttttttttttgggacagagtctcactgttgcccaggctgcagtgcaatggcacgatctcagctcactgcaacctctgcctcccgggttcaagcgattcttctgcctcagccttccaagtagctgggattacaggcatgtgtcactatgccggctaattttgtatttttagtagagacgggttttcaccacgttggccaggctggtctcaaactcctgatcttaagtgatccaccagcctcggcctcccaaagtgctgagattacaggcatgagccaccgcacccagcctatctctcaagttttacaacctttctcttggcctctcccttctcacaaatctcttctcacccaaggactgggcatgccctgccctgccctccctcaggtttagtgggaagagtgggtgctgggagatgaataccttctccacttctctctttgaaggtgacctctgagaaggatgtgcaaacagctctggctctagcaaaaggaaagtttggccgtgtggatgtagctgtcaactgtgcaggcatcgcggtggctagcaagacgtacaacttaaagaagggccagacccataccttggaagacttccagcgagttcttgatgtaaggccttggaagttctccagggatagtggtagtaagaagtatctggctgtggaggaccccaaagtttttaggggacaaaggcttcytctgcctcaggtcctatagcatgtctccatctgtcctacaggtgaatctcatgggcaccttcaatgtgatccgcctggtggctggtgagatgggccagaatgaaccagaccagggaggccaacgtggggtcatcatcaacactgccagtgtggctgccttcgagggtcaggtgtgtgggcaggggtaagacttatgcctcctaagtgacttgttggggccctcccacctatgacttctactctttctccaggttggacaagctgcatactctgcttccaaggggggaatagtgggcatgacactgcccattgctcgggatctggctcccataggtatccgggtgatgaccattgccccaggtagacatatcccctctctccatcatacctgggattgggtgggatccatggacagttgagaggggaaggtatccaccacctaagcagcagcagccttttatctttgggccccagagaagcaccaagaagtagggctaaagtaaggaagaaccaggtaatcatgaaagcaagggtgagtctctgaatttggctatattgtttaggtctgtttggcaccccactgctgaccagcctcccagagaaagtgtgcaacttcttggccagccaagtgcccttccctagccgactgggtgaccctgctgagtatgctcacctcgtacaggccatcatcgagaacccattcctcaatggagaggtcatccggctggatggggccattcgtatgcagccttgaagggagaaggcagagaaaacacacgctcctctgcccttcctttccctggggtactactctccagcttgggaggaagcccagtagccattttgtaactgcctaccagtcgccctctgtgcctaataaagtctctttttctcacagagtgtaggcagtgttgtgtgctagggggcctggcatggggaagaaatgtgaaggctgtgacagggttggatgctcagagctccagggtggggtgggaaaggcagtaccttcataatactttgtgtcctgttacaacatgtggacttgattttgagtgcagaactttattacctaggttagaaggtgggagtatgcagcatttttctctttgactcctaaccacctgtgagcttgatggaggagaagggagagagagatagacatcctgaacttagcggctgctggtgttaaactgctggtgatactgggctgtaggttgattggtgtagattactgaattcaggtaatcctgcctgtgaaagaagtccagaggtctcagctgacatgctttccctctctccatggttcctcaccatccctcctctccctcccttggcatttatctccaccactaccacctagaactcactgggctttttgctcattagccagctgctggttgaaggatcctagacccctttgaaatacagcacacaattccctctcctgctcttctagctccagcactgcctgggctgagctcatagtctggcttttccattcagtatccagtgttttctcagcctgacggtgtgcttgcttcttagagcgttgtacttcctgctctttcctgatggcagcttgctgctctggagtcatgcccttccagcaatagggcaggacccggtagggagccatagggtgttgggcgacctgggggttttcagtcagtaggtcactcgtgctctggtgctggatctccgcaaggttggccttctgttcacgctgacgctcacagcgctgacgcccagcctgcacagctgcctggtggagcccccaaatgcaaacatttgggtgcccaacctcagggaactctgtcacaggggaggggggaacatggccctactcttccatctcaaggagaaagaacagatactgcatggcctttcaatgcccctaatatgtgttggggagaatgggcagggaacttctctgccttcaggaagcctttagactgggaagcggaggatgagagggcaatgttctattctcaagtcatcctgcttctggaggtggggagaagtgacttgtaccctaagaggggccttcagtgaagggggagtactcagatgagagggctgatgctgatttaagaggggatgtaagaggaagaatatggctaaggttctccaggattttgttcaggagttggggagagcccaaggtactgcatggctcaggccatacctgcgctttgttggcgttggccatggcacacatcatggccgcacgacaggactcctccagcctggccagatgggtggcctgtgcatccatggcgaggcgcagctggttactgagcgcatctacacagagaaatatggccggggtactgtactggcttgctccattcctgtttcactcatccagccatttgttcagcaagttttgtgtttgtgtgtgtacgaatgtttaggagggggttagtgtccgagttgtagggatgtggaaggaactaggtgcagcaacaacgatttctcaagcgcataactaaaagatgcctccaatggacctgggtcccaatgtcagttctgctgcttctgagctgtgtgattttgggtaaatcatttcatatctctgaatctcagtctaagggccatgtgctgggttctaatgataccatcgaattaaatcctgtcctcagagaactccctgtctagttggggacacagatcaaacatagaccacaatctggcaagagcaatggcagggatgtacacagggtattaagagggttttggatggtggaaaagaggaaggcttccaggaagaggtgatccttgaaatacattttgtatacaggctaaaagagcaaagggcattccaggctgagggcatggcatgagcaaaggtactgacaatttttttctgctccagccacactgagctccttgctgttcctaagacctgtcagacactgtactatgcaactgggagatgggtagacatgaaagagatggttcatcttcagtaggctgacattttagggagaagacagatattaaacaaatactttcacaattagctacaactacaataagtggtccagcagaacagagtgctgtaacagggttgatgtgaagggtgaacagtgcaagtagataagacatggtccttgcccttgaagggcttcttctaatggaagagaaggatgtggccacagacaatatcataatagtagctactctatgtggtataaattattattctcattttaaagatgaagaaactgaagcacagaagggaaaattcatttgcccaaaccagctagtaagtggcagagccattaggtctgtctgcactgtgctgcctccacgtaatggagtgccaaactaatcaagaacaatgctacactgtcagttactgaaggaagtcagggaggttggggtctgcacaacctaacatttcagcaccaaccctatggataagtggacctccccacacagttctggtcccctggctgctgtactcagcttaggacagatccccactaggcctcaggtctctgagtctggagggccgggctgcttacctgtataattctcatcaaccttggcttgctgttgctcctgctgttgcctttccaagttgtacctgaactgcccctgctgcattctcagccgtgtgtccctgtctaggtcttccccagagaagtactgcaggctggctggaccaggataggtattactgtaactaagataggttggaagccccttccagacttggcctggatcccaaagactaaattcacgcccgttcttgagctgctgcttctgctcccgaaactcctggactttcttggccagctgacgtgttcgatctgcctcttccttctctaacatctggactaccacatcatactgcacctggctggtacctgggggtggtgagcaaggatatggagaagataccccaggagggacagagtccacttagcatgtcctctactctcaaggtccatccaatttgtcccaccaccccagggcctcaggccacagaggcagaactgccctacctcagcccactcgagctctttctttacacccttgtctggcccctggcttttggcttttaccataagctgcctccttgcttctttctgctgcttcccgacgctttcggtctcccacctggttgttcagggcctggacatccacctgatcccaaagaaaggagcacaatcagagtaggggcccagcagggggccttcaatgtcctaccacaaactaattagaatttacctgtttcagaatcctgtagctccccagtacctactggataaagttctagctcctgagcatggtttgtaagcctctccatggtctagcctctgcctccttctctggcctcatctcttagtcccaccttacccttatgagctgtgcttacagttccctgaatatcttaggctgttttgaaccaatagcctttgctcaagctgctccctccacttggaacactttcctcccctctttacacaaattccaatttgtccttcgagaccagctcagccttcactttcctgacccctcaggcaggttctactcctgtagaatctagaacccactgtctacattatattgatgttcgcctctctgtattctctcctccaccagactgtgaaccctttcagggcagaaactgggccttagtcattttcgtatccccactgcccaacacagtgcttggcacagagcaggccccgaggaaatgcttgtcagcttgtcagctggatctcaatcagaacactaataccctagccaacttcttacggcaggcactatgcactggttttcaaagctgccactctgtgttaacactcacctgacttccttcagcctcattttacagaagaggagcctggggctcagagaagacaggtgatttatccaaagccacacacataacagtcagcagacctggccttaaatacttacggggtcttttccagaataccatgctgcatcccccctctatccactcacctagcaatcttttgtttcttaaactatcaatattttctcttttattataattcatttatcacatttcaaaatcatacaaaaaggaatacagtttagtgaggcgtaagtgtcccttccatctctgtctctcagcctggttaagtttctcaacatagccttgcagagatagtttaggtatatgcagtaattttgagacagggtctcactgttgctcaggctggagtgcaatggtgtgatctcggctcactgtaacctgctcctcctggattcaagtgattcttgtgcttcagcctcccaagtagctgggattataggcatgcacaaccacgcccagctaatttttgtattttcagtagagacagggtttcaccacgttggccaggctggtctttaactcctgaccttgtgtgatctgctcacctcagcctcctaaagtgctgggattacaggtgtaagccactgcacccggactccaaatattctttaggcctcttttagctccatgttgcctgtctcaagaaccaggtcacatggcccagagctgactggagaagggtcagccgtctcccctagtctcttcccctgcactgacctatccctcttcccaagctcttcccaggcctgtaggggtgggtgccttctctccctctctttcctttcctgccctaggggcctacttgaatcaggggaagggctatcatgggcactgttacacattcctctccaggtgtaagagtgaggtggccctgatcctgagcaacagtccctactacccactcacccccatgactcggttccgcacattgaagaatcggttttgtcgctctttttctcgatttcttctagcctcgatggctgctgcttccttggtatctgttgactgttttatgttatacatctggagcaaaagggaggtggaatggcccatcagtgccgaccaccgtctttgactacacgccacccccattcctttctccctataatatttcagcagttattgattcctactgattttacttcctgatatatttcgtatctgtgccctccatctctgctgtcaccagcttaattcaggcctcacaatctggtgtcaggcagtatctcaggagccccactgggttctcttgctccaacgttaccctctctgcactggatttctctgcactggctaccagagtgatctttgggaagcaaatctgaccatggcactcctcagcgtaaagcctttgaaagcacctttaaagcaatggctccccagtgcttataaggcccaaccccctttgccagatttataaggttcttcatgatctgacccctgctcacctttctaagcctcaaacacatctacaacactcctttttcattatactctattcagttttccttatttcagtaagtggcaccaccattcaccaagttgctccggtcaaaaacctaggagacatcctttaatccttcctttccctcactccttcttctttcaaaataacccttatccaagccaccattgccagcttcctgaataaccacaactgtctccatgttggtattccagcttcctctattgactcctatagcccaatcacagaaaccagaagcagctttcttttctgaaatatatgtccccccaccctttttttttttttttttttttttttacttttattacttattttctggtcaaatgaaaggctagaaagctaaatttgcctgtgttccttcatattttgggaagctcacttttggcatgtaacccagccaaagctgcagccaaaaaaactttagcaaacataaatctgatcatgtctctcacctgcttaaatcctccactagcttcccactatacttagaatcagatccaaactccttactgtgggctttcaagatctagttcctgcacacctctccaatttgtct

SEQ ID NO: 96892 - DNA, 38345 bp, Homo sapiens
gttcaccccactctcctgcctcagcctcccaagcagctgggactacaggcacctgcccccatgcccagctaatttttttgtatttttagtagagacagggtttcactatgttagccaggatggtatcgatctcctgacctcgtgatccagagatttgggaggcccgcctcagcctcccaaagtgctgggaccacaggtgtgagccaccacgcccagcccaataatgccaaaccttttatcccaggactgcaaatcccagcaaggaagatttagaatggaagtcactgcctacaatcctcttatatgagaagataagaccagctcccagatctgctttgcacagtcttgaaagactcactggacattaaatctgttggcctcccagtactttatagccttgtggttgattccaaatattacagaactttctgcttctagataatagattccccatgcaaagcaaggctaaatagtaatacctcccacattcaacttcctttcctaaaagtcaagaaatcttttattattctgttaacactatggagggaaggtccattccagtaatgaggcaaaggccactactatgtgcagatttatttcctatttgataagaattattcttccaacctggcagaaaagataagtgacttacccaaagccagtgcagttcagaaagagctaagcagtaattcaaacacctgtaatcccagctactcaggcagctaaggcacgagaatcatttgaacctggaaggtagaggttgcagtaaaccgaggtcacgtcactgcactccagcctggacaacagaataagactgtctcaaaaaaaaaaaaaaaaaaagaaaagaaaaagaaaaccacctcatagaagctctctgttgcttcaacaaatatactttgaacaaaatgtaatgcactttgaacggtacctggcacaaactaaatgctcagtacttgttaattattttaatctaccataattataactatcaccatcatcataccactagactatcaatgtcataaggaagatggtaattcagtctgttgcatttgctgttcaaagtgcattacttgtagaattggtagagaaaagggaaacagatcagaaaaatttttcaaatctacaacctggtcatgtgatagtgaaagaaaacagcatttttcagtaaagaaagccaatggtgctggggagcaatcacctgctaaagaggttggcatggataaaagggagccaggtgctaatagtcagaacaatgggaaaagaccctgaaggcatctcagacatctttgaggctgtctctcccatcagaggcccagagacctaggaggacagcatggtttggggagacaggcccggggcacagctggcctggcacacctcaaggagtcctggaacgtcctacatgctgctccgacatcctggctgctgcagtcacagaatgtctacccaatgaccgtacaaccattgtatcttggaaaaaaattattcgtttttggttttacaggctcatagctagaaggaacttgctttgagtctcagactttgaaccgttaagttggtgctggaacaagttaagaattttagggactattggaattgtattttgcatgagaaagatgattgtattttgcatgtgagaaggatgagatctggggggtcagggatggaatgccatggtttggatctttgacccctccaaatctcacactgaaatttaatccccaaggttggaggtgggaactaataggaggtgttttggtcatggaagcagatccctcatgaatgcttggtgccatcctcacagtaatgagtgactcctcactctattagctcccgctagagccggttgttaaaaagagcctggcaccccacaccccaccccacctcttgcttcctctctcaccatgtaatctctgcatacactagctccatgagtggaagcctaaagctttcagcagaagcagatgctggtgccatgcttcttgtacagccttcagaaccatgaaccaaataaacctcttttctttataaattacccagcctcaggtattcctttatagcaacacaaacagatgaagacaactttcatatctttatatctgcagcagcaccaaaacaagccttggacactgcagacatgcagtgaagatgtgttctgctaatggaaaaagtaagtcaacagttttgaaaccccactagatgaaggcatgtgggaggtaacaggctgaaaatgagatttctatcttaaagtagttcataatctcaagacaaaagatatgaaattacttatacaatcaacagggactgcatacatgtaaatacagaggaagttcctggaatggctgcatttatcaggattaggctgagaacactgagactcaccttaaaaggaataagaattgtgaggccattcagccacaaataattactccaaagaggtacaaggcaacagtattcaaaaaacagcaagaacatctccaagagtgcagtaaagaacagcatcattagccaatgggggtgagcttttaagagtggctggcagagggcctggagacagcaatgcaaagccagagcctgagcttctttaaagcctatttaataaggttcccactttggaaaaggagtgtgtcaagaaccgatgggaggggaaggctagaataagaagcctgacaatacgtactagagatacacagcagacaggacaccctggctgtccgcactattctcaagcgggaatttgggacaacccatttaagagcccatcttggcacaaatgccatgatagccccaagtgccagagcagtggcatttgaatctgaaatctcttcttagagtaagactatttatttctctctgtctcataaggcttaccacagtctgtataacaaaatgacttacagcaactgctgagatctgggttcagatctcagttctgacactcattagatgtacgacctcagggaacatatttaaccttacttagccagggataaatggggatacttattatacctgtctcttaggtagggatatacaaaatgcttagcagagtgaatagctcagtaagttctcagccaatattattaagaaaacatacaataaggtatggattttcagaccccttgcattaacaccacagtgctccagagatccttgatactcaagttgggagtcactgtcctggaatacaaataaaaaacataaaagagcagtaaattccatctgcaagtgtttatgtggtagctacagaattcagcactatgctaggggtacagaagccaatgcaacaccaaatgaggagacaatgcagagggcagatgccggagggaagaaagaaacactggggcagagattcaacccaacctgaaagccatgcaggtgttttaagttggaaatgaaatgaggaaccaaaaaattccagtcagggagtggtctgctgagtgtggtgcttcaggtagactcccatgacaggctgcaggacaaactagagtgggggcccacttccataccttcctggccactcagttccagccaaatgactgctcttaaaagtcaaaattaggttccatttctaatctgcactgattcatactgctggtcgtgtaaattggtataggccacaccaacacagcacattagttaagatgttaatcttaactaatttccggacaatactaaaataaaatctctactttccagagattaggtaaacttggtaaacatttgagcttcaggtccagtctgacaaaatggaaaaaagggaatcatctgcagaaaggtcccagcattagaaaacaaagagaagggggaggacagtatgtaggccctgacctgtcttactgcctcaattcaaggattcaatttctcaacctcagatccttgccctcttactagttttcaaactcagatccacctcttactagttttcaaactcttgtctattatgattaccttaagcaaagcaagatgcatgaataaccagcagtaaatcaggtattcaatacttgaaattgtgtaatattctgtgactgtgcatctggccaatttcaacttctccttctttttttttttttttttttttttttttttttgaggcaggatctcactctcttgccccaggctggagtacagtggtaccatcattgctcactgcagcagcctcagactcccggactcaagtgatcctcctgcctcagcctcctgagtagctagcactacaggtgagcaccaacatgcctgcctcattttttaaatttttttgtagagacaacgtctcaatatgttgcccaggctggtctcaaactcctggcctcacctcgagcaatccttccacctctgcacaccgaagtgctgagatttcaagtatgagccgctgcctcctgcccacttagccctttctaacactagagaactttgagagtggtttcaataccaactggacacttcccagcggtttaacctcaggcaaatcaaactcccatgcctcagtttccacatatatagagataataaaagtacctcctcaaagagtttgttatgagaactaaatgagttaatgttaggcaagcgactggaacatgatagacacaatatgtattagccattatcacctttatctcagtgttatattggccaccacccagagatacccaggagcacacacatcacattctttctacagcaatatgtgggcacgattacttcatgaccactgaatctaaaacagcacagcttggtaagacacagcggtcggatcccacctactgcaacacctctaagaggcgaccctcacaaaccagccatgcttagcctgagacattccgaagacctcctcttgattaccttactcgacgaacttattcctttgaaaatggaactagccgcacttttggaccagtgtgcctcggatacacttccaaatgtgtcaacctgaatctcagaagttggcgtgattttaaaaagttttttaagttctttttcctaaacatgtcctagtaggtgactccacagcattactttctttcatgttctcttttctatctggaaatccggtgataggggacgaaaccagcaaagcaccctttttcttgcttcccaaacgttagcaggtaagcgccccttgagccgagacacatcaagaagacctcacccgcaagttcattgatcaccggttcttttccctttccggcactaggagctgcgaagcacgacatgggcttggaggaagagacgctgcggtcacctgaggggcaggtgagagcgggcggtcctgcccgggtgtgagcgcgacatcccgcgcggcacacacgctcacagcccccagaggaagaccagaggcgctcgatgtatcccgcacaccccacacgcaacacactaactgcaccgtaccttccgtcccacctcccggcagcagaccccttccgggacgccgagagggctgttcctggagagaccgcagcccacgagtagcggcgcgtagggagagcacgcgtgcccaggctgcctcggccggcgcgcccccgcccccgcactcacctggcctgtgataccggtgatgagcgccacgttcctgggcttgcccatctcgccgtccccggagccccgggcgctggggcagcgtgccggtgcgtgtgccatgtcccgcggcgggcgtgcggtcggcggcagggcggagcgcggcagagggcaggcgcggtgccggcaggaacgcgggggtgtgcagcacgaagcgcctctccaggctgcgggcagggagggagagcgcaccgcgcgaccggccgccacagtctgacaggggcgcacgggaggccgtgcagggagggccgggggcgggccgagccggccaaggcgggcccgacgggccaagcagcggggctgcggcctgactggcgcagcgtcattcgcgtcagccggcgacgctgtagcaggccccgcccctccgccgacggccaccgcgcgggaggggcggggcctgccgccgccaccgcctcagggaagaggaaggaggccgcggcttcgcgtcccgcctctcgcctggctggccgtggggggcctggacgcagtggcctcccgaatctcccaggaccctaatatcgcccgaggatgctgggaggaacgctgagccgacctctccgttaggctgaaggtctgaattttcaaacccaggggtcacagggccggggtcatggactttgataaataattcctggaaacctgttgcagtgccctttgagaagcccggtttatggtacctgaagggcagtagcgtacaaggcccgtaaacgggggtcacagatgtgggagtgactaactaggctggctctcgctcttctggcctttcctgaggctcggaaccagtawcgaggttccaaatagctgaattcaaagttttctcttctgaggactgccagtgcacaagaaagtccctagccccacccgtatgcggcataaggaaatgttgaaaagactgcccgggtcaataaacctggacgtggcagatttcaaagaaagtaattcaaacacaggtggggtcccggcttacatctgttggatttggctgccatttggcagctgctcgttggacagggagaggagaggargtgactcagagccgggagggcagcaggtgtgtgtgcctaagcagttggctgcaatccaggacacagacggaaacttcccggtctccgttgctctgcttctctgtccacattcctctccctaatcgataacttcagatcatcatttcaaatcacagagttactagggctgtgcccaatataacgtgcaagagtatgtatagcagacctggaaccccaaaatcagaaaagctcaggattacatttaaaacctccctctcgcgctcctcgaggtccgttaggaatatttcttagctatagatagactggtctggtttcacacctggcctctcctctgcgttctatgaggagaatggctcaacaaacatctgatggtgcctctgagtgatgaagagaccctgaagctgaggagagggaacacttccattgagaggaacatgctataagctagaaatgtctgtgaaatatacgggaatatgctaaaactatactcattttcatgtaaatacgctttaaattaatgcatgagccaattatttaacattttccttaaaaaaatcactgagcaagccgggcgcagtggctcacgcctgtaatcccagcactttgggaagctgcggcaggtggatcacctgaggtcaggagttcaagaccagcctggccaacacggtgaaaacccgtctctactaaaaatacaaaaaattagccaggcgtggtggtgggcacctgtaatcccagctactctggaggctgaggcagaagaatcgcttgaacccgggaggaggaggttgcagtgagccgagatcttgccattgcgttccagcctgggcaagaagagcaaaactccatctcaaaaaaaaaaaaaaaaaatcactgagcaaaactgatacttatgggagatatgacacatttatcctgtagttttgagacctcctatcacacaaacactggaagttgacaccagtcaatttcctgtcacaccaccaaacacctgccctagaagtgtgtgacagtagaagaaaaatggaaaaaaaatcaacattattagggcctgaaaatatttataaaatgatgggaaatggtaggtcagaggaagcttgaagaataaaggctatttctctagagaacttttctgaagacaggtggtaggtctgctacagcaacgtaccatccatagggtgacaaacgatagaaatttatttcctcacagttctggagactggaagtttaggatcaagggctgatttcttctgaggcctctctccttttcttgtagctggctgtcttcatgttcacatggcgttctctctgtatgtgtgtctgtgtccaaacttcctgttcttataagaacaccagttacatttgattaggaccctctttaatgaccttatttccaaatacagtcacattttgagctactaagagttaagacatcaatatattaattgggggagggacaaaattcaacccatgattgacagctagagggaaaaagaggttcttttttttaactgtttgtgggctcggagggaggaggttggtagtggaggttgttgtcattttcccagtagcattagggcaacttgaacaacgtcagcacagggtctggggcagcataagaagattacattaactagaagtaaagcgaccagcggtagtggaaagctctaagggtgatggctcagttgtgttttcctctaacacagttctcatccctgggtgattttgcccccaggggacatttgacaatgtctggaggcatttttgattgtcacaaatggagttgtgctataggtatctaatgagtagargttaagtattttgctcaccatctgcagtgcacaggaagctcccacaacaaagatttttctagcccaaaatgtcaatagtgctgaggctgagtaacccttctccaggaggccagtgaaagatgttaacaagcgggtggttgaactgacagacactggctatactatacagtgacttcatggtatgtcagaagaagcaaatacatttggtagctaattgttgatgctgatacctttactcacaaacttggytaatctccagaaacatactagctgctgagggtatagcagtagaggagaaataatcttcaaggggctataatctgaaagggatatgatattgaatcattttatgacttttcataacattttcatatttgttttaatatgatacaaaatatrgagaaaagagtgaggcctccaactccaagtcctctaattggataaaagtcaatcattctgtacaagactaaatatgtggaataacatttttcacttctttctttcccatctcttgccactgagtgcatgccagttattcaagaacgattctccagcattccctttaaaattctctctcctctccttttttaaacatttctttcctttgcttttcacatggaacatttgctgatcttctttctcagattgcacaaaccatgctaatggccagcatggatggagggagcgtgtgagatgtgtgrggcagcgtgctgcatctcagccaactccaggaggtaagtgcgtctgctgtggtgaaatctatatttggtcttcatttctgttttcctggcatatgatttctaaaatgcttagaatcaccaaagcgatgtattttgtagggtaatgagtgagttcactgttggctggcagcccttaggtggcttcagggtggaaactggtcattgtaaagaccaatgcaggattagagggctgggactttcagccccatcccctaacctccagggaggagagagaagctgatggttaagttgatcaccaacggccaacgatttaatcaatcatgccgacataatgaagcctccataaaaacccaaaaaggactgtgtgcagagagttctagatagttgaacacgtggaggtacatggagggtgacgcttcagggtgggcaccaaagctccaagctcctcctattccttgccctgtacatctcctcatctgcatcctttgtcatatactttgtcataccagtaaactggtaatcctgagtaagagattccctgagttccgtgagccactctttcagattaataaacctaagaagggggtcacgtgaagcccactttttggccagtcagaagcacaggtagaataacctggggcttgcaattggcatcagaagttggcgggggcacagtattggggactgagcccttgacctgtgggatctgatgctatctccaaggagacagtgtcagagttgaatggaattgaagggcacccagctggtgtgccctatagaattgattgcctgcttgtgggtgggaagaaatcccatgcatacttggtcacagaagtcttctctgttgattggtgttttgttagagcaggggaaaaacaatttgagtttgtccacactcagtatgataatgatctttatttcatagagtcagaaactgaggattggaaacattaataaactcgcccaaggccacatagctagtggctggttatggtagatattatgctcattcaactcccattccatactctctttggaaaaattagagtgctcaaagccacatgtcccagaccattttgcatctcatatataggaagcaaattgagctttgtcaattagatgcgttcctgctcaatctggcaggtggaagtgaaacagaagccatccttctgctttctggtccaactgacatgaggattaacggcagttagagtccaagtttgggtctagtcaccgttttcatgggcatgagagccacttgggttgggggagcagcatggcagcaggagtggttttctgaattctggccttcagctatggtggtaatgtcctgacatcaacaactgaaggccctccgagttctcttcctctgtctcataaatatttttttcaactaataattgtagattcaaatgtatttttaagaaatacagtgagtgacatggtcatgtcttcaaatactatagagcaatagcacaagcagcatattggcgttgatagaattcaccaatctcattcagatttcctcagtttttgtactcatttgtgcaagagtatgtgtatttacttgtgtaccgtttggtttggtttgttttgcctgagacaaggtctcactctgtcatccagactcacttgcagcctcaacctcctgggctcaagccgtcctcctgcctcagccttctatatagctgggaccacaggtacacaccaccatggccagctaatttgcttatttttagtagaaacgaggtctcacttttgccaaggctggtcttcagctcctgggctcaattgatcctccctccttggccacccacagagctgggattacaggtatgagccaccatgcccagctatttttttaatttatttattttgagtagagacaggagtctcactttgttgcccagactggtcttgaactcttgggctcaagcaatcctcctgccttggcctctcccacagggctgggattacaggcatgagccaccatgtgtggcctacttctatacaattttattgcatgtatatattcatgcatccaccaccgccatcaagattccaaaaccaccaggacacctcatgttacccctttataactgcaccacctccctcccacccccatccctaatcctttgaaaacacaaatctgtcctctatttttaaaattttgtcatttcaaaatgtatcataggctgagtggaatggttcacgcctgtaatcccagcactttgggagataaagtctggagaattgcttgaacccaggagtttgagaccagcctgagcaatatagcgagaccttagctcaacaaaaaataaaaactagccaggcagggtggcacgtgcctctggtcccagctactggggatgctgggacctcatttgaccccaggaaattgaggctgcaatgagccatgatcgcaccactgcactccagcctgagtgacagagcaagaccttgtctcaattttttttaagcattataaatgaataatcttttgaaatgtgcttttgtcattcaagttttctggagagtcatcatccaagatgttgtgtgtatggatagtttgtttatttatttagttagttagttatttttgagagggtgtcttgctctgtcacccatgcttggagtgcagtggtgcaatctcgkctcactgcagcctctgcctcccaggttcaagcgattgtcctgcctcagcctcccaagtacctgggattgcaggcaccctccaccacacccagctaatttttgtattttagtagagacagtgtttcaccatgttggccaggctggtctcgaactcctgacctcaagtgatctgcccacctctgcctcccaaagtgctgggattacaggcataagccactgcacccggcctcattaatttttttgttgagtagtattccatagtatggcagtacaatcgctggtttaactattcacttactgaaggatatctcagctgtttccagtttgggaccactacaaataaagccgctgtgaacattcatgtacaggtttttgtgtgaacacacattttcactttgcccaagagtgcaattgctgggtcccgtgatcattgcatgtttagtttttttttttttttttagactgccagatttttttcttgcaaggattttgtaaatacagaatttcctgtattaaatccctttctacttgagatccctrtagtggcttctgtgtccagctctaacccttggctgacatggctcaaacttcagacccagtgctcttaaccaagactggaagaccaaagagatgacctcctgagtgcatgaaaatgaatgagagagaagggtcggggcaacagaaagcatccagtagagaaggagaagtagagaccatttctttttttttttttttttttttttactttccctgaacttcaacttcaagatttataccagttttccagttcaggtaataagcagaatagaagcactggatttttaaataaaatctgagacaatccaactttgttggacatgagacaacttagatccctgcttttccactggaataaaatacatcgcataaatctttcttagaatgcayagcagaagcagcagggttttagaagcagagttaaaaggcaatgagatagctctaaaatttctttttatttttttgagacagagtttcactcttgttgcccagtctggagtgcaatggcgcgatctcggctcactgccacctccgcttcctgggttcaagcgattctcctgcctcagcctcctgagtagctgagattacaggcatgtgccaccatgcctggctaattttttgtatttttagtacagacagggtttctccatgttggtcaagctggtctcaaactcctgacctcaggtaatccacccacctcggcctcccaaagtgctgggattacaggcatgagccaccacacccggccaatagctctaaaatttctaggaagttcctgaaatctgccacctcaactttggaatataccatcctacaaatgaaatcagactacagcaagttttttgaatgatgtatttagaaaaggaaaaataaatgtgttcaaaataattgaacacatttattttttttctcttacatcctcactcatacaatttcccatcagatagctgtcttcaggcaaatgagtattacaagtatgagttctgggccacgtatataccttatctacagcaggctatgtatgtaagcctaagtcactttgtctctagctcctctgggtttttgttgttgttgttttgtttgttgagatggagtctcgctctgtcacccagcctggggtgcagtggcctgatctcagctcactgcaacccccgcctcccggattcaagcaattctcccgcctaagcctcctgagtagctgggattacaagcatgtgccaccacgcccggtctcgaactcctgacctcaagtgatccacctgccttggcctcccaaagtgttggggttacaggcatgagcccccgcaccgagcctactcctctgttttttaatttttcttttttcttttttttttttcttttgaccaatagtcttcaagctagaaaacttcattggggacattttattgggaaggttttccactctaataatctcaatttctcaatgcgctaaaacccagggagcagagccttggaatcattgctatactgtctaattagaacctcctctcaaggagcacagcattgcttttccattagcagcatcaaacccagagaggaaaagcatgtgaaggtttaagttgtccatggagcttattttcagcattttcccctcaggatttgagaacatgcctatgcccactcctccctttgtgacatttcttaaagccttgctcaataaaagtgaatctctaataacataaaacactagagatgaagtaatacattgttctttaaaatagatgaggtaataaaacaccattgactgctatggaaattttccagttcctggttactagtctgattcttataatgtgtcaaaattgcctcaaggttaagatattggtcttattgctaattctaagcactgtaatgccagagaaaccttaccattttgtactaatatgtttaacatgttcaagatgctgtcataaatctcaggctcctcatggctcagtccacttcaactagtaatggcttcyagtcatttttgatgactggtaaagggttggctaagggcctaatctgcataatgagaatgctaggactataaaggcaagcgtcacgaatcctatgcaatagagaatttgctagactttctgggaaagagaactttgatcctaatgaatttttttaaatggccccctcattcccactaagagagatctttcatcaacctccaggaggcatgccttgggaaactcgccctaggatagaagagtgctgaagagtatctgggctctgtcctggattgtgtcctaaatgttagtgagaagacccatttttgacttgacattggataggatcactaaataatcctgacatgcaactctggggtaatttgttccatgttctcaagcaaactaagtcttaaaaaagcaagctgctcctttgggaacctcaccaaaaagcagtaagcgctagtgaagatggaaccttcagcagccagtgagcagtggagatagttgtggcaaaatcagtatcagctgggatcctggcaaaattaccatggcttcaaatcatcatgacagatactatggcttggctcccaacagaaggagcattcagccaagtaaagtgttcagtgaaaacgccagggagttaatcctgattcgtctaaagccatcatgttagttccattccccttgtcaaagaaggacttaggcatagccatgttatgcaaccctagcccctgagatgaaataagtggaattattctgccattgagtccctcctgcccacctcctataggtgatatcctcaggttagtgttgaaggcattcagcctttcctgtatgagatccatccagatcctgcctgatggcagcccatcgttctatgggtaattaggacggggctctgctgggcagttattctgctccttgtgacattaactggagttactcagtggtattcagatggtggctggagagttcattaactcttccctcacagtctcgtgccttgacagggaagtctggaaagcagggctcagatagaatctaagtggccaggcctctctctccctggcctctctatggcctctccacatggtcccttcagtgtgggagacagcttacatggtgagtcagtactaccaagtatagggttctaaaagactgaggaaaaaactgcaagactccttatgacttagccttgaagtctcagaacatcacttcttctcacattctactagacaaagtaagacacaagaccagtccaactcaacaggaaggaattagattccacatctcaatctaaggagcagcacaaatatgcagagaggaaaggaattgattgtggccctctttgaaaactatctcaggccatccttgggccacttcaattcatagctcttccttatgcaaaatacactcacctcttgcatttgttttctatgctgcgtaacaaattactacaaacatagcagccttaagtaatacacatttattatcttagtttctgtggggcaggagcctgggcatgactcagctaggtcctctgctcagggtctcatgtgactgcagtcaaggtgtcagatgagctatattctcatctggaggcttgacaggggaagagcctacttccaagttcattaggttggtggtagaattcactccattgtggatgtatgactgaggaccctggctttttgctagccatcagaagaggccagtcttgggtcctagagaccacctgtggctccttacaatgtgggctttctcaacatggctacttactgcatgaagccagcaaaaagaatctcccagtccagtaygctaagacagagccttgtataacataagtcccaccctcactcaaggggaggggaatgttaagaagacataaacaacaagaggtgaaaattattgaccgtaggacctgtccatcacattccctttttggaggccccaaatttgatggtttaattaaagaaaaaaaaatgttattatctcttgtggttctatgtgttggctgagctcagatcggaagttgttacttgggattgtgattccggttgcagtcagatggcayctggagctgggatcctctgaaggtttgattgggttagaagttcaaaatggcttygtcatgcacatgtctcttgcctgggttaagatgacgagaatgcgagggcctggctgagcatttctttctctccacgaagccctctccgtgtggctggcctgggctttctcacagtgtgggagtctgagtggtgggacttacacgtggtagttcacttcacaaaagtaaacattacaacagtcctaggaggaagctgcaaggctttggatggtctggrctcagcagtcatgcagtgtgtcttctgtcacattctattagtcaaaagcaagtcacaaggccagcccagattcaaggggtgaatcataggaggcacagctcattgggggagctatttgtgaagactattaaatatatcgacttggaaaagcaacgtaattactatgtatggtttctaaaactacctcccacaagaacatcacctagatttatatccagattccatgtacaaattttgactgagcaactaatgccatgttggtgcattatacaataaagccaggcatcaaacgtgcatagtcacatggtcacaatgaaagttatgttcctaggccaggcgcggtggctcatgcctgtaatcccagcactttgggaggctgaggcgggtggatcacctgaggttgggagttcgagaccaccttgaccaacatggaaaaaccccatctctactaaaaatacaaaattagccaggtgtggtggcgcatgcctgtaaccccagctactcgggaggctgaggcaggagaatggcttgaacccgggaggcagaggttgcagtgagccgagatcgtgctattgccctccagcctgggcaacaagagtgaaactctgtctcaaaaaaaaaaaaagaaaacaaaaaaaaaaaaaaacaagaaagtgtgtaccatgccatgggcatgcattgtccattatctctgatagctcagagttcatcacaaccgagtatgctgggctagaaagggctttccttcctgaaaagagatgggcaaagacaaacttcgctttctggttgtgggggttgttctgtaggtatgatgcctggagttataccgaatatcctatgactatgaagggaaagtcaaaaattgtacaaaagcaactcagaatcctgacataattgagctgcgatagtaaccaaccctgaaacttcttacctttagatttctatgtgagacagtacattccttattttttaaatcaccttaactggattttctgttccttgcaactcaatacattttttgttttagccaactcatytaaactaattttgatcaatttatttttattgctacatctctctagaccactaagtagtgaagaagaaaggagcctggagccacagtagaagaactttaatggccactaagaacatacaatcatctggcaccctgccagggaaatttggggcctttggagcttaatgcttggaaaaccacacccttaattttccttccttattccaagtggactgagagaacaagcttatgttttgttccttagaatttttttttttttttttttttttttacccatctgacccttaaacattgctatggtttgaaagtgatgcctccaaaattcatgcaacagaattgggaggtgtggactaacgggatgtctgtaagtcatgagggctttgccctcatgaatggattaatgctgctatgaaaagggcttgtggaagtgggctttctctctctcgctctctcttytactcttytgccatgtgaggacacagtgttcccccttgctggagaatgcagcaatgatgcaccatcttggaaccagagactaaatatgctggcaccttaatcttggacttcccagtgtccagaactatgagaaataagtttctgttctttaacatttcctagtctgtggtattctgttatagcagccacacacacacacacacacacacacacacacacacacacacacacaaagactgataatcattcttcccttttctaaccctagcttaatgtggaaaaaccaagtttatattttaggggatttatccatacttacccaaaaccttgtgtcatctccatctgttccactggttattaccaaactgagaattagtcaattgaccttttgtgcaggagtgtattagtctcctaggactgctataacaaaatactacaaacttgatgacttcaaacaaatttattctctcacactctggaggctagaaatctgaaattaaggtgtcaacaggcccacatccgctctgcaggctctagggaaggatcgtgtctgcctcttcctagcttctggtggttgccagcattccttggccttccttggcttatagacacgttgcttccttctttgcctctgtagttacgtgatgttctccctgtgtgtgtctgtgttaaaaatttccctcttttaatagggacaacagttgagttgggtcagggccaccctacgccactctgacttcatcttcgcttgatcacatctgtaaagaccctttttccaaataaggtcacattagtacataccagaggttaggacctaaacacctttttggggaactcaattcaacccacagcagtcaagtctattaaaggactgatgtagtaatgaacatcatcctcagtagcaagagtctaataaactgtgttggcaaaagacaagagcctaagggcaattctgagaaggttggatgaggaggaaggagaacgtaaaaagaagctgataaagttttctgaggaaatggatttctcttgggttgtcaggaaaatcatatggggagaataaagtcttttcttcattgagcacttataagttggtagcctagatgaaacacttcatgtattgtttcagtattcctcacagcctacaaggtaggaagttatctccatttttttttagataagaagttggaacacagggaagttacagtcaattgcttaraggttatttagtaaataaatggcaaagccaggaatgaaagccctctctgtctcatagcaaagtccatgctctttccgtttgtgaaactaatcctgcactaagtgaacaaataattatcccatatgtaatctatgccaggtacaggacccaggggtgtgtcaggatatatgctgccaagctgccttggacaaaggtgatcacagtttacatttccacttacagtgtaggaaagtgcctgattccacagaccattcccagcactgaatattcaactcggaatcgtttaaaaccagatgtttaaaaagtggtatcttgttttaatttgcrtgttcttgatgattagtgaagttgtgcatctcttcaaatgcttaaccatttctatttccttttctctgaattgtcttgtcatatattttgtgcattttctgtgcrgttgtttatcatgtagatttgttgaagctttttgtatatgatagatatcaacaccgtgtcattttatatgttacaaatacatcctcccattaagttgcttttcattttgctttgtttctaggaacttacttagaaagatattccccacagcaagatgataacactgtccttctattttcttctgtatatggtttgtttgtttgtttgaagagatggggccccactctgccccaggctttagaggtgtgatcctagctcaccacagcctacaacytctgtgctcaagcggggaaccctcccacctcagcctcccgagtagctgggactactggcatgtgccaccatgcccggctgatttttatttatttatttatttattttttgtagagatttttttgccactgttttgcccaggcttgtctcaaactcctgacctcaagcgatcctcctgcctcttggcctcccgaagtgttgtattataggtgtaagccactactcacccctgtgtatgtatttttatgtaaaatgtaataaaatgttttttctcaactggacagtcattgatcaatgatctcaaagctatctgttgattagtccatcctccccccactaatttgatattttgtctttcttgtatcttgaattggaatttacatatagatattttactagaagctcatttgtttaactgccttaattttcaaacctttcagtgtcaagctttttcagtataatagcttaatcatttccactttatgattcttcatttttaaaatttatgttctattctttttttttttttttttgagacgaagtcttgctctgtcacccaggctggattgcagtggtgtgatctcggatcactgcaacttccacctcccaggttcaagtagttctcctatctcagcctcccaagtagctgtgattacaggcacatgccaccacacccagctaatttttttgtatttttagtagagacggggtttcaccatgttggccaggctggtttcaaactcctgacctcaagtgatccacctgtctcagccttccaaagtgctgggattacaggcgtaatccaccatgcccagctatgttctattcttaacacattttctcttcctagaaaatatcagaattatcttatcaaattctttccactaggattttttctttgcagtgggactaatattatatttacagattcatataaaatacttacattttatattaatatgtacagaattatttcctaccaatttatttaagacttaaagttttaaagttttgtcacttagctctaatgtttttcttattacatttcaaccaaggttttataatttatgttgcaattgtgagtgrgaatctatttttcctgatatttccttttatagttattgctgaaaaaataagaaactaaaatatagaaaccattatttctgttatcttgattttttttttcacactactggatttcaccataatcaattctttttgtcttcctgaaagtcctctcttttctaagctagttctacctctcttggctttctagtgcttttatggacattaaacattatatatatttaattatataaagattatatgtattttaaaatagactttatgttttatagcagttttagatttatagcaaaattgaacagaaaatacagagagttcccatatcccccttctgtcacacacccacaaccttctccactatcgacatctcccaccaaagtagtacatttgttataatcaatgaacctacactgacacattattattacccaaactccacagtttatattagggcttaacaagtgttgtacatcgtatgggtatggacaaatgtataatggcatgtaattaccgttatataatagtatcatacaggttagttccactgccctctgtgctctgcctattcatccctctctccttgcaacccctgacagccactgatctttttactgtcttcatagttttgccttttccaaaggtcacrttgttggaatcatactgtatatggccttttcagattggtttctttcacttactaatatgcatttaaggttcctccatatcttttcttggcatgatagattatttctttttatcactgaataatattccattgtctggatctaccagagtttgcttagtcattcacccactgaaggatgtcttggtcgcttccaagtgtgggaaattagtaatcatgccattacaaacatctttgtgcaagtttttttgtggacaagtttttaacacatttgggtaaatagtaaggtgtgtgattgctgtattatgtggtaagagtatgtttagttttgtaagaaactgccgaactatcttccaaagtgtctggaccattttgcatccccaccatcaatgaatgaaaattcctactgttccacatctttgtcagcatcaggtgttctggattttggccgttctaatagatgtgtagttttatcttagtgtcattttaatttacaattctctaatgacatacgatgttgagcatcttttcatgtgcttatttgccatctatatactttatttggtgagatatttattcaggtcttttgcccattttttaaattgagttattcctttccttattgttgagttttaagagttctttgcatattttagataacaatcctttgtcagatgtgtgttttgcaaatattttctcccagtctgtgacttgtctttacattctcttgagagtcctttcatagagcaatttttaattttaatgaagctttgcttatcaattttatctttgttactgtattttaaaaacaatcaccatatccaaggatatctagattttctcttatgttatcttctgggaattttataattttgcacttaacatgaaggtctatgatccatttgagttaacttttgtgaaagatgtaatctctgtgtctagattcagttttttattttgttttgttttgttttgtttgcgtgtggatggccggttgtttcagcacatttgaggaaaagactgacttttctccactgagttttctttgcttctttttcaaaggtcaattgttacgtggttctattcctgggctctctattctgttccactgatctatttgtccattcttttgctaatatcataccatcttgattactgaagctttatagcaagtcttgaagtcgagtagtgtcagtccacaaccctgtttttctgtttcaatattgatttggctattctaggtctttcatctctccatataaattcaataatcagtttgtcaatatccacaaaataacttgctggaattttgattgagattgcattgaatccctattgagtccctattatatagtgcttaataaaccaccccaaaatgagatcaagttgggaagaactgatatcttgacaatattgtcttcccacccatgaacataaaatatctctccattttacttagttcatctttgatttctattatcacagtttcatagattttcttatgtgtatcaagcacatattttgttagatttatacctaagtatataactttaggggtgctaatgtaaatggtattgtgtttgtaatttatttgtttattgttcatttttatgaaagacgtagatttttgtaaattaaccttacatccttcaaccttgccataattacttataagggccaggaggtttttggagattcttctgaattgtctatgtagatgattgtgtcatctatgaacaaagacagttttatttctttcttcccaatcagtgtacattttatttcctttttttgtccaactgcactagctaggactgctagtatgatgttgaaaaagagtggcaagagggatcacccttgtcttgttgctaatcttagccagaaagcttctaatttctcactattaagcatggtattaactgtagggctttaaacagatatattatttagcaggtttaggaagctcccctctattcttagtaggctgagtgtttttatcataaacaggcagtggattttgtcaaatgtcttttctgtgtatattgataagatcatatgattttcttttttagccagttgatgtgatggactaccttaattgatttttgaatgttgagccagccttatgcatgtgggataaacccctgttgatcatggtatgtatttcattttatacagtgtcagctttagtttgctggatttttaaaatatgaaatctcttttataatttcatcaggatattggaataaaaaagatgtagatgcatatattcagtcattccttttgaaccagttatatttctaaaagcttaacaaaagtctggagaaatctcttttatgttctgaggagttaaaaattatattacaaggaagcaacaagagaaaagacttatccccaattgttcctggtgcctattattgcttagtaaaccaccccaaaacttggtgatttaaacaacaatggtcatttatgttgcctgttaattgcaatctgggcagggctctgcagggaaggctcatctctgcctcacagggacattcagtggctggaaggtccacctccaggctagctaacacacagttggcaagtcggtactcactgcctctgtgtgggagctcagccacagctcagagctaggcattctcacagcacaatggctggttcccaaggccaagtatcctgagagagagctaggtagatgttgtattgccttcagctgtactttgttagtcaaggcagttgcaaagtcatgtgcaggctgaaggggagggaacagagactccatgtgaggacacamgaagaaggcagccatctgcaagccagaaagtaaggcctcaccagaaaccaaattttccaacaccttaatcttggacctcttgccttcagaactgtgagaaaataaatcctgttgttcaagccatgcagcctgtggtacatagtcatagcagccagaacacattaagacaaaccccgttaggccttgaatgctaatgtcaggcaaagacctagcatattaaggccgtttttagacagagagcttttttgactaccacagtggtaaatggagcatgccagtcatgtaaagaggcccatagggtagaaatccctgccattctagtattcttacgacaagctgactatatgcaggcagaacaaagggacagatgccccactagtgattaaggaaacaatgtgccttggggagacgggaaggctctagaatggtatgagcaccttcagatggataggcttggattctagaaatccttatgtggatgggtagagcccaaatggccagcacctccactcatgcatgagaccagtgcataagagatacacatcatagagttttcatctgctactggggtctggctcttacacctgtatgaacatgtgtagagcctaggtaggaccatcctatgaatgaatgttcaggagtcacccatccccatgaatggaaactaggactgatggaactaggtatttcctgaacactcaaagtggatcaacctaatagtgaacaaaaccacatctgacaaggagaaggcatagggactacctagtgttaggaaacagtccccgatttctgactcatcctgctataagccaacttctttcccacaagacagtacaggacacagcctacaggaggaaatagaagtcctgatctttctctttcagtatcctgtgctgtcagaggtcactttagctaggcttaaaaaccagaaggaaaagaatttcaggatggcaaagggatgggcatggtagtggtaagacgatgaggtgtgaggggcagaggaataagaaatttaatggtttttattcagactttattatttgggcatgagccattggtgattaactcaatctccagcccctttgccctccctgaaggttggggaggcaggaagtccatccctctgatcatgccttggtctccattccccaaaccccatcctgaagctatctagggcccccaataccgagtcatttcattagagaaggacattcatcactccagaaattccaagggtcttagaagctcttgtgttagaaactggggactaagaccaaatattataacaaaaagatgttcccagcattcctatcatccaggcagttacaaaggtttttggaactctgtgtcaggaatcaggagcagagaccaggtatctatttcttgtcatgtcccacaagaggatgcagaaaatctgggattgtaactgttgatggttatgtaatctcaggaaacttctttgtcctccattgcttcacaattaaatggggcagatatgcctcccctctctcactctatttcctgagcacacattccagaatctcagcaaactctagagacaaagacacagccctggcccccagggagcaaggtcttagggtgctggagaaaattatcgtttttgttcccttccaatagtgaaatctatgatcattaaaaaaatacagtatacctcctaattaagccaagtttcccttctcattttagttatcaggaatttaaatcaatcaaggcataaattggaccaaacattattaccactgttcattgatatccttaactaagaaygttactgaaactttcccttaatacttattatatatcttccaagtcaatcctgagaaaatccataaagctcatctcagggcgaaagcttgtacatttaagtaacaggattccaaataaacaatattgctgagttaactaaaaatacattaactaaaaataaatctcatctaaaatattaaaaatggatatttttaaaatgctttttattttttaagtgttcctggttaaatgtggcatctaagaatggtttttgcaacttataaaaagctgctgcctatctttttaaaaatccctgccaaaaaaatcacataaatggtgaatttataaaatgtcatacaattgaattcatataatggcaatgagaataagtaaaaggaaaaaattataaagcatttactcacaatagtatacattccgttcaactatgctgggaattccatttatgtattcaaagtttctattaacttctttggaatccagcataaacctttgatagtatttataaaaaattttaaaatgtgaaakggcaaaatggaaagagagcattcaaagagaaaggaaattcttggtcagttaaaacatttcacacctccctaactgcctttctstgcttcttgattcaaagttctaaggcaagtaaacactagaaattagtgtttcctttaaaaagccttcttgggttatgccaaatcaaaaaaaaaaaaaaaaaaaaagacatcttaattcacactgttgaaaaaacagagcatctccaaagttaccagctgtacattttacttctttgaacgcacccagaacacattgcaaagatattcagcaaatgcctactgaattgaatcttgatgagaaacagataattctgttcttctattagttttattttatgggggtagcttaaaaattaatcaatttagatgatgacattcaaggtcaggaatgttattccttcttcctcactctatattcctggaagccttttacagcttattgtattcagtattcctccttgcataaaatatagactagtcaccagaattcctataaaaatgaaaagcaaaaacaagtgcccctattaaaagttttaagaagtcattttgtcaagagaaaagccttctttaatgttctcttcaagtctaatcaagggctttgagaaaaatgctgagcagtttccttttttctaaagttcaaggaagacaaaagagacaaatttacattttgattgaacgttttatttattcagccttcactcagcaaatatttattagtgtccactgtataccaggcactgtgataactacttgttactgctgggtgagctgctagagtgagctactaaagaagtgtataatatgaaccactacagattgtcgatgagatgtgtgagcactctgtctcttggaggggcaatgggaaaataggagatggaactaggtaaaactcaaagtggcccttacctctctcactctaactccatgctcatcacaaatttcaagatcaaaaactttgggaggccgaggtgggtggatcatttaagatcaggagttcgagaccagcctggtcaacatggtgaaaccccaacctaagccccatcaggtgaacacctaacattaaccaccgcattggttccaagagtgaggatgggggaggggtgttgagagtttaaggaaggggagtgagagtcatctaggagagtagaagagagaacagactggggaaatgggctggcaacactcaagtataacttggttaatcatcttgtacttaaagtaatagttacaagcttttcttgggctatgtacaactgcatggtgaaggcagagagttggatttaaccaagactgtgactttggtgaggatgtatgaccaaaagagagaggaggggggtatatggaagagattgcttgtatggatgaagcatgsaataaccgtggcaaggagagaaataacgagatgaggggtgagggacagtgaggtggaggatggatcaatgtgttgtgggtcctgcaatggtagaaagaccatcaagktgcttgagggagtgaggaggaaaataggaaatagtggctggagagtggttacttgaaactgagtttatggcaaggatgtagaggggtktgtgtgtgtgtgtgtgtgtgtgtgtgtgtgtgtgttccgtaatgggaatgtctaaggtataatcatggaagtcaagctttttggaggtggggagagaactgagggggccaggacactggatggatcaccagatgctgaaatcactaagtcttgttggagtgacaaggaactagaagtgccaagcagtgactagggtcagtcaaggatagcaaccacaagagcaagtgggtggtacgacctgctggcatgggacacagagccaggagggccttgggagtggggaagaagagggaaacaggcaccactggagagaactgcggggggcaggagtgccccaggtcagagccaggtttcagcaagaccaggcaggtgatggggatgttcaggaaaaagtggaggatgtgagggattctaccgaggactgactgtgtcttccagaccagagtgtctcaaactttaatgtgcagccatgtcgcctggggagtcctgttaaaatgcacattctgattccgcaggtcttgggtggagcccaggtctctgcatttcttttttttaattattaccattttactttaagttctgagatacagtgtctctgcatttctaacaaggtcccaggtgatgctgctgctggtctttggactacactcagagcaccgaggtcccatgtgggaactaccagcacatacagctactgagcactgaaaatgtggctcatttgaattgggatgtgccagaagtataaaatgcacactgcattttcaggccaataaaagaatataaaatgtcttattaataatttcttgggtgagtgcagtgtctcaggcctgtaatcccagcactttgggaggccaaggtgggaggatcacttgagctctggagtttgagaccaacctgagcaacacagcaataccccatctctactaaaaatcaaaaaaactagctggccatggtgatgcatacctgtggccccactactcaggaggctgaggcaggaggatcacttgaactcagkaaagtgagactgcagtgaggtatgatcgtgacactgcactgagccactgcactcaacttagtttaggctgctataacagattgccatagactgggtggcttaaacaacacatgttttttctcacagctttggaggctgtaagtccagtttcaaggagtcagcatcatgggatctgataagaagcctcttccaagttgtagactgctgatttccagttgtatcctcacatggtggaatgacagccagataattctctagggtccctttcacaaaggcattaatcccattcatgaggcttctactctcatgacctaatctcccaaaggccccacctccatggaccatcacattgggggttaggatttgatcttatgaatttgggggtgatataaacattcagtccacccatagaaattattgttattgagacagcatctcgctctgttgcacaggctggctggagtgcagtggtgcaatcatggctcactgcaacctcaaattcctgggctcaagggatcctcctgcctcagcctcccaagtagctaggactacaggtatgtgccaccactcccaactaatttttttattttttgtagagacgagatctaactttgttgcccaggctggtattgaactcttgggttcaagtaatcctcctgcctcagtctcctaaagtgctagggttatagatgtgagccactgtacccagccaggttgtatattgaaataataatttcttaatatattgaattaaaatatatttaaggcaattttatctgtttctttttactttttaaatgtggttactggataatttgaaattatatatatgactgtcatatataagacaaaggaaatgtaagagatttcctttggacaacactattctcaagggtacttgggaaaggtttccagagcttaaaagacggagaaataaagtcagatagaaggatgtatggggaagcatgcaggtcagagtccaggagaggcctgggccctgggccacgtcacagtgacatgcaaagggcatggtgagatcagtccacctgctctgaagcttatagcaaggacaagcctgagagatgaggggcaggggcaaaaggcagtaactgcgaatatattgggactgaaatatttacacatttaataccaaagaaagtagaattgaaaacacccaccatttacagaatttgcttggtgctgtccaggtaccttaggacccatgaagggagaactttctcaatttgaaataacatgatctacagagaaggtcaattaaaggagtcaaaaagctctcaaaggtagtaaccacaaaatgccactttgaataatattgctggcaattttgtgaaagaaaattaatgataatgatacctgtaaaccaaaaagtatgagacaggtctaaactgatttagaggtttattttgccaaagttgagggggccagtaacacagcctcaggaggtcctgagaacatgtgcccaaggtgactgggttayagcttgattttatacattttagggagacagtagtgacaggcagtgacatagatcaayacatttaagatatacattgattcagccaaaaaaggcaggacatcttgaagcaggtgggaaggggcgtccaggtcacaggtgtattcaaagctttcctggttagcagttgattgaaagagttaagctatacctgaagagttgacatcagcttgaattaaggtaagtgttggggtggcagtgggggtggaggagttgtggaagttaaggttcaggtagaaggcttcggagagaacagatggtaaatgtctcttaacataccttaaaacgtgtcagactcagtcacattgctcctggctcaggaaaagacctggaaagaaagggggattctctacagaatgtaaatttcccctacaagagacagcttttcaaggccatttcagaatatgtcaaagaaacatattctgggcgtaaattagtttgatttcctttagggcctgttatgtgtcatgtgatactgtagctgagtcaggttgacattggtgtctgattgctacaaagagtctgttcggtgagtcttaggatctctgttttaatgtgagtgctggtcagttgtgtctaaactgcaaaagggagtgggtataataaggcatgtctgaccccacttctcaccatggcaggaactggtttttcaggtttctttggcatcctcttggctgggggggtccattcagtcagttggggggcttagaattttcatcttggtttactcaccaaataaaaagtctttagagaaatgccattgaccagtattagacacaggtacaactaagaaacccatcaaaatatgtgaaaatgtaccaaggttaatttccttataatatttttcatgtccagataattagcacaaataaaaactttcaaaaattgccaacaagcagacaaacaactcttattctttgtttgtttgtttttaaataaattttaagctcttggttgcaagtcctctgctctgtgctgacttcagcaccttcctgtggtaacaacccctaataactggatgttttggatctcatagttcctgctggaatcttgctgttgcccattcaagtctggtggttcctgtgtgttggggtggccttgcttctcctgctcttagctctggaggagccctcggctggtgctgcagtgaatctgtcagagtcgtcctaaccagagtgcccccatcctgaatagaggctggataaagccaaacctgctgggttatagtcccaggggattgggcagtcctggtcacaagatatttaaggttgagggaataagttaatgatgctaagtaaataaagaccctgaattctttcccgtgagagattcaagaactcactcttggcatctgggataagaccctttttccggtaacaaacccctgccctggccctttcttccttctggaaaacttaaaaaaaaaataggcctcaaaaagactgcattaatctgagaaactgctgaatatggctactaagagaagctgggattttctgatttttaatgtcggtttcaaagagagcaggtatactttgcaggagggaaccatgctagctgcagaatcatggacgagctggaccacaagtttttacacagtgtgcatgcttttgttctcctgtcaacttctgttgttttcctgtcaacttctgttgttttcatcaaaagccatcaacccgcctcagccagggcatcataatgtacatgcaacagagtgttccaagaaactttcagctgagaccctaagaccctggacatgcaatgccagagtgaagtgtgaggaccacagctgtgcaggacatgcagaaaggaggggcagagagccaatgagatgatgtcccacgactcacctgtgtcagtggagaccgaaggagacttggagggtgcttttggagagaactgctgatgttttgtgagcctcactctctctgtgtgtggaaatgctggaggatgaaaccgtctaaactctcctgaagtcccgggaatggagttttaatggtaatgtgtgatgggatgtgtgttctcttatggtatgggagacacagaggactcacagaggactggcctctgcctcttgaccagggatcaggagagatgggaactgagctggtcagctgctcttcagagctggtcgaggagagatttctgctgtgctgggagggcctaaaaacatgcatggatggagcccaaggaccaggtgcagatcttatgcaagaatgaaccagggggtgacttaggtccaccaaaagactgcccagagggacaaaaggctatcagtgaaaagaatccacagatgaactgccagttcctcagggctgaggcaagatcttaattttgagtaggagcagagtgtattacctacaacaaggataccacagatgagaaaaccctagttttaaacctgctacatccaaagagagcaatgcaactctggcagtagcaaaaatgttgtgcctctcctttcctcactcctaatttcccatcccagagaagggtcagaaaccatcttctgcaagatgggaggaagggtagcagccagactgcaaaaagggagaagaaaccagctacctcttgctgttctcagtggcagactccccacctgcaacaggtcaggtctgttactggagagaaaagacaggtaagcaacacatgacaactgcaaaagatgtttatagtggtaacttttacttgggacaggaaaattataagagctgtgtgaaaatatgttattgtgtactgacaaaatttaaggaagcacagcaaaacttcaacctgggaaaatggggcacaacaaagttcactggagacacttactggggttatgattttaatctttgaacggaattcaaaacaatgaagttacaagtataatggtgatatgcttgaggaaaaaattattatttctgaatacttgatgtaaaaaagttcagttttagccaggtgcagtgattcacacctgtagtcccagctactcaggaggctgaggctggaggattgcttgagcctaggagttcaaggctgtagtatgttatgatcatgcctgtgaataaccactgcactccagcctgggcaacatagcaggatcctgtctctaaaaacaaagaaaaagtttaattgaactggaaatccatttgcattatgatttaacatttgcattccacaataggaatagctagctgttagacttaaagaagtataaattaaaggagcaaatgatctgaattccagttgaggacaggaaagcggtttccttcagttgcagaaaatgcatgctgttcatggtgacaaagtattgaaagcagcctgcgtgtgggtaggtgaaccatgtgtctgcactccatggagtgccatgcaacaatgggaagtagaggatgaaaaatacacagaacactttggattgtgctgaaaacaaagcaaaggaataaaatgaggtatagaacacaatgctatctacacaaattaaaagtacatcatacaaagcaaaaagcacattttataagagcacagacaaataaaaaatacacatgaaacagaatagagtggttgccctttgggaggggcagggcagtgataatgagagtgggataagggaacaatcagcctagcagggaccactgatacaactgaagggtataaaaacccactggggttcagaagaaaaagaattattctaaaaagaagttcattttctcattgaaattttgatcacattttatttggaaattttaaactcagcatttaatactttcctgtatacttagcattttagttttcttttaatcatgtaatataaagaaatgatttttttttcactaagttcaacacagatgccctcaccattgcctttagtttacccaacatatggaaaactgtactattttccattactgccctgaaaaggaaaggctggggagccctggcctactttggttgttacacagaaacttgactgacacatctactcgtgtctacccttccatgcgacaggccccgactttatgtttgaaatacaagtagtatgtggctatcttcagcatctgtgttttaaaaggtttgatggttatttttgctgagaacctcctccccctaccctcctagtcattgcccatgtgattaagaggcatgatggcctctcactgggacagtctgaagcaacaggattcacatgaaccttatgtgactacctttcctgcctggcagctgctgacctagccttcctgcagctaaggggaagggccccgctctctgagaacctgtagctgctgcaaagacccacacccctcctctgtggtgcgcacacacacacatgccgtactctgccaggagtggcacaaaacaaattatcctctttgactaggaattttctctttcctttcacactgggtctctggagggagaggaggcggcagtaaatttgcttgtgtatttatcacaggctgtggggctgagtctgtgtgaggaaccattcatctagcagtggtgactgcacattagaatcaccttgggagctttcaaaacatacccgtgcctgcactgaaccccagacaaatggaatcaaaatggctgggggtggagtgtgggcaccagtaagttttaaaagctccccagatgcttctaatatgcagccaaggttgagatccactgctctaagctgtacacttgaaactggagagttagttaattcagcttcttattgaattaacaagacaagaactaactttaaaaaatcgaagtttcaatctttttgtagcataagatcacactgtagagttccagtcagaaattttcagtggattccccttacatccccctctctttttgatccctgaatcttatagggttccttgaggaattgttatacagtgacctcaccacattcttatgagatagaaacagtaaatataaccaatccaagttaacgccagggcagtgtcagggagttaaagactcattcatttccttcttaaaatgtaaccattagtttattccatgcttatctattggctgctaattatgtgcaaggaagtgtcatcacgtgctgcagcagataaaaagatacttaggataccacttgagttttcaagatgcttacagtccagttttctacaactaactaaacccaaggaagtgtgtaatgccttgaaagaagttcaaagttttatacttcaggagtggtagggatgaacctaaaaacaggctggggccagcttggacttcacaggcagtgggagcttatgaaatggtgcagggtggagtggtgacgtgacaaagtggtgctttaggagattattgtagcatctggatgaaaggttaattaaaggtaaagagtgattctagttgaggcaggaaaaccagtttgaagactacctcatagtctaggttggtgtgaattaataagggcctgacaaaacttctctgtgttggaaaaaattggaaccgaagttgttttggggaggaaaggtggccattgatggggaaagcatgagaagactttttggggtaatggtaatattctatatcttgttaggaatttgggttcaaagggtatattcatttgtaaaatgaatcagtaaatgtacacataagatttgtgcactacattatatgtaagttttgtcacagaaacaaaaactgtaaacatggaactctagttaatgattgcatttagagggaagtgcactgttgtctgtaatctaaagtgtatcagaaactaagacggatcaatggatgaagagttatgtgataaagcaagtgtagttaacatgttcatggtagaacctaggtggtgagtatatgcacattcgctatacaattctttcaactttgttatatatttaaaattttttgtactaaactgtaggagagaaaaggatttgaagcagagaatgaatccagtggtattttaaaatttgaattgataaagcttggcataactgaatgtagggaatgaggacccagagaagtgggagttaccatgaacttcagtgattagaataacaggaaaataaaggtattattcttattaatagaaaccattcactgagcccccagttatgtaccaggtattgtggtaggtgaattacatagtttatttttcatcttcacgacaattccatatggaaaataatattatatccattttacaggtgagaaacaaaagcccagactgggactggaacagacttcacactctcccctaggtggttctgattccatttgtccggggttcagtgcaggcattgttttttttttttttttttttttggcattggtatgttttgaaagctccccaggtgattctaatgcatagtcaccactgctagatgaatggttccttacacagactcagcctcatagcctataatagccaggctggttaaatagtaaaagaaatagggaagtcagaaaaggtttgagggggaattgatgtctgattttgagatgaaagaagcatattaaaataattttaaaatctcatatatttcaggtgtgaaacaggatattttgttttgttttttatttttttatttatttatttatttttagacggagtctcgcactgttgcccaggctggagtgcagtggtgcgatcttggctcattgcaagctctgcctcccaggttcaagccattctcctgtctcagcctcccgagtagctgagactacaggcacctgccaccatgcccagctaattttctgtatttttagtagagacggggtttcaacgtgttagccaggatggtctcgatctcctgacctcgtgatctgcccaccttggcctcccaaagtgctgggattttttttttttttttttttttttgagacagagtcttgttctgttgcccaggctagagtgtagtggtgcgttctcggctcattgcaagtttcgcctcccgggttcaagccattctcctgcttcagcctcctgagtagctggtactacaggtgcctgccaccacgtccggctaatttttgtatttttagtagagatggggtttcaccatgttggccaggctggtctcgaactcctgacctcaggcaatctgcttgcctcagcctcccaaagtgctggaattacaggcatgagccaccacgcccggcctgacatgatattttgaaacacatatacatagtgaaatgattactaaagtcgtgcaaattaatacattcatctcttcacatagtcaccccattttttttgttttagagtgagagcacttgaagtctctcagcaaatttccggtatacaacacagtattattaactatggtcaccatgctgtacgttagatctctaaactccttcatcctacagaactgcaactttgtaccctttgaccaacgtc

SEQ ID NO: 96893 - DNA, 12815 bp, Homo sapiens
aagtgaccagatgagagtctcagattcctgttaaatggactcactgttgtgttccctggtggaagtattcctgccctggaaacccagacctctaaactagcagagtttaatgttgtggggataaaaaagccaaaactttggtagatcattagatgtacagtaaaagacactactcccatttgcattccttgatttttaaaacttcgtatctttgctgtgggggaaactacatcataaatgagtcactgattcggagtatgttctgcatctcatcgggtactaaatcagctccacaaagttattttatcaactggcaccataactgaatcttcaaaagcccattctgccactctatcaagccaagcttcaggatgatggcaaacatggtaagaccagtgaattccaaataaaggcattcacaacatcatgctttcgtgagcacattgctgcacttcatttgctgtgaaatcagttccttgtcagaagcaaagctaggaagagtgccactatcatacattaggtattctgtaagtaagtccagagatgaccattttggaggaaccactgtggacagggagggcaatccatccatctccagtgagaacaaagcagtgcttctggcaagatggaaatggtccacgttacttaaactgttgattcccccaaataacagtgccacatcatgggctcaatgtttgtctctgctgttggcaggctgggcaccctgcaggagccatttgcaaatcagactttcaccgagcctaagctcagctccatccctgccaccttgggaacagaattctgggaagtatagttcccaacctcagaagaacggtggtgtcatcaggttgacaagaggcaatccagcacagatgttctccttgcctctcagtgttctgaaaggtcattccgatgtgctgggcctttctgcatcactgcaatgggcactcaggaagccctttctgtacaaaagcacatgttctcaagttcgtgtagatttttattattttagtttcttctcctttgtttactctgttctctctggaattcctaatatcatgcacctctgagttgattctctaattttcttatcttttcccttcccttctctccttctgtcctccacactgccttttttgttctttctgggatatgttattgactttatcttccaaagtatctgcttatttatttgaagatttttaaagctttttatttttaaataattatagattcacaggaaatattatttcaaaattcaaaaaaaggtactgggatgtctcatgcaccgcccccccagactccctcactgttaacatcctgaacgactatagcataatatcgaaaatgaaaaattgaaattggtggtggcggcagcacggtggcaggggcagcaaggcggctgcagcagctgtagaagaggtcagctcagccggccagtttgaggagctgctgcgcctcaaagccaagtccctccttgtggtccacaatgtgcacagatgaacgaagttatggcagagttagctaaagaacaccctcaagtttcatttgtgaagttggaagctgaaggtgttcctgaagtatctgaaaaatatgaaattggctctgttcccacttttctgtttttcaataattctcagaaaattgaccgattagatggtgcacacatcccagagttgaccaaaaaagctcagcgacatctagtggctccttcccacccagcactgatgaacatcttaaagaccaaaaaagctcagcgacatgcatctagtggctccttcccacccagcactgacgaacatcttaaagaagatctcaaccttcgcttacagaaactgactcatgctgccccctgcatgctgtttatgaaaggaactcctcaagaaccactctgtggtttcagcaagcagatggtggaaattgttcacaaacataatatttagtttagcagttttgatgtctttagatcaagaggttcgacaggggctcaaagcctattccaattggcctacctatcctcagctctacgtttctggagagctcataggaggacttgatataattaaggagatacacgcatctgaagaactagatataatttgtcccaaagctcccaaattagaggaaaggctcaaagtgctgacaaatgaagcttctatgatgctctttatgaaaggaaacaaacaggaagcaaaatgtggattcagcaaacaaattctggaaatactaaatagtactggtggtgaatatgaaacattcgatatattggaggatgaaggagatcggcaaggattaaaagcttactcaaattggccaacataccctcagctgtatgtgaaaggggagctggtgggaggattggatattgtgaaagagctgaaagaaaatggtgaattgctgcctatactgagaggagaaaattaataaatcttaaacttggtgcccaactattgcaagaaatacttaattacattgggagcagttcatgatttagtcctcagaaatgggctaggaatagaaaaatcctgcttactcagttacatgttttttgtatttcacaatgtcgtgctaaataaaagtatgttacatgttttcccactaaaaatagaatgcaataaacatcttcaaattattaacaataactgtataaaaaagtgtatctttacagcaatattaaacatacagctactagaaaaaaactgaaattggtacaatctacagagctcattcagatttcacaagttacacatgcccgtgtgtgtttgtgtgtgtgtttggcgtaactttttgcaattttatcacttgtgttgtcttggatagccaccatcacaatcaagatacacaacagtaccacagccgtaagagtcccgcatgttaccactttatgaacatacctattccctcttcccccattcctaatccctcacaaccagtaatctgttctccatttcaaaaatgatgtttcatcaatgttgcatagatgaaatcacgcaacatgcttaagattggctttttttcactcagcataatttcttctaagctatgtgtgtgttgtttttctgtttttactgttagtagtatttccacagtataaatgtactacaatttgtttaatcattcactcattacagaacatttgggttgtttccagtttggaactattataaataaaactgctatgaacatttgcatatctatttatttatcttagtctctactctattatttatttctaaaagttctttcttgttctctcattgtttcttttctatagcaccttcttcttgttttataggtttaatatctttccttatctttgcagattttaattttaaaacaaatgttttcttttttttttttttttttggagacaggatctcgctctgctgcctaggctggagtgcagtggcttgattgcggctcactgcaactccgcctcctgggttcaagtgatcctcctacctcagcctccctatcagctgggactacagatgcatgccaccacacctagctaatttttgtattttttagtagagatggggtttcaccaggttggccaggctggtcttgaactcctgacctcaggtgatcacccatcttggcctcccaaagtgctgggattacaggcgtgagccaccgcacccggcttttaaaacaaatgttttcttctattcgttgcattgtctctgttacctatgagttcctctgcttctgattaagagtctgttcttcatgtgaacactttcctcaaatatctgatgaatcttgcttatgcatttatatttaagagtgaggcactatagagtttattcctcaccagtgaggctagcttcactggtgaggaaattgggcagtttagtagtcagggtaaattaggctatgttgtgttaacaaacaacccccaaatctcagtggcttagcataataagggtttatttctcactaatgtcacagtccaacgtggcctccacagaggtggaagaaagagcatgaatgattgtttaaagcctgagacaccagctcattcactatggaatctctcagagcagaaagccccagtagaaattattaatatggataaatcaaaaaatcacagcaaacacatgtcatcattggaagctatggaaataactatgagaagacataacccaaaaacatttaaagtatttatgtctgtggagctgtgaatactggcagggaagattggggcctttctgtactgatagatatttcttaaatccttgattatatgttaattttattaaaggaatacataaatttgaaattaaaaacaaggataagatgagcatccacctgagttgcccatgtctgaggaaatgcactgttgaagatgtcatccactgtatcaggaaatcaatatttcctatccaaatcaccaaatgctaaatccctcctaccgagtcctgtattagtctgttctcacactgctgtaaaaaactgcccaacactgggtaattggaaaggaaagaggtttatttggctcacagttctgcatggaggcctcaggaaacttacagttatggcacaaggagaagcaaatatgtccttcttcacatggcatcaggagagaaaagtgccagcagaagaaatgccagacatgtacaaaaccaaagatctcatgagactcactcactatcataagaacagcacgggggaactgcccccacgatctaatcacctcccatgaggtctctcccccaacacgtggggattccaattccaattccaattcaagatgagatttgggtggggtcacagagccagaccatatcaagtcctaaggaaatttgtttttgaagaatgggcatgttgttttttgtcacatgatgaaaactttgttccacagtgtattttctttttgccttgttaacaaactgacatgttaaatgagcattcagtcatgagaaacagcttctctcaggtgcctggtaacatttcctgcctcagcttttctctatgctttcactcatgtgttccttagttgttttaccttatacggttaaattgcacagcctgttgcactatttgtctttaggaattggctatgtgttctggatgttaatcttttatctgttacatatgatgcaaatattttctccaagtttattgtcttttaactttaaggcacaagaaagtagatgaaataaactgcctaagatcacagagctactcagggacagagccaggactcgatcttgtcaaatgctctttgatttatactccattttcctactgcaaagtattcacatataaattatcttattaaaaaacccacaggatttgcattctatcataaagacacatgcacttgtctgtttactgcagcactattcataacagcaaagacctggaatcaacctaatgcccatcaacagtagactggataaagaaaatgtagtatatatataccatggaatactatgcagccataaaaaagaatgagacaatgtcctttacaggaacatggatggaactggaggccattatccttagaaaactaacacagcaacaggaaaccaaatattgtatgttcttacttacaagtgggagctaaatgatgagaacacatggactgaaagaggggaacaacagacattggagcctacttgagggaggaaaatgggagatgggagaggctcagggaaaaaaaaaaactgtcgggcattatgcttagtacctgggtgacaaaatatctgtacaccaaacccccgagtcacgagttaacctgtgtaacaaacctgcacatgtaccctgaacttttaaaataaaagttaaaacattaaacacacacgcacagatttggagtcagacaatctaggtttattccagttccaacacttactgctctgtgatcttgagcaagatgatttacctctaatgaaacttcataggctcctcttcaaatgggaataatgataatagcaattttctctagttgttatgaaaaaaaacaccaggtatgagaaataacatatacattataaagtgttgaacaaatggttttttatttwaaaaaaaaactttattaaagagatagtttggggcattttttctttacattattttaaaatgacaatatccttctatgttagaaatrcaacaatkttggaaatcatttctaaatatmtttagcaccccactattcttaatgtcatgttacatgaaatttacataatctagtttagaatcagcattactgggaaaaagacaatgttcctatataaattctactacatataatatatatatgctactgtttatgagaagggtcaataggataaagaaactttcaaaaaattatatacacatacacaaatacacaagaacattttatattcattattcaataatccttagaatgatgacaatgcttatatgtaaaaaataatttcactctagagcagattacaagtaaatttatctgccacatacgagaatctatttacttatgttatagcaacatctcttttctaaaataaaaacatggcaaatactcagcttgatcatctgcactatacaacagaatttactcggaatgaccttttgatcatttgcaaaaaattcaatttaatgttaatggatgaagatattatatcactgttggcaatatttataaaaatgtgcttatggctctggaagcaattcctaaaaagaggtagtaaatgttctgagacttcagaattgttagaaaaagttaagcttcagttggcgtttactgcatataagtatgttgacatatgttttcctgagcaaatggcttattctagatatatacgttggtatattcattgaaaattagatttattatgttataaaatgtgactaaaagcccatttaaagggcacatatctctcatcttttggttctaacgtgaagccaaatgaggacaggcgcatgattcagtttatacaataagaaaattgccccaaagtggatgaagcacacacatcagcagctcagccccactccgtacaatccaagtgcattcaacaagtgatatggtttggctgtgtccccacccaaatctcatcttgaattgtaactcccatgattcccacatgtctgtgggaggaacccggtgggaggtgatttaattatgggggtgggtctttcctgtgctgttctcctaatagtgaatgagtctcatgagatctgatggttttaaaaatgggggtttctctgcagaagctctctttttgcctcctgccatccacatacgatgtgacttgctcctctttgtcttccactatgattgtgaggcctcctcagccatgtggaattgtaagttcaataaacctctttgttttgtaaattgcccagtcttgggtatgtcttcatcagcagcatgaaaatggactaatacaacaagtaaatcactgaacatttaatcccagcagttctcttttttcaaacttctcccgttgattttgtgtcagccctgcctgtgctatgctttgttggggtaagcaagccctgcataaatgttctttccttagagtgaaaaaaatatgctataataagaaaggagagatggagaagacaaaataggaatacaaaaaaaggcttcgtgtagagttgacctgtgtttcactcactggataacatcacagcatatagatgttggtcatgaagcaaatatgctttagttgcatacagcttagaaacctacattatttaataccttcatcagaggagtattaaactctagcttgaatgtcaacacaacaaaagttaggacatgttgtataactgaagtttttcccaatgtactaagatctaatcttgagcctgtctgcaagcataaagctaaataacgcatcccattaatcaataaaatgctcactggtgtctttatcaaaagttgtattttccttcattgattgagtcacatgaagtgaaacttgttctgcttaactaagatggtgctgctgtaccttttaaagaaaacgaattaaaggttttatgttcatgaaagcacaaatgtgacaaaataaactatgctgacaccgtcaacatcatgacatcatagatacgcccaaaggatcacagggataagtatttttgaagcccaaaggcctacatataaatttcctgctaaatatctattctacttactagtccaaaaacacaatgtcagattttctaagagaaaatgataaagaatatactttgatatcctctctcctttaagattttaaaataacaacgtgtttatggggtagtttctgcccaggcacatagattcctgtttacggccaagtttctagtatggtggtaataagcaagctttaactaccatacaaacagaagaaatcattccatcacaaaatctcgatttcaaactttaaatcaaaaccagagtattgaaattgacaatatttacaattcatcatttttcaaatagtttctaacacaacaggggtgccaatttttctctattcatttttgctttaaggaatataaggaatatatattttcccaaagaaaagtttttttcagcgtttttcttggtcactcttccatgcaattattttaggtggccaaaaagtgctaaaatttttaatttctcttcttccaagtgagtatctttctaagtatcactcttatcacttaagaaggaaaacttgactgggtgcagtggctcacacctgtaactccaacactttgggagaccaaggtgggagaaccacttgaagccaggagtacaagaccaacctgggcaacacagcgagacctctctctctcaaaaaaacaaaacaaaacaaaacaaaagaacaccgatgctttttcttaaaaaaatgacaacaacaacaacaaaacaactatatgctcaagtacctacagtcaaataaacagataaaattaactaaattattagatcccactttatctgtgccatggctatggtatcaccatattgcccctgatctcccactacaggaagaatactttcctcatatccattttctcttgccaaaaagaaaaaacacctaactaggtttgagataaattttattttcaacttttattagcctttaagctaatttctaatttaaaatgaatcatccactggagtactttacctttacatctggaagctatatgcattaggcccactgaaaaaaacaacagccattggtgagtctacattttgtaagaatgagatacgatcaaagcaacttacacttcttcgctggaaattagtgccctcctgtaaagacagcagtggattcaaaatcaagaaccaggcattaaaagaccaacaagccgcagctgtttgaattttcccttcctctccttgtgttctttacagctctatccactattgtgttgctgctcaaaaagctacacaaaggctgggcgcagtggctcacacctgtaatcctagcacttcgggaggccaaggtgggcggatcacgaggtcaagagatcgagaccatcctggccaacatggtgaaaccccatctctactaaaaatataaaaattagctgggcgtggtggcacatgcctgtagtcccagctactcgggaggctgaggcaggagaatcacttgaacccgggaggcagaggttgcagtgagccaagattgtgccactgcactccagcctggtgacagagtgagactctgtctcaaaaaacaaacaaacaaaaaacaaaaaaacaaaaatcaaaaaaacaaagctacacaaaaactactcataaactactgtttgttattatccagtgacctctgtgtttgattctattgcacaatccctatttttccttctttttttttttttttagagttggggtcttgctctatcgcccaagctggagggcagtggcatgagcatggctcactgtaccctcaaacacctgggctcaagtgatcctccccgcccagcctccatagtagctgggactataggcatgtgccaacatggacagctcacaatccctatttttaaacttcacctctggctcttaaatgtcatcatcctgatctccaatcacaaccttctagctctctagttttcctcgtccatctaccttttatctccactgagatcatcttctcctctttggtcctttcatttctgccctctctagtctagatctcactgtgagtcactttgatcactctctgaaatggcaggctctattattaccccattttcctttgttttccactattagccatcctgcaaattcctataccaaaatcatctttattcacattattaagtgaagctggaaaaaaaaaaagcactccgctgaagatctgatgtcaccccaaatgcatggctccagcctcagttcagctttccacactgcttgcagaaattccttcatttatcttgagtttctcctctcactcccatggtagcttttccattcccactgcctcttctcacatttcagtagatgagaatagaagccataggaagcaaacttcctcaacctccagccaaccagagaaactccatttacatcctgcttcctatgacagagaaggatgggccctaccccctatctaaatctttccaaagcaccctggactctggctcatgcttcctgcttctgggttgctctctaaccccgcatgtacgtccactttactgccctaaggaatgccctcctgcatcctggctttcctccagctgccatgcattctcctgcctttcatccagattcgttcaagaagcaggctgcatttcatgaatgccttctttaggttgccttctctgcagccaacatgctgcaaaatgacccctatcaccaaggcagtgagagtgctctcaagaaggccaccacactcctcactgccataccgaaaagtatttctccaagacttttctttcttgactcttcactaagactttccctctttggcttctgtggcaacattctcccctgcttaggccttctgtgataaagtgctgatgctgaagatggaacagcctcccagagcaggaaaggggatcttttcaggtagctgcaatggtttgaaaacagtgttgtcaagttactttttctcttgctgacttctcagtagttactcctttcccgagagcctctatcagtttgcctttctacctagttcagactctcttaaagtggttggactaatgtcactggtggtttgggactggtgtcaggtggtttccattgttcctgtttgttgtaatcaaaatgatcctcttgagcccttttctccctcatgttccttgtatatgtgaaacagcactgctgtccctactgttactcaagccagacatgcagacatcagtccaaattccctcacgtttgtcacccagtccttctgtcttttaaattgttcaccgtagcatccagtagactattaaaatagcggagtggaagttgggttaagagggagatgtagagagatagttttctcctcaaggaaaaccaggggaaatggccacaaagatccttgagggaaaaaggcctgatttagagaaaatcaggtctttttctgatttttctgattactgtacacagtcagtaaagaaacagaagtaaacaaaaaacaaagttttaaagaagggttaattaacagcatcaaatacagtcctgtgtgcaaggaaagtaaaggagaaaaaatgtaactgcaattataaaaaaaaaaatcaatgaatttattttgagagatcagctgccgcagtatgatgggaactggatgtcagaatatagaaatcaaaaggaaaatgattatgaggaaatggtggagactgccataaagaactcacccatgggggaaaacaacaacaataacaagagaaagagacagcgagttagagcccagcaagggtagctgggtgaaggtatagctgttataatattcaccttgttaaactcttaatatatctaacaacttgtctatagatttatttttgttttccattaaaatagtcataaatcaccctctttttccaatataggagagtccaaaggatattcagaagtaaaggggaaatgctaatattgtccagaaaggtagctgaaaagtgcacatttatctatctcctttccccaaaatgcacggaaatgaaccaaaagtaaagagaaaaccatctgtgttgaaactaggaaatgaaaataatctcatactgaagaccctgaaaattacctgcaaactataagggaatctgggccaagcaaaagaactgcaagttggcagcatttatctattctgagtagaatgctaatttcaaaactaagtgagaaggcttagaagcaccatgcacacttgaacagaagactgaaggccctcaaaaaaatgaaaagcacctagcagaggaacatgtgtacatcaagagtatcagaaccgagtagaaagtgggattgcgagattaagtcatctttatcctttctgacccagagttccagtcaggaacactccccaggattattgggcctgcttctgggccatggtggtggcgaacaaggccagtgtttaagaggatatgctctagttttagggagaaagtatttggagacagcatgtgagactatccacagtctgttattacccatgcagtttcgaagggtaacgaaataataaactgccaacactaatctctccagcacaagttctaaggatactaatgtagctcctaagtaactaaagagaaagataaatccacattgttcctagatagcatttattggatagaatttccttcctcttcctctcttccttcttcctttaagaactaggtattaaacacatggtatgtaccaggcattgtgctagacactgggaatcctcacacaaaacagggcctag

SEQ ID NO: 96894 - DNA, 13352 bp, Homo sapiens
cgtgtgcccttgaccacctgtaaaatggtgttgctaatacctcatgttgtatcagaaagagttgtgacactgatagaaaaacgactgtgaaattgagttttgacaagtatgaagtactatttgaatgcattgtacagtattttcacgtgttagattgaggcaactgtaggtcctaaccttgaacctgccctggcaaacatttgctcagtttatgctgtgtatccccgctagcacggagaggataaggcccctctctcacatggcaatagcagttttagggccacaaaacaggcagatcatacgtgaggcctgctggctttgacaaagttccttcagtgctgtgctatgtaaacagatcagcaggcacaaaagccaggagtcctgggaccatgccggtaaacagattttctaagtctagagctgcagatggtggtgtcttatccctgttggtgaacctggcaggattccaacccccagctcaataatactgtaaatccctactggatactgcatgtaaattataattacttgtaaactgtgtttactggctcagtatgccatatttatatggactctagggcttaatttttttttctcttgataagtgtgacaaaagcagtacttgaacagaagagagctgtgtgttccatgtgagaactttagtttagattccataatgtttttgttgcatcgatgtggtagcaactgaagacggggcctggtagtcgatgggttttattttgcccacctctctgccatagacatttgcaatttatcctgacttggggccgctcctcctctataccaaaattcatcttttattgtacttaccatgttatagtgtctgtgttgatttgctactccactcgtgtgctgtgtaagcatttaagaaaaacgtttaatgttttctttttctttttcttttcttttttttttttttttttttttgagatggagtctcactcttgttgcccaggctggagtgcaatggctcaatcttggctcactgcaacctctggctcccaggttcaagcgattctcctgcctcggcctcctgagtagctgggattacaggcatgcaccaccacacccagctactttttgtatttttggtagagacggggtttcaccatgttagccaggctggtctcgaactcctgacctcaggtgatcctcccacctcagcctcacaaattgttgggattactggcgtgagccaccgtgcctggccatttttcttttctttttttttttttgagatggagtcttgctctgtcacctgggctagagtgatccccccagaagtgggaccagaaatcctgaagcagtagccgcaagccaatctacatggaaaggcaggaaaacaacgcttgagtgcctgggtacaagggaaccgaggcaggtttggagaaaaagacctggcacgtggtgtggaggctccttctggggacttggcactggattttatgtgggaatgaaggtgactgggctggtcagggcatgtgttatccctctggaatttagaggcaggtcttggcaaatacttgctgacacttcctacacctgctgactttcacgtacccctgctgatttcaatggaagggacatgtgtatgttctgatcttggggagcatcattccatgcccctactagaaaagatgtctcaaacactttctgtgacatgactggttcacatcttctgcttgctttaaattttctttgccttattaagttgtgagagttcttttcatattttcaatacaaaattctttgataaaagcattgcaaatattttctcccagatggtagcttgcctttcattatttcatgataacacagaagaacaaaggttttacattcccaatgcatcaatttttttctttcacagtttttgcattttatattctaagaatcctttgacaagtccaaagttgcaaagacttgctcctatatttccttactgaagttttgtagttttaagcttcaaatttaggttggtaggccaggcacagcggcttacgcctgtaatcccagcactttgggaggctgaggcgggcggatcacaaggtcaggagttcgagaccatcctggctaacacagtgaaaccccatctctactaaaaatacaaaaatttagccgggcgtggtggtgggcgcctgtagtcccagctgctcgggaggctgaggcaggagaatagtgtgaacctgggaggcggagcttgcagtgagccgagattgccccaccgcactccaacctgggcaacagagcaagactctgtctcaaaaaaaaaaaaaaagtttaggttggtaggccattttactttatttttgcatagggtttgatattcattggtttgatgttaatttcttttttctatttggctatctagttgacccattggcatgtgttaaaaagattttcctttccgtattgaattgttttggcactttttttttttttttgagatggagtcttgctctgtcatccagactggagtgcagtggtgcgatcttgactcactgcaacctctgcctcccaggttcaagcaattcttctgcttcagcctccagagtagctgggtttacaggtgcgtaccaccacacccaactaatttttgtatttttagtaaagacggtttcaccatgttggccgggctggtctcaaactcctgacctcaagtgatccacccaccttggcctctcaaagtgctaggattacaggcatgagccactgtacccggcctgttttggcacattcataaaaaatgaatttccacatatatttgagtgtatttctgaatcctattttgctccatttatctacatgtctttgcccaaacaagactttcttattgtggccaggtcctgaaataaggtagtgttaggcatctgactttgatcttctgctttaaaaattgctttgattattttaggttctttgtattgccataaaaatttagaaccaatttgttagtttctacaaaaggactactagaatttgtttgggattgagttgaatcaagatcagtaggggagaacttccatcttaataacactgagactttcaacgtggacaggatatatttgccctttggttaggtcttctttaatgtctcctaacaatgttttgtagttttcagtgaagaagtcgtggatattttttgttatatttattactagcacaggggtaaaaggagctttcctttttccctctgaaggttgatgaaaggcgtctgctaaacttgacaacagacagattaacaggagaaaaggcatacagatttattaaggtgcaagtgctgagagtcacacaaggtatgaaaattcaaagaagggccaggtggttgacgattaaatgcctgcttcataggggagaggaaggtgagggatgtaaggaattttagaggaaaagtaaattatatttagggaagatgactgggcctaaacaagagacaatagcctgggacaaagtccctctgaactctgggagagatggcaacaagttatgggaaggtgaggggaggaactgcaccatgaacaaagtttgccttatgcagataaagtccctcagaatagccctcagaagagtacatgaaaagtctgtctagggggttgtggtgacaacctttattttatctttggtgattaatctttcctggttaatgagagttcagacagaatattaaaggcaattgtttttctcggagagtaacttccctcagtcagatatgggaacttcagagagagcccctccctgcacttgtgggaagaaacaagggaaggttagagagaccttggtttggaggcagagtctaagggctttcatttaattcaaagcattcagcgtgccaaagtgccatactctagagtatcgttttctgagcctcaaaactaggtattttatagtttatagcaccactgtaaatgaaaaatattaaatataaggatacaattgatttttgttagttattgtggtatactacaaacttgtaaattaatttattagttctagtagctagtttttagattccctgggatttctcttttattgtgataagaacactttacatgaggtcttaacaaacctctcaacaatttttaagcgtgcaatacattattgtgaacagtgttgtaagcaggtatttagagctgattcatcttgattgcctgaaactttaagcctgttgatcattaattcccatttccccctcccacaacgccctgggatgtaaccatcattacgctctttgattctatgaatttgactgttttagatgcctcatataaatggaatcatgcattatttctgtgactggcttatttcacttagcatgtcctcaaggtgcatctacgttgtcacatattacagaatttctgtcttttaaaaggctgactagtacttcattgtacgtatataccacattttctttatccacttctctgtcaatgaagatttacatttttcccatactttggctattgtgaatggtgctgcgatgaatatagaggtgttaatgtctcttcaagattttgatttcaattcttttggataaatacccagaagtggcattgctggatcatataattccttgggattttttttaatgtaaatagtcatattatctgcaaatagagaaacatttttacatcttgttttccattctttgtcttttatttcctttctttgccttattgcaatgactaagattttcagtacaatgttgaacagatgtggtaaaagcagacatctttcattttttttctcaatctcagagaaaaaacaattcagtgttttatttactctaggtttctgcagattccttttataagtttgagaagttccctactgtttctagtttgtttttatcacacatgaatgtataattttgtcaaatgctttctctgtatctattaataatatgtttattctattaatatggtgaattgcattgctttttaaaaatatttcttatagtaaaatgtgcataacataagatttaccattttaagtgcttaagtgtaattaagttagtggcattaagtacattcccattgttatgcaaccatcgtcactatccttctccagaacattttcatcatcccataatgaaactgtctctcctttaaacattaattttctacccctttttcttctcagcacctggtaaccattattctattttctgactctatgaatttgcctattgaatcatacaatatttgtccttttgtgtctggcttatttcacttggcataatgtcttcaaggttcatccatgttgtagcatgtatcagaattttattcttttttaaggctgataatatttcattctatgtatagactacattttgttgatccattcatctgttgatggacacttgggttgtttttacttttctatcttgtgaataatgctttgtatgcaaatatctgttcaagtctctgctagtcaattatttgcggtatatactctgctatggtttaaaggtcttctccaaaactcatgttgaaatttaattgccatgtcactttactgtttgagtaacgttggtgtgaagcttcattgatgccttttgctttatgtcctgcttaagtctgtgtgaaggatttgtgtttttctgccttacaaacataatttaatttattggacaggaattcatggatagtaatgctgtctgcccctttacttcagaaaacacagtgactctagtggatttgaataagtgaaactgctctgaaatgctatggaaagccgactccccaaagagtggtttcttctagaagtttgaatttgtagctacagtttccaggaagaaaaatagtagttggataacttggtaaaataataacatcattttcattttcttcccttttcttaactttggtttcctaaaggaagaaaataagtacatagcacataatctatttaaatagatttaaagagagttgcaaaataaatcacccggtctagctcttaagtgaataaaacagattttgtttgtgaataaaatctgttgattgccaacactaccactacagtatcccaccragggcttcatgtgtcagctcagtgcgatctcctttaactctgcagcaccgctgcagctgccgacrtagcctcggtaggtggctattagagctctaccatatacagtggtgcatcttcagatttatgcatcaaactaaagacatgtccaagtccattttaatttcctcagtgtttttatgggaagttttatggacctcccccagttgtctttttatttggggttatgacgatcacgtttgataattacagtgataatgtttccacgtgatgcttttgtttgaacctgataaaatttagtgaaactttgtaatgatctatgtgcacttttacttgtaaaatggaatttctgtatgtttatacttgtaaatatattgttgttagtgctcctgttgctcatggtgtcctgcctcgcatttgtgattctgttaatgacttgtatcttaactaagttcttagtggtgttgtaatagggagatggggcaggtggggkgttatttgtaccactgaatcttcattaatttggttctttactgttttgaggggagaaagaatgtgaaatggtttgtgtattattgaattttaagcaatattttagaagctgtgtgactgctttaataactttttcccagtgttatttgaatcatactaccagttttactamagccgaatgacaattgtgtgaaagttactgccttcataagatcaagtcaccactgttacacagctgacatatattgtattacctttgcagctagtaaactataaagtttagatactgaatctcattacagggttatttatataatgtgaygttattcagtactgacagactacatgaagtagttttaaaatctagtgctatttttattttaaaggttagcaatgaggaggaaatgtratctggctgtgtttgtcttctgtacaaagcctgaaatgcttatggttttttggttaacagccacagagggcaaagtttaagactttcttgtaaggactaactgttcttttcaagccactgtttgtttttctaaaagcaggatttgcttccrtagcaggcaagttccttgacgtggaatagtgcaacctgtatatgggctattataataggaaagacatctgtatttgcacagtttaaatcattcttaaattttaaacatgtgaaatgtccccaaaaatctttaattttttggtaatttgtactctttttgtgcacatgttgatttcttaatggtaaatccttcatttaaaggtagtgttttctgttgagaatattttcatggaataaaacaatcttttcgtggcaaaaaaaaaaaaaaaagaaatttaattgccatgtgatgtattgaacggtgagacctttaaggtgtgattaggtcatgagggttctgctctcatgagtggattaatgccattactgtgggagtgggttagtatgtcagaaggtcaatctcctttttctctctgtttcacttgtgtggttccttgacatgctatgcctttgccatgatatgatgcagcaagaagacccttaccacatgtggcccctcaatcttggattcccaggctccagaaccatgagccaaataaatatattttctttataaattactcagtttatggtattctatcatagcaacaaaaatggactaagacatacccagaagtggaattgtgggattgtatggtaattatgcctatttggggtcccttaagattccatatgcattttagaatacattttacatatctgcaaacacattgttgggaccttgatagaattacattaaatctgcaaatcaccttgggtagtattaatatctcaataatactaagtcttttaatccgtgaacatgtgaagtcttcccatttatttatttgtcttctgtaatttatttcagtaatgttttgtagttttcactaagtattatgcctcattggataaactcattcctaaatttggttatttttgatgttattataaattgaatggtttttctcaatttcctttttggaattttcattgctagtatttatttatctttaatctttattttttccttctttctgctagttttggatttagtttgttctttttctagtttcttatggtgtaaatctaggctgtttattcaaaatctttcttttttcttaatgtgtttgcagctgcaaatttccatcttagcactgctttcagatcctcccataagttttggtttgtcgtgttttcatttgtgtcaagatattttaaattttttgtgatttttcttgacccattggttatttaaaagtgtgttaatttctacatacttgtgaattgtccaggtttttgctgttaacttctagtttcatttcattgtgatgagaaatgatattttgtatttcaatttttaaatctattaagatgtcctatggcttaacatatggaaaatgctccatgtgcacttaaaaaatacatattctgttgttgttaagtgcagtgtactgtatgtgtctgctgggtccagtgggtctatagtgttttttaagtcctatattcccctatgatcttctacctggttctctatccactgaagaaagtggaggtattgaagttttctactattattgtagggccatttattcttcaattctgtcaatgtttgcttcatatattttggagctctaatatttagtgcatatgtttataattgtcatatcttcttggtaaattgagacttttagcattatattatgtctgtctttgtctcttttaacagtttttgacttaaagtctattttgtcaattagtatagccatttctgctctctttttattactattggcatggaatatctttttaatccttccactttcaccctactcatatccttagatctaaagtgagactcttttaaacagtatatagttgatcctggttttatacccactctgccaacttatgatttttgatatgttttcaatccaattacatataaattgctgaaaagaaagcaattagttttgccattttgttgttttctctgtcccttacaggtttttttctccctcatttccttgattactgccttccttcatgtttaaagttgttgtaatggcatattttgattctcacttctgcttgcgtatattttcttggtgtttactatgtgcactacatataacatcctagagttatgatgatctatcttaattgataccaacttaacttcaattgcatataaaaactctacttccttaaagcttttctccccttatgttattgatgtcacaaattatacggtttaatattatatattcattaacatagattcataattattttatgcaattgtctcttaaatcctgtagaaaatcaaaagtggagttataaaccaaaattacattaatactgtttttatatttgttcatatatttacctttactggagaactttatattttcatctgtcttccagttactatctagcattatttcatttcaaactggaggacttcctttaacatttcttgtagggcaagtgtagtaataataaattccctcagcttttgtttttatgggaatgtcttaatttctccctcatttttgaagaaacattttaccaggtatagaactctcagttgacagttttttttaaaattttcagcactttaaatatatcaccccactgcctctagtctccaaggttcttgctgaaataatactcggatagtcttatcgcagatctcttgtatatagtcacttttctcttgatgccttccaagattctctttatcttgcacttttgtcagctttgattatgtgtcttcgtatgggtctcttcaggtttgtcctacttggagaccattgagcttggatttgtatatccatgtctttcctcatatttggcaggttttcagctattatttattcaaatagtctctctcctcatttttctcacctccttctgggactcccattatgcatatattggtcagtgtgatggcatctcataagtccctaagcctctgttcactttattttttcttctgtatgcttctcaaattcaataatttcaaatgagctgttttcaaatttgcttattctttcttctacttatttgagtttgctgttgatctcctctaataaaattttcaaattagttattgtacttttcagctcaatatttttttttataatttctttgttgatattctcattttgttcatatgttttcttgactttcctttgttctttgttcatgtttttctacagttctgcgagtatatttgacatttgtggttttttgttgttgttgttttgagacagactctcactctgttgcccaggctgaagcgcagtcatgtgatcttggctcactgcaacctctgcctcctgggttccagtgattctcatgcctcagccttctgagtagctgggattacaggtgtgcagcaccatgctctgctaatttttttgtatttttagtagagatggggtttcactatgttggccaggctagtgtcaactcctggcctcaagtgatctgactgccttggcctcccaaagtgctgggattataggcatgagccatcgcacctggctgacagttgttttaaagtctagtaagcctgatgcctgtgtttcttccagaactgtttctggagatgtgttttgttcatttcagtgggccatctttccctggttctttgcatgccttatgatctttttttgaaaattgggtatttaaaaaaaatatggccactctcccagtctttgcagactggcatgtaagacctcactaatttgtaagtccatgaggtcttcactaatctgagattagtccaggtcttctcaggtcttttctaggcatgcttccttcctgtgaatgtgtgtgtgctccctgtccccatcaaaggtgattttaaaggtcttcatttcctaaacagtctcactgcagctttttcttagggccttagatattctattgtattcctctgtaatctcctgccctcagaagtccacagggcagcaatccctgtgtagttttcatgtgctgcattgctcaccactgccttctgtggcttccagcctgaaatcaaaactatttgctgtctccagtctgatacctgagttggacattacagacaccatttctgtaggcagcccacagacaggccaggatgttgcaacaagtttcactctgctccttctgtccaagtgttcacatttccatgtttctttttatgtcacatcattttgtaaatattatgtcatatggatcctggatccatatgacagcttcttctcagggccttagatattctattgtatggttggatccaatattatgtcatatggatcctggatatttactgtatttactatattgtggcattggatggaagttatgtttttgtggatcatgttacaatcatctggaaaatgccatttttgttttagcaagaaatcaatctggttaggttcagactacaagctgtcttgatcttctgtgggtggtggttaaaatcccagtacacttcgcaaagcctttgctatgctggtttgagtctgtctcacttatgaatcagacttatctaggttcatacacagaattagagcttctttctcttggctctgggagtctcttcttgctttcactctttagcccccagagggcccttttccttttcaaagtgtttttgttttcctcaacttctatttggctggccactccatggtcaccgcagcaccaccccacaataggggtgtgcctctgaggcagaagtattaggttggtgcaaaagtaactgcagttttgccttacttctaataccatgctccggagttagattccagcaattgtgtttatttctcgtaatctgggaaacttatccttgtgcagttgcttctctgtattttgacaccctttaacaatccacctgcttttgattaatttcagcatgctcaagtagttctttttcgtatttcttctagagattttagttgtaatttgtggaggaatgggcagtagttggcttgtgctgccattgtgggatgagaactctgcctagatttttatcttcattttgacatttactgggagtttgactctggagaagctagtttaatctccatgcctcgggatgcctacttgaaaatgggtagtagcaacagacctacctcatttttaatttttggcattgtttttggtggataaaatatgataatgggcattaagcactagtaactgctcaattgaaacgaatgcttatttctattcttatattttctataaaactgaacatcttggattacaattactggaataaaaaatttagaactaaaaagttaagagatttggtgagttagctaactttgaccttaaaggaaaggtcaaaaggaagactaagaaaagcaaaatatcccatccttttctgtagcccttggaattacaccctcagtccttgtcaagtgatagctatgaaatcaaaacagggtgttacaaggacaatcaaggcagcttgcagggatgcctttcataaagtaccacattaaacaagaatgggactctaacaaataagaaaacaattactcatacagagcattgctttccaatgaaatgacccagttttcccttcatgcctctttattaaattgtgcaaaaaaacccaactaagattcttatttgggttcttattcttattcttgattcttatttgttttctagtaatactattccttccattttgctcccttgctacatggctgaaaaagaacatgcaacccactgaagacctcaagtcagtgatctgtaggctgtcagcatttggcccaattcagtcagccactgtttgtggacgtcaaagtgctatagtggcattcaaagacatgacttcagcctgtaatgctgtgagtgcttttcaaagtaggaccccaggcaccatgttccagtgttcctggcaacaacgattcatgtcaaaagacgtaagactctctactaccaaacacctgtgtgaattcttaagcttgttttacaaaactttttattcatcagagctgtagtgaaatatcatcattgtaattgatattctagcactacaaaaggcacaatgaagcttatttagttccagtactggaaatcagaggtaacagcacatccttccttggacatgctttactctgctgtagtggtcatcacagttttgattttctggataagaagttcaccacagcatttgtgcattcatctgatagccatcttccctgaaggacattgcattcttcagcattaacagcgtgtagtttttctctctctcttttcctga

SEQ ID NO: 96895 - DNA, 20236 bp, Homo sapiens
aaacaatatgaaacacacagcatcatttatgatgtatcttaccaaaaatatttaacctgaatctatttttttcctttttttaattttttgttataataaagacaaggtctcgctgtgttgcccaggctagtcttgaactcctggcctcaagtgatcctcccgccgtggcctcccaaagtgctgggattacaggcatgagccaccatatccagcctaatctgaatctaaacaagccttcagacttatcttccagttcctaggaaatacagcaatacaatatagaggaacatagtaaggttttcatgaggaaatcttaacacaaacacagaatgtgggatgttctcaaagacaaatggcctggtcttttcaaaaagtcagtgtctaaaaagaaagggtgagccgggcacggtggctcacgcctgttatcccagcactttgggtggccgaggcgggcggatcacctgaggttggggagttccagaccagcctgactaacatggagaaacctcgtctctactaaaaatacaaaattagctgggcatggtggcacatgcctgtaatcccagctactcaggaggctgaggcaggagactcgcttgaacctgggaggcaaaggttgcggtgagccaagatcacgccattgcactccagcctgggcaacaagagcaaaactccatctcaaaaaaaaaaaaaaaaaaaaagtgagcgaaccattccaaaacatgagagatttctgagacataggtaaacagtgcacaaactttgactggactctggttccaaaataacaaaaagacatttggggagcaagttaaggaagcttaaatataaactggataattgatgacatgaggaaattttcttagttgtgataactgaatagtggtagtacaggagaatgatgattttaagaggtgaatgctgaagcacttaggggtgaaatgtaattgagtctgtaatttacttccaaatgactaagtaatgcacatatatgcttgcaaattttcataataaaacttgggagaagagaaggcataggaaacaaatatatgaaaacgtaaacagtgcagcagtgattgcctctgaaaaggaaactaagcagctagggtcaagggagtcttctttttactactgtatatccttaaggatttttaaaattgtataccatgtacatgtaccagctattcaaataaataaggttttcaacattaacagtggctatcttttcagtagtggagttacagcttttactttgttcattttagaatccgaaaacaaaaaaggtttcatttacttattttatttattttttgagatggagtctcgctctatcgcccacgctagattgcacctaccaagttcaagtgattctcctgcctcagtctcctgaatagctgggacgacaagcgtgtgccaccacacctagttaatttttgtatttttagtagagatggggtttcatcatgttagccaggctggtctcgaattcctgacctcaagtgatccacccacctcggtctcctaaagtgctgggattacaggcataagctaccacgcccagaccttattcatttatttattgagacagggtctgactctgtcacccaggctggagtgcagtagcagtatcacagctctctgcagccttgacctccttggctcaagtgatcctcgtgtctcagcctcacaagtagcgggaagcatgggcataagccaccatgcccagctagtttttggatttttgcagaagcagggtctccctatgttgcctaggctggtctcaaactcctgagctccagagatcctccaccttggactcccaaagtgctggggttacaggcatgagccaccgttcctggccaaaaaatagatattgttttaaaagtttaggccgggtgcagtggctcatgactgtaatcccagcactttgaaaggccgaggcaggcggatcacctgaggtcaggagtttgagaccagcctggccaacatggtgaaaccccgtccctactaaaaatacaaaaattagccaggcacggttgtgtgcctataatcccagctactcgggaggctgaggcacgagaatcgcttaaacccaggaggtggaggttacagtgagctgagatcgcgccactgcactccaacctgggcgacagagagagactctgtctcaaaaaaaaaaaaaaaaaaaaaaaagtttagtcgggctggtggataaggaggaacagtttagtctctataatttctatctcaagactgtccctaaagaacttatatatgactttgaactgaagatctgatttccaacacctttctactcagccataaaaacagcagcccaagtccttccatagagacggtataagactatgattaggttggacacggcatctcacgcctgtaatcccagcactctgggaagcagacgtgggtggatcacttgacctcgggagtttgagaccagcctggacaacatggcaaaatcccatctctacaaaaaatacaaaaattggctcggcatggtggcacactccagttgtcctgactactgggaaggctgagatgggagggttgcttgagcccgagaagttgaggctgcagtgagccatgattgtgccactgtatgccagccttggtgacagagcaagaccctgactccaaaaaaaaaaaaaataggccaggcgcggtggctcacacctgtaatcgcagcactttgggaggcccaggtgggcagatcacggggtcaggagtttgagaccagcctgaacaacgtggtgaaaccccgtctctactaaaaatacaaaaactggccgggcatagtggtgcacgcctgtaatcccagctcctcaggaggctgaggcaggagaatagcttgaacctgggaggcagaggttgcagtgagctgagatcacgccactgcactccagcctgggcgacagagaaagacttcatctcaaaaaaaaaaaaaagaaaaaaaagaaaagaatcacttgaacccagcaggcagaagttgcagtgagccgaggtcatgccactgcactccagtgtgggcgtcagagtgagactccatctaaaaaagcttgcaaacttgggcttagaaccaacagaccaggttctaatcttactttcactaccacttagctgaccttccattccctcacctggaaaaagatgaaaaaaaccacaactcacgggtctaaaaatatgtgcggcacatacttctctattggagtggcaggagcacaggcatgggttctgagaaccacggacaagttatcacacctctgtgccttagtctcctcatgtataaaacgaagctattggcattttcctcctagggtcattttgagaatttaattgtaaagggtcccttggctgggtgcagtggctcatgcctgtaatcccagcactttgggaggctgaggcaggcagatcacttgagcccaggagtttgagaccagcctggccaactgggagaaacaccaactctactaaaaatacaagaactagccagatggggtggcgcacgcctgtagtcccagctacttgggaggctgaggcacgagaatcacttgaacccaagaggcagaggttgcagtgagccaacatcatgccactgcactccagcctggacaacagagcaagactgtctcaaaaaaaaaaaaaaagaaaagaaaaagaaaaagaaaaaacagggtcccaataaataaagtacttgacacacagagtaggtactcaattaattagtcctatcctaagtctggactcagctgtctccctcatcacagcaggactagcacatcatgcagaccaggagtcagccttttaggaaccaatatccaacctttgggcttctcccatcatttccagggaggacaacatcatctcacaaccccaagcctctctaatcacaatcaatatggtaaacatttttgtaatatatattatggactgaacaccagtaaaacgtttcaaggaatgtctgctttagggtactcacaggccaatgaagatacaaaaacatgcaccatcaatataggacttaataaacattaacgtgtaccaagtgtctacggtatgccacagaggaagactcactcaccaaagggactaaaggaatggcttgtagaggtgggccttgaagaacgggggcaagtgggggagtgccatagcccttttcagaacagctgggaatacaaatctactaatgctgaggggactgaatgccaagaggtacatcctagctcttccaacaggggccactacactaaaacccgaggaaactgggtggacaccaagcattagccctccaggccagtggttctcaaacaagttggggggttgggggaatcacacacaccctctgtgacatctagcaatgtctagagacagttttgattgtcatgcctggggagcaggggtgctactgttatctagcaggtagatgccagagatgctgttaaacatcctacaatgcacagagcacatcccacagcaaaggattatctcgctggaaatgtcaatagtgccactgttgagacactcagtctccaggaaaggtactcagtatgtgctacttcagcaagggcagcctcttaggctaggatatcattcagctagaacatctctggggtggaagaatacagcaggattccaaatggacatctgaggtgagaggaatccacggtgtatcgtttagagttgggaagacacaaaatagaggctttacctgaccaccctttctaaagacaccacctaagtcactttatcacatccacctgtctcatttcctgtatagcacttatgacagcctaaaaccatcttattttctccttatcttctttcccctctggaatataagttccctgtgagcatggagttggtttattctattctccgctgtttccacaacttgcaactgaataactcctgataaacaataagcattcaacaaatttggtaaattagttaatttcggcttttgacggtttcggtggtaggaaaagggcgagttcgaggcaactacctctgacatagcggtggggggtggggatcgacacctcaagcattctaaagactggagcgctgggtctgaaattcaaaagtgccgcctccagagaagagtagaaaggagttggagtgtaccaatgcgaggcgagagaggacgctgggctgaaacagaagtgcaccgtttgggaccgaaggccacgggagagctaccagcgtccccacattctccggagggggtcaagtaaggctgggaagccggctccggccggtccggcggggagccgcgcggcggaggactgagctggcgggaagctggttccagacgcgactcctttggcgggagggggaagtaggcggggtaactggcagctcggcctgtaccactgggccggggcgggggccgcgcaggaagcggcaagtgacacctggaaggggttcgagttagagcacccgcgcggggagagtgggttcgagcagaaccccctctggacgggcaaggaacccgtaagggtccgcgacgtttcaggttacatgggctgggttgtactactccggcaccggataaggggtccaggccgggacgtgcgcagggccgcggccaggtttatctcaccagagccattgggtccaatgatggcggtgaacctctgaaatggtccgataatctgtcgacccttgtacgacttaaagttctcaatctcaatcagtttcaggaaccccatgacggccgcggcgccggcggcagtaggacaggccgcgccgtacgcccgagaactgaggtagcccgcgcgggaaacgccgcagtgcaagccgggcgaccggcaaatgtcgcgagaatacgtccaggcctaacgggattttcgccttccggcaggagtgggaccaggggcggggactgatgttgcgtatacgaggagcgagctgacgactggcgtggtgcctccgcccccctttcttgttgcatggcaacaacaaacacttgctcctgcggaccagatccccggaggagttgttgctgggcggagtcagagcagttcttgaggttcaaggaggcgggggagacctgagctcacgcttgctgagacagaagtcacagcaggattatgcccctcagggcaagaggaaggtgggagctcggctgtggctttagcctggccagctttcaaggctaggacaaggacagggtcgggaattggaaggacccggggggagcggagagctggacgggaaggaggggccaacgggaggattcagtgttaggtgagctcagactttgctaatggtggggtgggattggtggcgggacgggttgcgaaggcggacgggttgtgaatgggactggggctactcccaggcaacagggatacaggctggggaaggctacggcctgagatactacccctatcccctgcctccctcctgttgtaccaagcagagttcagaaactgccgccgtaacccaagaacaaagttgcatgcagagccaacctaagagcttcaaaatcgggattccttactgagaaaggtattttgtgtgaacccccaggagtcagggtccctaagccagcgctctccacctccacctacctctgcctccatgcctctcccccatcccattcccacagctctataccacaatgccaccttacctctcttccctctctgctctctatcattaataaggcaggggccttagcaatccaagaagcttaaaatgtcagctgaatcttccccttcagtgaccttatactgtaatggcaggtgaaaccagtaggtaagttggtgccattctcagacttaaacatggaaaggatctggtggttgccataattattcctttaactatttattaaattatgtccgaaggctagaaagagtcctaaagacttaggacaagtccaggaaagtgaggaagtggctgggcatggtggctgacaactgtaatcccatcgtgagggaggcaggccaaggcaggaggatcacttgagaccagcagttcaagaccagcctgggcaacatagtgagaccctatctctactaaaaattaaaaaattagctgggtgtggcagctctcacctctggtctacccaggatgccgaagcaggaggatcacttgagcctgggaggttgaggctgtagtgagtggtgtccgcaccacttcactccagcctaggtgacagagcaataccctgtctcaaaaataaataaagggaggaagcttggtagatggaatctagtaggggagccataaatgaagttcagctgggagaaacaatcaggctgaggggataaaatggctaaaagacagcaatctcatgtaatccatggggaaatactgttcccttttaaaagatgagatggtgagcctgggtaacatagcaaaacccaatctctacaaaaaaattttaaaaattaggcaggcatggtggcacacacctgtagtcccagctactcaggaggctggggcaggaagatcctttgagcccaggagtttgaggctgcagtgagccatgattgcaccactacactccatcctgggcaacagagagagaccccatctaaaacaaattaaaaataaaataaattttattctctgcctcagccttccaagtagctaggattacaggtgcccactgccacgcctggctaatttttttgtatttttagtaaagacagggtttcactatgttggccaggctggtcttgaactcctgacctcctgatccacctgcctcggcctcccaaagtgctgggattacaggcgtgagccaccgcgcccggccaaaaataaaataaaattttaaatttaaaaaagatgagatggcacttggggggaaaattaaattggatccttatctcacaccatacacaaaatgcaactccaagtggattaaaaacctaagtgacgccgggcacaatggctcatgcctgtaataccagcactttgggaggccgaggcaggagaattgcttgagttcaagactagcttgggcaatatagtgagaccccatctatattaaaaaaaattaaatggggccaggtgtggtggctcatgcctgtaatcccagcactttgggaggccaaggagggcggatcataaggtcaggagattgagactatcctggctaacactgtgaaaccccatctctactaaaaatacaaaaatcagccgggcatatatgttcaactacttcacagttacaaaatggaaaacaaaacaaaacaccaaaaagatccaaatagctataggaggaattaaagaatcacgctccaaacaaaggaacagcacatacaaaggccccggggtgggaacaattactgtgttggaggacttgatcagcttgcctggagcactgtaagcaagggagacagtggtttgagacaaattggagaggtgtgcaggaactagatcttgaaagcccacagtaaggagtttggatctgattctaagtatagtgggaagctagtggaggatttaagcaggtgagagacatgatcagatttatgtttgctaaagtttttttggctgcagctttggctgggttacatgccaaaagtgagcttcccaaaatatgaaggaacacaggcaaatttagctttctagcctttcatttgaccagaaaataagtaataaaagtaaaaaaaaaaaaaaaaaaaaaaaaagggtggggggacatatatttcagaaaagaaagctgcttctggtttctgtgattgggctataggagtcaatagaggaagctggaataccaacatggagacagttgtggttattcaggaagctggcaatggtggcttggataagggttattttgaaagaagaaggagtgagggaaaggaaggattaaaggatgtctcctaggtttttgaccggagcaacttggtgaatggtggtgccacttactgaaataaggaaaactgaatagagtataatgaaaaaggagtgttgtagatgtgtttgaggcttagaaaggtgagcaggggtcagatcatgaagaaccttataaatctggcaaagggggttgggccttataagcactggggagccattgctttaaaggtgctttcaaaggctttacgctgaggagtgccatggtcagatttgcttcccaaagatcactctggtagccagtgcagagaaatccagtgcagagagggtaacgttggagcaagagaacccagtggggctcctgagatactgcctgacaccagattgtgaggcctgaattaagctggtgacagcagagmtggagggcacagatacgaaatatatcaggaagtaaaatcagtaggaatcaataactgctgaaatattatagggagaaaggaatgggggtggcgtgtagtcaaagacggtggtcggcactgatgggcyattccacctcccttttgctccagatgtataacataaaacagtcaacagataccaaggaagcagcagccatcgaggctagaagaaatcgagaaaaagagcgacaaaaccgattcttcaatgtgcggaaccgagtcatgggggtgagtgggtagtagggactgttgctcaggatcagggccacctcactcttacacctggagaggaatgtgtaacagtgcccatgatagcccttcccctgattcaagtaggcccctagggcaggaaaggaaagagagggagagaaggcacccacccctacaggcctgggaagagcttgggaagagggataggtcagtgcaggggaagagactaggggagacggctgacccttctccagtcagctctgggccatgtgacctggttcttgagacaggcaacatggagctaaaagaggcctaaagaatatttggagtccgggtgcagtggcttacacctgtaatcccagcactttaggaggctgaggtgagcagatcacacaaggtcaggagttaaagaccagcctggccaacgtggtgaaaccctgtctctactgaaaatacaaaaattagctgggcgtggttgtgcatgcctataatcccagctacttgggaggctgaagcacaagaatcacttgaatccaggaggagcaggttacagtgagccgagatcacaccattgcactccagcctgagcaacagtgagaccctgtctcaaaattactgcatatacctaaactatctctgcaaggctatgttgagaaacttaaccaggctgagagacagagatggaagggacacttacgcctcactaaactgtattcctttttgtatgattttgaaatgtgataaatgaattataataaaagagaaaatattgatagtttaagaaacaaaagattgctaggtgagtggatagaggggggatgcagcatggtattctggaaaagaccccgtaagtatttaaggccaggtctgctgactgttatgtgtgtggctttggataaatcacctgtcttctctgagccccaggctcctcttctgtaaaatgaggctgaaggaagtcaggtgagtgttaacacagagtggcagctttgaaaaccagtgcatagtgcctgccgtaagaagttggctagggtattagtgttctgattgagatccagcygacaagctgacaagcatttcctcggggcctgctctgtgccaagcactgtgttgggcagtggggatacgaaaatgactaaggcccagtttctgccctgaaagggttcacagtctggtggaggagagaatacagagaggcgaacatcaatataatgtagacagtgggttctagattctacaggagtagaacctgcctgaggggtcaggaaagtgaaggctgagctggtctcgaaggacaaattggaatttgtgtaaagaggggaggaaagtgttccaagtggagggagcagcttgagcaaaggctattggttcaaaacagcctaagatattcagggaactgtaagcacagctcataagggtaaggtgggactaagagatgaggccagagaaggaggcagaggctagaccatggagaggcttacaaaccatgctcaggagctagaactttatccagtaggtactggggagctacaggattctgaaacaggtaaattctaattagtttgtggtaggacattgaaggccccctgctgggcccctactctgattgtgctcctttctttgggatcaggtggatgtccaggccctgaacaaccaggtgggagaccgaaagcgtcgggaagcagcagaaagaagcaaggaggcagcttatggtaaaagccaaaagccaggggccagacaagggtgtaaagaaagagctcgagtgggctgaggtagggcagttctgcctctgtggcctgaggccctggggtggtgggacaaattggatggaccttgagagtagaggacatgctaagtggactctgtccctcctggggtatcttctccatatccttgctcaccacccccaggtaccagccaggtgcagtatgatgtggtagtccagatgttagagaaggaagaggcagatcgaacacgtcagctggccaagaaagtccaggagtttcgggagcagaagcagcagctcaagaacgggcgtgaatttagtctttgggatccaggccaagtctggaaggggcttccaacctatcttagttacagtaatacctatcctggtccagccagcctgcagtacttctctggggaagacctagacagggacacacggctgagaatgcagcaggggcagttcaggtacaacttggaaaggcaacagcaggagcaacagcaagccaaggttgatgagaattatacaggtaagcagcccggccctccagactcagagacctgaggcctagtggggatctgtcctaagctgagtacagcagccaggggaccagaactgtgtggggaggtccacttatccatagggttggtgctgaaatgttaggttgtgcagaccccaacctccctgacttccttcagtaactgacagtgtagcattgttcttgattagtttggcactccattacgtggaggcagcacagtgcagacagacctaatggctctgccacttactagctggtttgggcaaatgaattttcccttctgtgcttcagtttcttcatctttaaaatgagaataataatttataccacatagagtagctactattatgatattgtctgtggccacatccttctcttccattagaagaagcccttcaagggcaaggaccatgtcttatctacttgcactgttcacccttcacatcaaccctgttacagcactctgttctgctggaccacttattgtagttgtagctaattgtgaaagtatttgtttaatatctgtcttctccctaaaatgtcagcctactgaagatgaaccatctctttcatgtctacccatctcccagttgcatagtacagtgtctgacaggtcttaggaacagcaaggagctcagtgtggctggagcagaaaaaaattgtcagtacctttgctcatgccatgccctcagcctggaatgccctttgctcttttagcctgtatacaaaatgtatttcaaggatcacctcttcctggaagccttcctcttttccaccatccaaaaccctcttaataccctgtgtacatccctgccattgctcttgccagattgtggtctatgtttgatctgtgtccccaactagacagggagttctctgaggacaggatttaattcgatggtatcattagaacccagcacatggcccttagactgagattcagagatatgaaatgatttacccaaaatcacacagctcagaagcagcagaactgacattgggacccaggtccattggaggcatcttttagttatgcgcttgagaaatcgttgttgctgcacctagttccttccacatccctacaactcggacactaaccccctcctaaacattcgtacacacacaaacacaaaacttgctgaacaaatggctggatgagtgaaacaggaatggagcaagccagtacagtaccccggccatatttctctgtgtagatgcgctcagtaaccagctgcgcctcgccatggatgcacaggccacccatctggccaggctggaggagtcctgtcgtgcggccatgatgtgtgccatggccaacgccaacaaagcgcaggtatggcctgagccatgcagtaccttgggctctccccaactcctgaacaaaatcctggagaaccttagccatattcttcctcttacatcccctcttaaatcagcatcagccctctcatctgagtactcccccttcactgaaggcccctcttagggtacaagtcacttctccccacctccagaagcaggatgacttgagaatagaacattgccctctcatcctccgcttcccagtctaaaggcttcctgaaggcagagaagttccctgcccattctccccaacacatattaggggcattgaaaggccatgcagtatctgttctttctccttgagatggaagagtagggccatgttcccccctcccctgtgacagagttccctgaggttgggcacccaaatgtttgcatttgggggctccaccaggcagctgtgcaggctgggcgtcagcgctgtgagcgtcagcgtgaacagaaggccaaccttgcggagatccagcaccagagcacgagtgacctactgactgaaaacccccaggtcgcccaacaccctatggctccctaccgggtcctgccctattgctggaagggcatgactccagagcagcaagctgccatcaggaaagagcaggaagtacaacgctctaagaagcaagcacaccgtcaggctgagaaaacactggatactgaatggaaaagccagactatgagctcagcccaggcagtgctggagctagaagagcaggagagggaattgtgtgctgtatttcaaaggggtctaggatccttcaaccagcagctggctaatgagcaaaaagcccagtgagttctaggtggtagtggtggagataaatgccaagggagggagaggagggatggtgaggaaccatggagagagggaaagcatgtcagctgagacctctggacttctttcacaggcaggattacctgaattcagtaatctacaccaatcaacctacagcccagtatcaccagcagtttaacaccagcagccgctaagttcaggatgtctatctctctctcccttctcctccatcaagctcacaggtggttaggagtcaaagagaaaaatgctgcatactcccaccttctaacctaggtaataaagttctgcactcaaaatcaagtccacatgttgtaacaggacacaaagtattatgaaggtactgcctttcccaccccaccctggagctctgagcatccaaccctgtcacagccttcacatttcttccccatgccaggccccctagcacacaacactgcctacactctgtgagaaaaagagactttattaggcacagagggcgactggtaggcagttacaaaatggctactgggcttcctcccaagctggagagtagtaccccagggaaaggaagggcagaggagcgtgtgttttctctgccttctcccttcaaggctgcatacgaatggccccatccagccggatgacctctccattgaggaatgggttctcgatgatggcctgtacgaggtgagcatactcagcagggtcacccagtcggctagggaagggcacttggctggccaagaagttgcacactttctctgggaggctggtcagcagtggggtgccaaacagacctaaacaatatagccaaattcagagactcacccttgctttcatgattacctggttcttccttactttagccctacttcttggtgcttctctggggcccaaagataaaaggctgctgctgcttaggtggtggataccttcccctctcaactgtccatggatcccacccaatcccaggtatgatggagagaggggatatgtctacctggggcaatggtcatcacccggatacctatgggagccagatcccgagcaatgggcagtgtcatgcccactattccccccttggaagcagagtatgcagcttgtccaacctggagaaagagtagaagtcataggtgggagggccccaacaagtcacttaggaggcataagtcttacccctgcccacacacctgaccctcgaaggcagccacactggcagtgttgatgatgaccccacgttggcctccctggtctggttcattctggcccatctcaccagccaccaggcggatcacattgaaggtgcccatgagattcacctgtaggacagatggagacatgctataggacctgaggcagaagaagcctttgtcccctaaaaactttggggtcctccacagccagatacttcttactaccactatccctggagaacttccaaggccttacatcaagaactcgctggaagtcttccaaggtatgggtctggcccttctttaagttgtacgtcttgctagccaccgcgatgcctgcacagttgacagctacatccacacggccaaactttccttttgctagagccagagctgtttgcacatccttctcagaggtcaccttcaaagagagaagtggagaaggtattcatctcccagcacccactcttcccactaaacctgagggagggcagggcagggcatgcccagtccttgggtgagaagagatttgtgagaagggagaggccaagagaaaggttgtaaaacttgagagataggctgggtgcggtggctcatgcctgtaatctcagcactttgggaggccgaggctggtggatcacttaagatcaggagtttgagaccagcctggccaacgtggtgaaaacccgtctctactaaaaatacaaaattagccggcatagtgacacatgcctgtaatcccagctacttggaaggctgaggcagaagaatcgcttgaacccgggaggcagaggttgcagtgagctgagatcgtgccattgcactgcagcctgggcaacagtgagactctgtcccaaaaaaaaaaattgagagagtaggtcaaaggtgaaaatattaggtaatatagagcagtgttgcaaaacatttttcaaatcaataccttcttgataaattcacatgctcctgaagattcttaattgctgtggatcagagcactaatgcaaccctgttgtgaggctgggtgcagtggctcacacctgtaatcccagcactttgggaggccgaggcgggcggatcacgtgagatcaggagttcaagaccagcccggccaacatggtgaaaccccatctcttctaaaaatacaaaaaaaaaaattagctgggcgtggtggcaggtgcctgtaatcccagctacttgggaggttgaggcaggaaaatcgcttgaacccagaagatggaggttgcaaggagctgagattgtgccactgcactccagcctgggcaacagagcgagactccatctcaaaaataaaaataaaaaataaccctcttgtgagaattattgataggaagataaactagcttttttgtatccttacctgctaagatgatttcatcaagtttcactttctgtagtttgtttcatgaaaacaagttttttgactttgtaaatataaaattacaaggcacaaaatgcattttcaaaccatacataactcctccaggagattgttacgtccaatccccatcctcattgttgtgaatcccagctttagagaatccttatcacaggtggtcccacagtgcttgaaggctcaggccaaaagagacaaggagatgggtctaccgcccccatagaggagacccttatgggagggacccccacaggttcccaggccggtgttggtgacctcatgcacaccctgggagaggagaggtgaccccacttacgtcggctggggcgaaaacgcagttgtttcctaacttcttggcttgggcctccccacccgagttgggcaggtccagaagcacagcagaggctccctgccccacaagtcgctccgccgtggccaggcccaggcccgaggctcctccggttattaccgccaccaggccctgtcaaaagggacatggtcagggtcagctgttacattgcccagaccatccccacgctgtcgcctgcctgttctccaggcttctgaggagaaggggggaggggagaggtcgtggtcacccctgcgggtaaactaggtgtgctgcttctcctcagcgttgggacctcgggggcagaagggatctcatccccagacagcccgtcccgtgacgatagatagatagatgattgatagatagatagatagacagacagacagacagacagatgcgccgcggagtgctgactttcacctcttgagcccaacggccacaataccaggcctacataagcatgaccctttccctcgaaaccgatctctttctcctagttccacggccgcgctgtcccggcccgtaaaggaaggcaagcaacagaggcaaagaaccttctaccttcacgctccgacacgctgctgccatcttgtcgccggccactccacgggatggggatgggggcgcgggcgctcgttgattggccgaggcgaagcggcggaaggggcggatgcgacgggccggggcgtctgccgctgccgcatgagacgtgggggcgtggcctggtacgctagtcctttggccagagggcggattccgcctgctaaggtatccccagagttatttcaactggggaaagagaccaatagcagaagtacaataccacaacacccctcgccctactctctagctggccttttggcaagtggcctgctccgcgtgggggaagaggggtggatattgagaacggatgcctttctcctctgaaaaagtcttaattcaagtatgaatgtatttgagactcctatatgctagacggtgtgcggggcacctgggatacccagcggaataataaaagattcatgccttccaggagggcacagtccaggtggagaaagagaattacagtacagacacagacgaatggacggaaccagattctgggacactcagacaaggagatccaaagatgaggagtctgagttagagagagagagagccatgtaaagagaaatatgttgaggccgagataggaagagagatgccaggtaggatcacagagagatgaatgtggaaagccgctaagagagatgcttggagacagacattctaggacagctgctgagaagcacaaacctaaagaggcaaaaacatctttcatcagttcaggctttgctactctcctctatctttgtctaatttaagtccaaaagcccagatcacacactgcagattggacttcaaccagagactattatttaagacccaggtctttgtcatcctagaacatctttcaggcagcttccagaagctatgtcattagagtcttgagcccagatatctaatctgtcttccttctatacttttcctcaaaccaaggtcttcaggccataaatcttagcccaccatttcagcctcagaactgctttatgttttctctatctgaaatatctccccccacttgctttctcacccaggaagattcccctccaggccttctagttgttgacagccaccacactcataatcactacaccgtatttaccaaaggatttagcacaccggtctcacaattttcctatctacatgaagtgcttccatcaatttatagcactcttcatccggcccaatatgctgtagccacagtggcctcctttgtgttcatctttgcattagctgctccctctgcttggaatgctctcccctgatctttgcatgactgcttttattttttttcattcagaactaagcttaaatatcaccttcccagaggggtcctccctaaatattcaaactgtagccacctagacactatcccattgcatatttgaattatcttcatagcacttgcatgtccgtaatccattttccaaccttagggccagatgtgctgtggaattcagagtttttttcaatttgagaaaggaagacatgtaatttatattacataactctttaaaaaaactagtcaaacataactttttgtatagtctatattatataactattgagaaaagcctggagcatcgtaatgaaatattaatatttctgaagtgaaaggtatgaaaattcacaccaagtgtgaataaagactataaatagcctcacactacttcaggtcaggttttgtcatctattgagtttgggctccaaagtatgaaaaaacaaccttatgcttttcagaagttttggcattgcaggattgtgcctacaggcttgtgagcctgcatgctccgctaacctggccttgtttgtgtagttctccccctgctggaaggtaagccccatggcaccaggggcttgtccagctggttcacctaatgccgagaacactgcttggcgtgtacaagacacttaaaacaaatgtgtgaaataaatgaattaatgaattaatcttggaagaatttccaggcacagtttcatgattctttcacctgcccaactccgggaaccttcacctcctctctactttaaccacctgtccaggccaccttattgcacttgtcattccctggaataacctcctgccctccccagcatctacacaccatcttttctctctctgaccatgttctcgagttgtcttggatctcttcccctctaccgcttttttttttttttttgagatggagtctcccgctgcccaggctggagtgcagtggcgcatcttggctcactgcaacctccgcttcctgggtgcaagcaattctcctgcctcagcttccagagtagctgaaattacaggcatgggccaccacgcctggctaatttttgtatttttagtagagatgggattttaccatgttggccagtctggtgttgaactcctgacctcaggtgatccgccctgcctcagcctcccaaagtgttgggattacaggcatgagccatcgcgcccagcctcagctctattatttactagccgaatgaccctggacaagttacttaactgatgtgcctcagtttcctcttctgtaaaatgagtataaacaaatgactattcgtagggttgttaggaataaatgagttaacaactatgtatttaaaaaggacttggaacagtgcttggcctttagcaagagctatataagtgttagctatggttactcttcagagcagtgtttctcatccttttctatgctacggacacctatgggagtctggtgaagtcttaggaaccccttcccagaat

SEQ ID NO: 96896 - DNA, 12357 bp, Homo sapiens
attagatcccatttgtcaatttttgcttttgttgcaactgcttttgacgtttttgtcatgaaatctttgcccgtgcctatgtatggtattgcctagattttcttctagggttttatagttcgagattttacatttaagtctttaatccatcttgagttaatttctgtgtaaggtataaggaaggggtcaagtttcaattttttgcatatagctagccagttctcccaatactttacgaaatagggaatccttcccccattgtttgtttttgtcaggtctgttgaagatcagacggttgtagacgtgcagtcttattcctgagtccccatcagagtgaacagacaacctacggaatgggagaaaagttttgcaatctatccatctgacaaaggtctaatatgcagagtctacacggaacctaaacaaatttacaagaaaaaaaccaaacaactccattaaaaagtgggcaaaggacacaaacacacacttctcaaaagaagacatttatgcagccaacaaacatataaaaagaagctcaacatcgctgatcattagtgaaatgcaaatcaaaaccacagtgagataccatctcaaaccagtcagaatggtgattattaaagtcaagaaaccacagatgttggcaaggctgtggagagatagggacgcttttacactgttggtgggaatgtaaattagttcaaccattgtggatgacagtgtggcaatttctcaaagacctagaggaagaaatagcatttgacccagcaatccaattactgggtatatacccaaaggaacataaaccattctattataaaaatatatgcacacatatgttcattgcagtgctagtcacaatagcaaagacatggactcaacccaaatgctaatcaatgatagactggataaagaaaatgtagtacatatataccatggaatactacgaaaacataaaaaggaatgagttcatgtcctttgcagggacatcgatgaagctggaagccattaccctcagcaaactaatgcaggaacagaaaaccaaacaccacatgttctcactcgtaagtgggagctgaacaatgagaacacatggacacggggaggggcacacacactggggcctgttgcggggggtgtgggggagggagagcatcaggaaaaatagctaatgcatgctggccttaatacttaggtgatgggttgacaggtgcagcaaaccaccatggcatacgttcacctaagtaacaaacctgcacatcctgcacatggtccccggaatttaaaataaaataaaaataaaaataaagtgatcttagaagtctactattacctataccagtcttggttcaaaatacgtcttaagtgtccctttgggaactgccttaacagtgggtctacaaggcacattagaaaagcagttttatatggtatagttacagtgttctaaaatttattttgccctaacagctttattaaggtatataattaacatacaataaagagatggcatcctatctgtgctcctatgtaaacatatcatgtcctttttctctggctacctttaacatttttgtttatcactggttttgtgctgtatgattatgaaggacctcagtgcagtttttttcatgtttcttttgttgggatttgtggtggttaatactgaatgtcaacttgactggattgaaggatgcaaagtattgttcctgggtgtgtctgtgagggagttgccaaaggagatcaacatttgagtccgtggactgggagaagcagacccaccctcagtctgggtggtcagcatctaatcagctgccagtgtaaaagcagacatgggaagggcagacttgctgagccttctggcctccatcttcctcccatgctagatgcttcctgccctggaacatcagactccaagttcttcagcttttgaactcttggacttatactagtgatttgccaggggctcttgggccttcggccacagactgaaggctgcactatcggcttccctgcttttaaggttttgggactcggactggcttcctggttcctcggcttgcagacagcctatggtgggacttcaccctgtgaccatgtgagtcagttctcctaataaactacccttcatatattcatctatcctattagttctgtccctctagagaatgctgactaatacagggtttgttgagcttcttggatatttgtgttcgtagttttcatgaaatttggaaaaaaatgtttagcattatttcttcaaatatcttttctgtcctcccctcctttttggggactccaattacacacgtacattagggcattggaagttgtcctccagaactgattctctgttaatttttttaaaattctgtttttctgtttcatattacatagtccctattgctacgtcttcaagttcactaatcttttcttttacaatgtctaatacgccattaattctgtcaatgtaattttcatgacagacattatagatttcatctttaagttcaatctgagtgtcttctttatatcttccttctacttaactttcttaacatacagaataaggttctaaaaattagtttaacatctctactgctaattctaacatctgcatcagttctgggttgattttgattggttctttttctcttgtttaggggatatattttcctgcttctttgcaagcttggtaattttttattggatgccattaattgtgaaatttatcttctggggcagtagatatttttgtattcctgtacatactcttgaacttcgtttctgggacccagttatgttacttggaagcagcggtacttttggctcctcctttcgtgatttgttaggcaggtctggagcagccagtgccccttctaagaggcaagacccttccgaacaccctaccaatgccctgtggattttaatcttttccagtctggctggtggaaacaggccaccttcccagccctgtgtgaacattcagtactgttccctctaatccttttggatggttgttccccagccttaggtagtttcctcctgtgctgatcagcactgccctgactgctccaggggcacctctgcagatctctggagcaatctctgcaattctcctcacctctgccctgcgttctcttaccagtccggctgccctgaactctgtcctctaagcttagggaacttgctgggctctgcccgaatcctgtccccatgcctcatcctgttcagtctcccagcagtgagctagggtactcgaagggctcacctcatttgtttcctgtatctcagaggttactgtcctccgttgcctgacatccagtgtgtactaaaaaacatttttccatatatttttgttgttgttgttgttgttttgtcttttgggcaggagggcaaatctgtccctgtcactccatcttggctggaagtggctgtcttaatgctagtgtttagtatcactcaatgcggccatcaacttggcaagggttgactttggattactttttcttatttcaggaaaataaaatggcaaagataaagttctgttactagcaagcacagttactagtttgttttctctgttatcatttactgagcacgtgctatgtaccctccaagtaggctgtgctttatgtacatttttcttattttaatctaacaaacttataaaacaaatactatgagttttattttatataagaggaaactggaacttagagagtcaaataacttgcccaaggttatacaactagcaggtgacagggctgagttgaaaacaagtttctccaattccaaagactgtttttattcactgcagttctgaaggcactaaagagaagatcctgggcccccaaagtgtgtttgaacaatggtagcattgttaaaatacataattctctgatgacttgacaaagcataatgatgccaattactctcttttactgattctactatgctacggattgtaagaggtactattattttatctgtccgtaagaaggaaaaaaatctacccattaaaccacagcatagtgttttagatgccgttaattttagggtggatctcaattttagcattgttaaaaaagaaacaatatgcatattaaaatcaataaaatgatacagtatcatgtactgggtactactgttgcttttgattctttcaacaaccctaaaaggtagtcattgtggtatgcatttacagaagtagaaactgaggctcaggctcaagggtaggtgacatgtctaaggtcacactgcagtaaatggcagtgccagacttttgctacttcttatatgcttgtcaaaaaaatcagtcctattaaaatcaaacatatgcttttaatggcatgtcaagcccatgtgtgtatacacacacgtctgcacacatgtatatgcctaggtgctccctaggagttatatttgctttagtagcatagcaagaggtggaaataggataaatgagtgtgttggcagaatgacatttctcatctgcccacaatctagtgaataaacaattacgtcgtgaaggttacataaacttagaaaaagcttatagtatttattgcagcaataaccaaattttaaactaggacatacacctgtccaaatgaaaagtacctattacttttatagattcctacctagttttgtgcagtaagacccagagccaaccctgctttggaaggtgtttgtctaacgttctttgagtaaggaatgcttcctcacaataccacagaggagggtgccatttcaagtagaatttctttgttttcttgttaattctgtatctcttcagtgtaaaacacagagaacagagtcatatttctttatatgagcaaattaaaaaaaaaataacaaacttccctgaggataaaagtgtgaggacggtcatttacttggattgacaaatgcagcccatgacggggtccaggaaagctcgtctgcacaatataccaccagttcactaggtgacgtagagaatcctgaagagtctggctactgtttaagatcctcatttctgatatgagttagaaatctccacagtgagtgaatcttaaatttggagtcttctgtaaaaactgaaccaatgaatagcattgaaacggtagaatgaaattcaactacctttgaggcctcacatcagtaatcccctctacaaaatcatagttatcttaatgcaaagactgctgtaatcctggccttgcaatgcactatttttcatctgaatggttcaactgtgtgtcctatttcagaagaggaaggggtgacagtgacatacagggcacagattttctgtatgttatattggtaatcatagagggctctctcatgcagcagtagataacgtctaacagccagttctttctcaacatcagcatcagcatgtggccatgacaaatgaagtctggaagtagctcttggcagaatccttaaggctgcaacagaagatgtgtgcttttccctgcaaggcccctgtgtgcagggaccctgccctgtcactctgaggtcctggcaccgcctcttcagagtcccacgtgttcttttccaggctccaacttaagagcctggtttccagtgacttggccctgagaacaaacagtgctgagatgaagcctgtggctccatgagcaagctgaacgtggccagaaggcaatcacaacattcttttctgtcttggttttttttttttttctttttttttttttttaattttagctttgatgacaaaaacaatgctggaggagagtgagagcaccaagttgaacccacgtggaccagctttgacgatgaagctacaggcagccaagtcaactcacacatagagaaagtggaaaaagaacagaaaagcaggagacagaaacaaaaacatgcaggagagggtgattctgttccatgatcttggctcagtgctccagggttcctaatgtttcagcaaaaagaaaatcactgtaatgaaatgtaatgagaccctttgacactgaggaagtgacagctcaggcttggccttctaccacacacctataatctgtgacttgcaacagaacttttcccgaagagcgcagtcctccctgagcaaaatggctagggcctacgccgtgatttgctgctctggaatgggacacacatgttgctaatccttgcaaaaccagctgaagaaccattttcctcctgagaattttcttctgttcactgctaattttggctactttagttgctttgtttctcctccacttaagtaaatattcctcgagttgatgtgccaaacctctcttttggaataacagaaggtttaacacatatatgctcayagggacagcgctttcacacgttactgacagcttcatagacatcatttctatttctcctcaagacaagctaaggcagaaggtaaggcagacattatgatgtccatttcacagatgcggaaagtgaggctcagaggggttaaaagatgacctgatacaagtcatagagccggtatctggaagaagcaggagcaaagtccaggcatcctgatccaagctaggtccactgccttccactctggagaggcttcatctccaacagaggaagggacgtgagtggctggaaaatctcatggatgaagagcctcagatttcatgctccttggagtcacatggtaaaacaacaagtgtttggcctgtggttctgtcacttttaccatctgtgaccctggggtaaataatggcatctttaagcatttgtttttgaaagatggaaatgatgataattagctgattgggctgcagtgagaagaaaacaggctggtacatggatgatgcagagaagtatgtctgtcacaccgtaggagcccaacagcccatgcgttacttcagacaatggcagctgtttggctgtgtgagcccaaatgccataagtgggcatgtttaaggtggatgtgattcctacgtatgcctcctgaggaacaattaacatccctaaagattgttgcagtgcgttgacggcaggtgtcccccaaactctaagtgtcctgtggaacctggggcaacacactcacagcctttcccacagggcttcctccgagccagataccagcaatgtagacaaagcatttgggaagttggatcaatagtgaaggtggccaattcatcccaggttgcccaggactttctcattttcagcacgaataatcctgtgccccagggcaaactgggacagctggtcaccctgtcaatcatagagtctaggctggtaacaaaattaaaaagctagaaacctatttcttataggctattccttaatagaaaacaatgcaaaaaccttggcgcgctgcagcctcatgttctgaaccaatggttctcaaagtatggtccccaaaccaggccagcagcatcagcgtcacatgagaacttgttagaaaaacaaatttggggcaccatgcacacctcacgagtcagaaactgtgggaatcaggcctaggaatctgggtttgaatgagccttctgggtgtttctgatgcttgtgcaagtctgagaaccactggtccagaccataagtagaagtcagactagatgccaaggagaactaaaacaatgcaagctcacgagaggaagctttcttcctttgtcatgatccctccattttggattgctcaaactgaacggggaaaatatgatggaagcacttcctgctctcttgttccatgggaatccagtatggctgcggacgatcaaggttaaagtatctccgtgaagtaacacactgacaagaaaggcacctttaggggagtcaagcatatcatttcatctgtggccacatgtgaatgctagctatgtatatgttctaaaaagcaaagagtagacaaagaggagcgccgcccagcctcccaacaccagagtctcacttcctctcctcagctggcgctctggggccggactccagtaataacagcctcctggggagattaaagccctggcaagcacagtttatcttggtgaatgtatactttagctttgtgtgtatctacacatatacatacactgcagtatttatagctggtatacatgtgaggtagcgctggagacaaggcctggaatgggtgtacaacacctatgaggttggaaccaagatcttttaaacgcaaacctggtttccctgaactgtcctccacccgtgtggtccaaacacacactcaggtgtttcgggaagaacatcctccctccctgcaaataggggcagcagtctttcttctgtttccagaaagagttgagtattttgtggtggcttctttcatctctggggactttgcttattagaaaaatacacagaatcaccgctctcccgagtaaggaaatgagatggccgggaggtgagctgagtcaggaccgctgctttaagccaagtctacagggttggtattgaggtggagacgcttctcagagtgcagcacagcccactctgagaagggcaggcatgggggccatccggccccagtgcccacgtgtgcgcgaccctggacagagggcggcctccagtggcagtgctgctctgtggcacactgaggcctggtttccctttttttttttttttttttggtgggggcacatatttcctcaggaaggagcagataagttcctccttaggcttgtgaatactttcttgtcacctggccaaatggaattccaacgatattgtgaagaggcagtgccacttcacagcagacactcacaacaagccacagtcatggggtggtcaaaactcccaatctccattttcatgcaaagctgaatgggcagctcagacctttaaaaagtgtcatgaacacataggtcctcttagtctctgtctacttgacaagatctcttagtgtccatgtgtgatagaacagcacatgcctacactgtgtggagtgaggggctgccagagccacacggtgtagccttctgtcccccacggaggcatgggtgagaggagagacacaagacagagaggaagactgcacatcaggctgcggaaatgagcttgagggtttatgttttgaggttgcaaagaaaagaagaaaaataaggaagatgggggtggggagaaagaacaagctgggtgaggggaggaggagggatgtacaggagatggcctgaggcagccaggaggggtctccaggagggcctaactgtggaggttgctgagaggctagaggggagaggctggagccagtccagcctaacacattaacgcaggtgtaggggtttaaaacaatacgtgtcgatcctcttacgttcttggtgtgggcagggctggctgcctctagaggctcccggaaagaacccgttcccttgccttgtccagcttctagaggcgcctacaccccttggctcgcagccccttccttgaatcaccctgaccccgcttcgtcttcactgctccttttctgactctgaccctcctgccttcctcctataaggaccttgtggttaccattagggctccctggaaaatccaggaccatctccagacccttcactcaatcccatttgcaaagtctctggattatcatgtaaggtgacatagccacgtattctagaattagcatggggacttccttgggggtggggacattctcctgtgtgccacagagattaggatggcagcacgccgtctgctgtgactcctccctggcacagctgaggggcacacacagcctccatacgcagaggcagctggcctaagccctggggctcagcatctcacccatgttctccaggcccaggtgaggagaacagcagctcacacgtgcagaatgtgaacattctgcaaaagggagatatttttgcattctttttctatagaagaaccaccccctccgcaccgacaccaaagtgtatgagctcccacaaaagttggatctgtccctgcatactaattttgtccatctattcaaagtgcagggaaaggaacatttctttaaggaaaagtcttcatgcttcttctaatttatctgtatatgagaattttttaaagtattattagaaaacttctcacctttattctcaattactctgcgaaagtttttatttttactctggattttaaaatatgcttgtggggaagaaatctacaatcccttaattccattttcatatagtcacaaaatcatcagaagaaaatggaattttctgttcagattaaatacagctcctcagtaccactgaaagcaggagggaagggagagcctggggcaagttccatagactctaaattactagcttctgcaaatcattagtttctcccctgggagaaaagcagctctacagtcttctggttccgaggcaccctcagcagggtcaggagctgcacggccacattttaaattctagtgggcacagctaaaacaggatgaaccgaagtcggcctgaatattgggacactgatttgaggagagagatggcaacgtgggacaacagcatctgattttgatgtcttttgtctagtgatgtcctatgcggtggcaagaaagaagactgcaggtgccagcacacctcgcgctgtccctcctcgggcccagcactgggacctgaggctgagcagtccacctccaccaagaacaggaatgcctgacactcaaaggccatcccagccccagttctggaaatccgagaccctaactgtactttaaaagataactgacagacaggtggcaggagtcaagaagggtcagtcataacttatcctattcgtaaatcataacagtgaagtgcaaaatcccaggaagccagctcaggctgatgatgccgccggggtgacaaaccagggactaaaaagtctgggttcaggaatctttaggtaattaactgtagaatgactagatacccgcctcccatatttacagcgcatgcctttgctaaacccatttgccctccttcatttcttcctgtctctctgcctctccctcccttcccttagcgtggagtacatcaatctgtccgaagggataaactatatttgtgttaagctttcatttataattaaccagctgaccccaattccacacataaatggcacttattatttaaaaaatacaggctacatttctttcattgttcactgtgtcattatgtatacataatgtttccttcccatagagaataaaataatgaccaaagttctgtccttcaacccaatgtctccacagtgtgtctttccacccttgttaaacactgcctgcttacatgttttcaaaacacatgacccgcatctactctgacactttcccattcatcgacagagcaacttcagtccttaattagggcagtgtttgagcttaaaggcaagtctgtacaattgaaaaggtgcatattcaaaaaaaaagaaaaagaaaagatgcatattcaaatttctgagggagtaatagcgtggtctgtgatgacaaaactaaaaataatttattacattttattttccaacgttaatccattaaatcaaaggtcactggggcagaggtcttattttcaaataatatatatttattataataaataaatgtatttataaattcttcctttccatacctctataaatgtgcctatttctgtaagtttaaagtaagttccttacaactaattatttctgtttactgatgacaggtatgacaattttatatggaatgaaacatgttctgattcaaagagaagtagttcttccaaagtagctgaaagctgattcacaacacaggagtttgccttttacaggcagacatgatgttataaaatgtcagatggccaacatttttgcgatgggggtgtgagagattcttctcaaatgacgcacgcctctcttgggtattatcgaactagaaactggaatgccccctttaagacaaggaaagtttggaagaaaggcgccacaacgccagtcagagctggcggttttctcagcaatgcctgatgcaagctcgagctttgacagcagtagctggactccgactcttcgtaaaggtgcagcttaactcaggcactgctagagagccttggagagaattacagacgtttagagtggcaggaatgcctggtatggctccttggtttgagtcagggcagagggaaagcagcacacacttcagtcagagcatagcctggcctaaaacatgagactgtattctgttctctcacccagagtcttgattaaaaatattctttgcccatttaagagcttgatgtgcagaaccctttcctgatagcattgattctggctcggttttataatttcactgtatgtgggaggagtagttaggagggcagagaaagcagcaccaaaaagatccacacttgctatgactgaagctcattccatagggaagataacagagagccttggaga

SEQ ID NO: 96897 - DNA, 27486 bp, Homo sapiens
aaatatcatttaaaaaaataaacactggtttgattcgcacttccctctcgcctttgctatgtctcccagcctcccaccactgggcaccagttcatctattaaggtgttcttggctcccagagttccccacaggttgcaggtcagtagctggccgtccacctgtggtgcctctggggctgctaatgtcctctggggccacacaactgtttatttcttctgagtcctgtggtcatttaaatgccccttaaatgtggcatgggggaaagagtgagtgccacatgcactgtgtgacctcggacaagttacttccctctctgtaccccatgggtacctcagtgaagaggcatctccttcatgggctgtagggctcctgctgctccgaggcctatggctgctcctaggatgggaggtgttggttcttataaatgacataaagtagatgctcaagaggaaaatatgcttaaagttttcttgcaaggtctggaacagtggttcatgcctgtaatcctagcactttggggggctgagacaggtggatcacttgagtccaggagttcgagaccagcctgggcaacatagcgagacctcacctctacaaattaaaaattaaaaaaaattagccaggcatggtggcatcacctgtaatcctggctaccccggaggctgaggcaggagaatcacttgaacctgggagttggggtctgtggtgagctatgatcacccactacactgcagcctgggtgacagagtgagaccctgtccctacaaataagtttccttgcaaaccttctgtgaacttcatttgtcttccatcatccatgctttgattctctgaagtcatcagaaggcaatttgtaggccataacattttgagtaaaacataacgttagtttgattagtcccaaatggtgttctgacaactgcaaagctttgtgattcaatcaggtgggtgttttgtgcctgagaagcaacagggtgtcacattaagagcacagactccaaagttttgaacccctattcagccacttgctgtggcattggacgagggattcagggtctctgtgcctcagtttccttggctgtgaaatagtctaagaatagtacctactgcctagggttgagctggggattcactggggtggtaggcatggagcactgtaacccacctggcccagggaaggtgctgtgtaagtactgtgtattttgttgtggttagtatattatgatgtggcagacagttatgaagtacagacataacaggtgacattcattatcctcctgctaccgccattctcaaccaggggcaattttgacatctggggacatttggcaatgtttggagacattgtggttgtcacagcgtggcggggggggggatgattggcatctcctgggtagaggccagggatgctaaatccttctgcaaaggacagcccctgtggcaaaaaattctctggccccaaatgtcaatggtgccattagaaaccttgccctggccaggcacagtggctcatgcttgtaatcccagcactttgggaggccgaggcgggtggagcacgaggtcaggagatcaagaccatcctggctaacacggtgaaacacccccaccccgtctctactaaaaatacaaaaaattagccaggcgcggtggcaggcagctgtagtcccagctactcgggaggctgaggcaggagaatgccgtgaacccgggaggcggagcttgcagtgagctgagatcacgccactgcactccagcctggaagacagaaaaaaaagaaaaagaaaaagaaaccttgctctaatagaagctttctggtagcaccaaaggcctctctgtcctttgtagcacttgccttggctataattttgcatttattggtatgattatttgcttactacccatcaagtcccaggatgccatttcttggctgtgtgaccttgggcccctgggactgcctttcagaacctccatttccttcatctgcaaatgggattgtaaatatgtgataaattcagagttgaggttaagaccacaggctccagagttaagacgtacctgtgttcaagttgcatctctgctagtggtgaacttaggcaagtcacctgatgaacctcagtttcctccgctgtgaaatgggtctaataattcccttcctcattcagagggtgaatatgggaattaaaggagctcataatggtgaaaattattttattattattaaatccaccatccaacaactggttttctttgagccctaagtatgttccggacttggtgactatgtagtgggtattatgggcttaacgggcaatgtctgccttgcagagcccatcatctcatgatgtgggaggggtctggcctggttcatcctccagcactgacttctgacactcccaccccacccctgccctcttgcagatctgtgccatcattggcgggaccttcaccgtcgccggcatcctggactcatgcatcttcacagcctctgaggcctggaagaagatccagctgggcaagatgcattgacgccacacccagcctaatggccgaggaccctgggcatcgccagccttgcctccagtgccctgtctcctttggccctcaatctggtcccaaatctggctgtgtcccaaagggtgtgtgggaagtggggggaaagtagaggatggctcgatgttttgcagctacctcttttccccgtgtttctttttagacaaattacactgcctgaagttgcagttcccctttccctggggagccccaagaacagagtcaggcaaggggtggggagtccagggatcttggggacccctcctaggagagctgcagtctcttccctcaggggaacatcccagaatgcatatcgatcagctctcagccaggcttcgacaatctcgcagcccccactaggtggacacattaatgatttggtttctcccctgggcagccaacctgccccagaggcaccagacctgggctttcagctttgggaccaggctgcccaaaggtactcctttatacacccggcaccttccacgaaagatggtacttcccaagcaagcccctatgatttgtcactatagatggaaccctgacttctgccccatcccttcctgcccaacctagaacccaggcctcaagtctttaccccacccctttcttgttcttccaagaagcagatgcccagttgctcagcagcagcggtagagacttgaatctgcccaccagtcacaaggcgggtcacagattcctcttcctctcttctcctcgttcctctgaaccctccaccaatgtgcctcagcctgtgtgctgtgtggcaacagcattctggttcccactgccaagatctcccaccactctgctgggatctgcagtggcagggagtgggggttgtgtaaaggggaagtcatcttttgagatccagatagacatggtttgtgcacttacgtccagatgggaagcatccttcctgcaaccctaaaataatcatgcagcctctcagacggacgccatcggtcccaaggccttaggtggaggaagcaaagcaggccaggcctgtcctgtccgtggacctctaccttctggactccctacgggtgcagagcacttgggtttctctacagccatcgtggcccacttgacactgtgctcctccatcagctggtcacatgccaacacgttcccagcccctgaggcagctccagggtgccccacctgctcctgaggtgggtccctaccctgctgctcctcttcatcctttcccttttgtcctgaaagggaggagcaatggtccaggcattaattccacccagggaattttagctatgccctcatgtcccagggagagagccacacgcctgttttccatttatagcaagattgtttgcatacttttgtaatgaaggggagtgtccagtggaaggatttttaaaattatcttatggatagctcaagtctctgccatttgtaatttttggctctaagctccgattggagacgcttctccttgtgcatgtgagttgactgatgttgtgagtgtaaatgcatttggttatttctggtatcggtggccacttggatggatttttttacattctgttccccagttacaggaaggagtccctttggtgtgtgaatatgtgtgcctgtagagggtggggcagggtggggtggggatggaaatgtgtggcatgcacatgagttgaaattcttttatgcatttttttgaagaaaaaaaaaaaaaaacaactctgaggacataggggatgtcagtttcctatggaagagacacctctgacccgttattcttataatcaaaatctgaagggaaaaaaatgttttagttctttccccactcgttgggttcaactagattaaaaggctgattttcagaaatattatggtgtgattctttctaccttgactggggctgggtgacccaaaggctggaatcacagccagaatggaattcacttctagaggagagaaggtagaagagttgaaaaggagatctgtgaggatgatcagaaagtcaaaccccggccaggcacggtggctcacgcctgtaatcccagcactttgggaggccgaggtgggccaatcaggaggtcaggagatcgagaccatcctggctaacatggagaaaccccgtctctactaaaaatacaaaaaatgagccaggtgtggtggcgggcgcctgtagtcccagctactccagaggctgaggcaggagaatggcatgaacccagaaggcagagcttgcagtgagccgagatcgtgccactgcactccagcctgggcgacagagcgagactccatctcaaaaaaaaaaaaaagtgaaaccccctttggccaggtgcagtggctcacacctgtattcccaacacttttgggaggcagaggcgggtggatcacctgaggtcaggagttcaaaaccagcctggccaacatggtgaaaccccatctctactaaaaatacaaaaaatagctgggcgtggtggcaggcacctgtaatcccagctactcaggaggctaaggcaaggagaatcgcttgaacctggaaggcagaggtttcagtgagctgagatcgcaccattgcactccagcctgggggacaaagcgagactccgtctcaaaaaaaaaaaaaagaaaagaagaaagaaagtcaagcccccttagattaagtcattcctttattgagtccctacagaatgttcttgggtctgtcaccttctagctgtgcagcttcagtccaggtccttaacctctcagtgcctcagatttgttgggtgaaaatgaggatagtaataaaactaccacatagggctgtttcagaaatagaatctataacgtgcacagaaattatattagaatgagattgtctatgtagaagagtgtttattgctggtacacagtaagttttcacaaatggtgattggaccattatgagcattcccaaataggatataatcttgagaaaagactaactttagagctttgagctaagggctccataaatgaaaggtgattcataaattcttcttgatttcaaaggacctggcactcctttttcaaccctaagctcagcaatgagagatcatcatcagctatgagcaatggacttccatggatctttcccatcttgctgccaagtcctacaagactttcatcagaacagccctaacacggataaacacaccagggatgaatgtgggagggaatcagtctgtgagaaattcttaactctccccatgctctcgctcttacatcctgatacttgagttatgtgtgttcccaaacgtgtttataccagttgtgcttttatactggtaggatgtgatttggggaactattagttaaaccaatgagctacaagaaatgaacctagtaaaactaagttgaatgctttagagagacttgattaaggtgagttgttacccctcccaactcaaaatgctgctgaatgagaagtgaacaagacaactgtaaaagatttgggaggccggacgcgatggttcacgcctataatcccagcaccgggaggctgaggtgagaggattgcttgagcccaagagtttgagaccagtctgggcaacatgatgaaaccccgtctctatagaaaaaatacaaaaattagtgggcgtggtggcctgtagtcccagccacctgggaggctgcggtgggggcaggggcggcrggggggaagtggggggagtggtggaggctgcagtgaaccaagatctagccgctgcactccagcctgggtgacagagtgaaactctgtctcaaaaaagagagaaagagagagggagggagggagagaggaagagggaaggtgggtgtggagagggagagagacagagaacggaacaactgaagatttttggttggtttatgtaaggaaaatggaggggaacaccgatacaggtttctctgtaaggtagagccttagcccagggtcattgtcgaatgtgttttacgttggcatacaacatttaagggatggatgccatttttattatttctcctttcaatgaacttttccaattgtctaaccagatgtggattacagtggtttcatataagaggatttctaaatcaggattacagagcaaaaccctccaggggtgcgtgacaggttgggagctgtggtgggtccaggcagaaatggcttccctgggaagttgcggaagaggcgtctctggagacgtgcttcgtgaggagagaagctgaagtgttgcaaacaacactggttggggtgggtgaaacctgggaagagggggtgaaacctgggaagaaatggggtgtggcactagagttcataaatagtagctgtggttagtttttttttttttttttttttttgagacggagtcattgcccaggctggagtgcaatggcgcgatatcggctcactgcaacatctacctcccagattcaagcagttctcctgtttcagcctcctgagtagctgagattacaggcgcccaccaccatgcccagctaatttttgtatttttaggagaaacagggtttcaccatattggtcaggctggtctcgaactcctgacctcaggtgatccacctgcctcagcctcccaaagtgctgggattacaggcgtgagccactgcgcccagcctgtggttagtttttattactatatgttacaaataatttttaaattcttgccggaaacaatgtgggaggccactggaggtctcaatcccttcttaagaaactggtcctttattccagaaggttcattagctgctgcggcagttagatgcagtggtccaggaacgtgagtggggatgtgtgtggacaagaatactcactggagacccttttttcttgccctagcagttgtttcctgtcagttatggagtgatgaggtcacgcacttcattctggccagtcattaatatgatttggcattctctgcatgccaggcaagagtgactgctcttcaggccagatcttccttcgagatggatgttatctcctttttaggaaggaggaaacagagagacctcgtaacttggcrtggccacacagtgagtcacacagttagtaaagatggaattcatacccaggtctgcctgactctggrattacgaagaattacatggttccacctcagtcccaaggtcatctttgctgtgccaaaagggaaaactggaaataggggtggtcagagcaggaggtgctttttttggttttgtttttcctttaaaacaacctgcagagaaaatctaaattaaacattcgcagggacagcgttcttacaattttttaaatcttcaaaatgtaattttaattacacaaataacacaggctcataagcccactggaggaaaattatcaaatactaaaaaaagtaaaaggggaaaaacgaaagtcacccgtaatcccactaatcagagatgatcatttaatgataacattttagtgatgccttttgataagcaaaatgggatcatactgttcatattattgtatagcttagccctcacttaacagacatcttcctagattaataaatacggatcgcattattatctttatgggctgcaagataaataataaccatattgagcatctaatggtagattatgtccatcctttgttcccatctcactcagagcctcagttttctcacctgtaaaagggacaattcatactgttatttaacggactgaaatgaggtaatgcttgtaaacctgttagcacaatgcctgacagtaaatgctcagcccattaagaagagccattattatccatctaataaataaataaattccaacatttattaagttcttcctctgtgccaggtattgtgctaagggttcatttaatcctgacaccaggccgggtgtggtggctcacatctgtaatcccagcactttgggaggctgaggcaggtggattgcttgaggtcatgagttcaagaccagcctaaccaacatggtgaaaccctgtctctactaaaaatacaaaaattagccaggcgtggtggcatacgcctgtagtcccagctactcaggaggctgaggcaggagaatcacttgaacccgggaggtggaggttgcagtgagccaaaactgcaccactgcactcyagcctgggcgacagagcgagactctatctcgaaaaaaaaaaaaaatcctgacaccaaaccaatgaggtaagtactatcattattcccatttttcagatgggaataaactgagtgaccaagaggctgaatatcttctccaaagccaaagaaccaggcagtggcagagatccaaacccaagcgatttgggtgccagggctcaagcacttccccatgcagccactgcctcgagaaataaaaagactcaccagacacttcctctgtgctaggtgctttgagttcctgcgcatgtttccaggggtgggcatgagacaagacagccagtctcactacattgttagaatgacagcctccagctcttgtcatccaggatatcattgtgcctgttttaattttactgaaccacacagcatgttaaaaacaaaacaaaacaaagcaaaaagccttccctgctctgcttgatcatggatactccttgatgatcttgggttctcaagatctgtctttacatggctttccttcaccagtgaggctctgaacttcttgggagcactcctccccagatctctttaatcaagacctgtacctggctccatgtaggtaccaaataaattgatgagcaaatgaatgaatgtatgagtaaataagtgggtgaatgacaataaatggatatgtgatagagaaatgagtgaataaacagaaccagtgagtgagtgagtgaatgaatgagtgaatgaatgaatgaactccttggggcagggcatgggtttgactaacacctaaggactattctaagaagaacctctgacctttactgtgtgtgcgccgttatgccagcgtctgctcctgggttgccgataggtaatgacttcctttcttaggactgccccccaacctccttattcttggagcctgggcacacgcacagctgggtggcccttcagctgatactgccttaactgctttaactctgcctgctgtgctgtccaggcttctgcaaatagcccaggtgtggccatcctccagaggcctccaacattaactgtgaagggcccggaataaaacctagtattagtaggccaggcgcagtggctcacgcctgtaatcccagtactttgggaggccgaggcgggagaatcacctgaggtcgggagttcaagaccagcctgaccaacatggagaaaccccgtctctactaaaaatacaaaattagccgggcgtggtggcgcatacctgtaatcccagatactggggaggctgaggcaggagaatcgcttgaacttgggaggcggaggttgcggtgagccgagatggtgccactgcactgcagcccagggaacaagagcgaaactctatctcaaaaaaaaaaaaaaaaaaaaatctagtattagtaaacgcaggtgtttaacaatgtcaccactacatgtcagggaacactgataaactaagagagagcacgggacctgcctgggtgtggctgctgtacttgcaagacatcttccctctctgagtttcagcatgccggcatttggcactaagttgtcgttcaacatatatggaatgaatgaacgaaagggagagttggagttaataacaccttgcatagaataaaccccgtcggttcttaacccgaagagagtcgagacccagagcccttttccttccctgccgccacggtgcccacggagggggcgtggttgatctccctcacagctccgtcgggaccagagacccggggaccttttacacccagggtccgcgcaaagtgtcggcctagccagtggttgggtggcgcccgggcctccaggcagtcttccaggggtcggcgaacgaaacgcggagctcgggagcgacccggcggggccaggcacgggcagaagggccaagagggccacaggtgggcgcggagcggccggagtgggcggggactggatgagaggggcggggtctaggagagaggggcgggggcggcggccacaaacccgcaggcacgccgccggccgccgtttagtcccagagatagaaaaaagtagaggtaggagggcgccggcggctcacgcctgtaatcccagcactttggaaggccgaggcgggcggatcacgaggtcaggaaatcgagaccatcctggctaacagggtgaaaccccgtctctactaaaaatacaaaaaattagccgggcgtggtggggggcgcctgtagtcccagctactcgggaggctgaggcaggagaatggcgtgaacccgggaggcggagcttgcagtgagccgagctcgcgccactgcactccagtctgggcgacagagcgagactccgtctcaaaaaaaaaaaaaagaacaccagtaagcctctaccgcaggccctacacaagcaggcccttgtactcactggcatcgccctcccggggccgccaggaatgaggcactgagatcccaccccaagccgctgggggcgccattcgacttcgctcctacggaaatggggcttcgatgtctttctgcgcttgcgcggcacggaaactcacttccggccctgcgcactcagggtctgaggcagctagtagccgggtgagtggaggctggagttttctcggacagtgaactctaccgccccgtgagaccctgccctatgtgtcgcgggaacacatgtcaccccacagctctctttgagtgacctcccgaccacccattcctgcctaaccctagcattccttcctcagcctcaaggtcccagtgctaccctctcccccacgacccctttagacgggcatgcgacctccacacacgcctcactttatgtgatagtcagactagtcgcatctctctgtcctccctcagttgccttttcagaggmtacctcccctgtagagcctttgttgggggatgaggagtgtcttgggtcgagaacaggcccctgtaacccactgagcgccccttcattccgtctctctccgccctttgtagagggtcaccatgaagttcaatcccttcgttacctcggaccgcagtaaaaaccgcaaacgtcacttcaatgccccctcacacgtgcgcaggaagatcatgtcatccccgctctccaaggagctgcggcagaagtacaatgtccgctccatgcccatccgcaaggacgacgaggtccaggtacgtctccctccggcgctagtggcgctcggacaccgttgcctaagaaygtcatgcgtggagcagtcacagactcacatgcctcaggactctggaaagtagtgtgacccttcagatgtgttaggccagagatagggttcagagccaccagagagtgcctgcgttgctttagagcatttaattatttaatagtaatagtaaaatttaataaaacagtatgtcaaccaagcaaaaacctgcttttttgtttgttttgtagagatagggtcttgctatgttgcccaggctggtctctgaactcctggcctcaagtgatcctcccacctcagcctcccaaagcactgggattacaagtgtgagccaccgtgccccgccaaaaatacttttgatttaaccttctggctgctagtttgccaagtgttgttgcccagggtggcttgttgaaccagactgtaggggaaggtgctgcagtgagagtagtgttttagtatatttgggtgtagtgggattgatggacagagatttgtgggagctggccatgtgatagcattggatttggcaggagaactggtaaagatgcagcgagtcactctttcataatttctaaaagactggcccatgtgagaacgtacaagccctctgttctctgtgattggagcttagaatgcatgagaggagggaagggagttggatatgagtgaaataagcaggggctagattcattcctcaaaggaatatttatggagcacttaccagagattgttctaggacaagattgacgaggcccttgttctcatggagatcacgttttagagcagggtttcctagcctcagctctattgatatgttggactggataattgttgtggggggtggggggtgggggctgtcctgtgcattgtagaatgtttagcagcgtccctggcctctccccactagatgccagtggcactccctcccttcacagttgtgacaagcaaaaatatttccagatattgccaaatgctccctggggggcaaaatcaactcttccctcactcagttaagagctattgtcttagagaatgaaatgacataaggtgatgaggcttggtgtatcatctgagacactgggactctttgaaggtttggggatatgttaaggaggaaaaaatgtggagttaagccggaagtgtgacaggaagagtggaaagagtagttcagaggtatgatcagcagtttcaaccccctctctcctggatccttcccatcagacatgttctagaatgggggaattgcaaatacttataggggataggtagggatagaaaatggcaaactggaaagctcaagcctcacatataagatataatcatctacctttagcccattgatgcctgggggaaatgcaggcccattgttagattcttggattttcaaagagagctggaaaatttggattcacttccctagcccacatttccttccagctactacactttgttctctattcataaccaacctcctcaagagagctgtctacacttcctcatctcccattcactcttggattctcttcagtctattccctgtccccactacattatagaacctactttgacgtagatcactaataatcccttcgtgactgaatccagtggacacatctagcatctctttctgctctgtgttctctacgtaggtaaagaataggtaataatccgttcttagagctttaaatgtctgctgtgtgctaacaactccctcttttatatcccagtccagaccactttagacaacctgtatatctgactacctataacacagacctatagatctgactacctactgaacatctctatttaggtagcccattgacatttcaagcttcttaagagtactcttgatcctaacactctcactgcctccagaatccaactctactcccatcttccacatctccagtaagtgccatttatatctccccagctgcatatgcccctaaacctttgttatctttaacaaygctccttaaccccctcttgtaatctaccatcaaggcttgttgattmtacctccaaagtaagtcttgaacctatttcctgtccagttcaaggcagcattgcagttccctcttttacctttgtccattttccacagagtggtattatttgcaaatcaggtcctatttaaaacctttggcaggctgggcatgatggctcacgcctgtaatcctagcagtttgggaggcccaggcgggtggatcccctgagctcaggagtttgagaccagcctgggaaacatggtgaaactccatctctactaaaaatacaaaaaattagccaggcgtggtggtgcacacctgtaatcccagctactcgggaggctgaagcatgacaatcgcttgaacccgggaggcggaggttgcaatgaaccgagattgtgccattgcactccagcctgggtgacagagtgagactctgtctcaaaaacaacaacaacaacaacaaaaaacggccaggcacagtggctcacgcctgtaatcccagcactttgggaggctgtggcaggcagatcatgaggtcaggagattgagaccatcctggctaacacggtgaaacccatctctactaaaaatataaaaaattagctgagcgtggtggtgggcgcctgtagtcccaactacttgggaggctgaggcaggagaatggcgtgaacccgggagggggagcttccaatgagccaagatcatgccactgcactccagcctgggtgacagagtgaggctctgtctcaaaaaaaaaaaaaaaaaaaaaaaatcctttggcagttttatatctgccaaaactgacctgtacattttactgtatgtaaatgatgcctcagttaaaaataaaatgatttcaaattgtgttcattgctatgaagaaaatataaaggatgctatgatattgattaaaggacctgggaaggcttctctgaggaactaatacatttaagagaagacctgagaaatgaggagttagccaggtgcttaccaatggtgcctgatgtgcttataaaatctaaaatcatggccaggcgcggtggctcacgcctgtaatcccgacactttgggaggctgaggtgggtggatcacctgaggtcaggagttcragaccagcctggccaacatggtgaaaccccacctctactagaaatacaaaaattaggtgtggtggcacacacctgtaatcccaagtactcgggaggctgaggcaggggaatcgctttaacctaggaggtagaggttgcagtgagccaagattgcgccactgcactccagcctgggcaacagagtaaaactcggtctcaaaaaaaaaaaaaaaatctaaaatcattgactgcaaggccctctatgggccaatcctggtctacttctccatcctcatctcctcctaacccccatgtgctctacactttaaccacactgggcttctggggtctttaaatacaccttgatcttttctcccgctggaatgttctctctgcctggagtgctcttccttctctcctttacataggtaactcctcattcttcgggtcctaccttaaatgtccgttcctcagagaagccttcccagatcctttaaccaatattatagcctagcattctttattttttcttcrtagcagtaagcacaatttgaaatcattttatttttaactgaggcataatttacacacagtaaaatgcacaggtcagttttggcaaatgtaaaaccaaatagccattaccctaattatgattagaccattaaaaagaccatttttaatcatcccagtaagttcctatgtgacttattccagttagtggtcatgtatttgtctatgtastcattaactgcttactggccatcaggctaagctccatgaaaccagagagttcatcttgtttgttgtctgacctcagtgcagagcctgacacttagagaggagaagggtcagtcaatatttgttgaatgaatgaaaaaaattttttgagtaggtaagatgtagaaggtgagacagagaaggagggcaaagagggagaaggagctgctgttaaatatatatattttaaattagagacatttatttatttatttatttatttaaaaataggtattgctttgctgcccaggctggtctcaaactcctggcttcaagcaatccttctgccttggcctcccaaagtgctgggattacaggcatgagccacagtgtctggcctgttgccttttttttttttttttttttttttgagacagagtttcactcttgttgcccaggctggagtgcagtggcacaatctcggctcactgcaacctctgcctcccgggttcaagccattctcctccctcagcctcccaagtagctgagattacaggcacacaccaccatgcctggctaattttcatatttttaatagagacggggttttaccatgttggtcagtctggtctcgaactcctgacctcaggtgatccacccgcctcagcctccccaagtgctgggattacaggcgtgagccaccacgcccggctgcctgttgccattttttgaatgcctaagaggtatgaattgtttcagccaaaggccatgctggctgaacacttctccaccaggagaataaaatagccctgattgggtttgttaatattgcctcctctcacgggatcttctgaatctcacttaccttcctctttctctgagtaggtgatggttcctcctactttacagagaaaattgaagttatcagccaggaactttcagaaatcgtggctccacacctacacgtttacctgtagttccacccctcttattttctttcccttctgttacaatgaaagaaatatcccaggcctggtgcagtggctcacgcctgtaatctcaacactctgagaggccaagacaggtggatcgcttgaggccaggagttcgagaccagcctggccaacatggcgaaattccgtctgcactaaaaatataaagattagctgggcgtgatggcacatgcctgtaatcccagctacaagggaggctgaggcaatgagatatcacttgaacccagaaggcggaggttgtggtgagccaagatcacgccactgcactccagcatgggtaacacagcaagtctctgtctcaaaaaaaaaagaaagaaatatccctgtttctgcctaagcctaatccatctgccactgggtgctgctccattcttctcttggagcttttttggtcccttatcttctttctctgtagtttcttttaccgtcttcctccatacttgttccttccatcagcatttaaacacaatcatgttttcccttctttaaaaataaaaaataaaggaaagttcccttagctttccatccccctcaaacatctatccccttctcatcttcagagccaagctcctttggactgtcttttctcaccttcaccttctcacctggtacactcatcactttactgttaatggcctccatcccagcactcagtgaaggcattccagccacagccactgttgatgaccttgttgtcagatctgttaaataccttatcctctgtgttcttgacagtcccacagaatttgacattctcttggctgctgtaacaccacacttgcatgatttcccattcgctctggccacattaatctctcacaagctcttccaaaatgctggcttttctcacatgtgtacmttctgcccttttctcataccatcactccttgagcaacatgaagctcctaattgcctctctgtggatgactcccacgtctctattgctggcccagttggcattccagctgtgtctgaattctctgttagaatgtccccagatgcttcaaatttagcatgttccaaactaaactatttcctcctaaaatacggggcttcccctatgatctctgcatctggcaatggcattgccatccacctggttgcccaagccagactctgagtatcatccttccctcttcatcctcacctctccagtctagtcgaccagccgacttagtcttatcctgtctcctgtcttcctcttcactatgtccagaggttgtccacttctctttttaaaawttttttaaattaattttttattttattttattttgagacaggatctcactctgtcacccaggctggagtacagtggtgcaaaaacaggttgctgcagactcaacctcctgggttcaagtgatcctcccacctcagcctcccgagtagctgggatcataggcgcatgccaccatgtctggctaactatttttttttttttttttttttttttttttgtagagacggggtcttgctatgttgcctcggctggtctccaactcctggactcaagcagtccacctgcctgagcttcctaaagtaccaggattacagctgtgagccaccatgcccggcctaagatctttcttcagtcttggccaggtgcagtggctcacacatgtaatcccagcactttggaaggccaaggtgggtggatctcctgagctcaggtgtttgagaccagcctgggcagcatagtgaaaccctgtctcttaaaaaaagtgtgtatgtgtgtatttcttcagtcttgatggtagttaacaagacttcttccaggtgtgtcctgagagtctctggtcatgtagtctgtggtagatttttcactgagatatgattgtcctcttcaacctaaaaatcgccttggaaaataagccgaacaagctatacgtagacattttaggagtattggggttctctagttctttatatgtggtatctcctctatgcttattaatcagagtcacatcgtacctggtggttttttttttttgaggctgtgtctcgctctgtcgccagcctggagtgcagtggcaccatctcagctcactgcaacctccgccttccaggttcaagtgattctcctgcctcagccccccgagtagctgggtctacaggcgcccaccaccacgcccagctaatttttgtatttttagtagagacagggtttcaccatgttggcctggatggtctcgatctcttgacctcatgatccaccggctttggcctcccaaagtgctgggattacaggtgtgaaccaccgtgcccgggccccatgcatggtgtttaataagctcttgtggctgggcatggtggctcacacctgtaatcccagcactttgggaggccgaggcaggcagatcacttgaggtcaggagttcgagaccagcctggccaatatggcgaaacctggtctctactaaaaatacaaaaattagccaggcctgctggtgcgtgcctataatcccagctacttgggaggctgaggcaggagaatcacttgaacctgggaggtggaggttgcagtgagccaagatcatgccagtgccctccagcctgggggaacagagcgagactccgtgtcaaaaataaataaataaataaataagctcttgctttcaaggaaaccctaatctagttggtttttgaatagagtagatttttagtacagtaaaacagtctgtgagatttaaaattttttttctgactttaaaatatttgtattaaatgtagaaatgttgaaatttagaagaatataaatctaaaaatcagtcatctgtaatcctgcttcctgcctaatggcagctgttaccaatatttatatatatattttatcccactgtgtcatgctatatatatgaaatgtgtgtgtatatatacatatatacacatatatacgtatgtatacacatatatgtatatatgacatataagtacatatatgtatgtatgacatatatgtatgttacatataagtacatatgtgtatgtatatgatacgtgtatgtatatatgacatataaatacatatacgcacatatgtaatatatattatatatatacacacacacatacactcatatagtttgagtatctcaaattcagaatgctccaaaatctgagactttgtcaacgtgatggtcaaaggaagtgttctttggagcttttgggatttcagattttcagatttggggtgcttagctagtaatgcagatattccaaaatcccaaaaaccctaaatccaaaacacttctrgtctcaagcatttcgaataagggatacttgacatatatatgtatatatatatagttcagagtatattctatatgtagttttgtattctcctttttcctctaaagctcatatcgcacatttctgtgggatccaggtaaaaaatctccacccaaccatagcacaacacagatttatatcagaaaagtagctaatttttgactgccaggattaagctgcttttgacaaagttatatgtttagcccatgtgttcctgatggttagcttcctcwttatgatcatgcactacaaatggagggggattctcttttgtattttctcttaggtagttcgaggacactacaaaggtcagcaaattggcaaggtagtccaggtgtacagaaagaaatatgtcatctacatcgagcgggtgcagcgtgagaaggccaacggcacaactgtccacgtgggcattcacccaagcaaggtatggtcaaggactgagtggcagtagcagccatggagtgtgtcaatactgttcaaagttactggtgttttggtactccctgcacagttggctgaggcaggccaggtggacttgattgattcagtagctttgtgatatcatcaaggatccagatttttcttctcttctcttttctgttttgcctttcttggtgatggctgtgtctttttttttttttttttttttttttgagacggatgctcgctctgtcaccaggctggagtgctgtggtgcgatctcggctcactgcaacctccacctcctgggttcaagcaattctcctgcctcagcctcccaagtagctgggactacaggcacacaccaccacgcccagctaatttttatatttttaatagagatggggtttcaccatgttggccaggatggtctcgatctcctgacctcgtgatccgcccgcctcggctttccaaagtgttgggattacaggtgtgagccatcatggccggccgatggctgtgtctttaagctggttgcaagaggcttccaagtgttctaggcatcacttcccctaccacataatattcagaggaataagagagaatatatcttcctgtagccctcatgcctacctagtggaacatgctatttttcctttgtgttcctattttgtattgtgttacagggtctgttttccttccagagtttcagttccttaaaagctgaatggctgaggtcttacttaacttatgatgtctatattgctcaatagctggtggggatgcagaaataaagayctgttttctcactcccaacaggtggttatcaccaggctaaaactggacaaggatcggaaaaaaattcttgaacgcaaagccaagtctcgacaagttggaaaagagaaaggcaaatataaagaagaacttattgagaaaatgcaggaataaatagaacctgttgtgcaaccacggtttaaccggagattttgaggctagggtgtgtttctttcgaacttttcggaatgtctggaacatttcatttcctgttttgttacctrtgcctctgtaaatctacttttgcaattttaagtaataattttatgaataaaaatgggaaatgcttcctaattccacatagtatttgcattgttttataaataaattccacttactatcaattcccctttgccagtcttttcctatttaatgtgtggaacagcaaaatcgcaggggtagggttaaatggccctcctcttgcctggactcttgtgctgatgaagtagaaagggcagggctctagtcttatatagacaggcctcatcatcttgcccaggctggtcctgaactcctaggctcaaatgatcctcctgccttggcctctcaaagtgttgggtttacaggcgtgagctgccatgctctggtccttgacacagggatttgccccactcagtagcagtcgtaatgtgcactgtcacatctcacgcctgacagattgctctctggcctcctgacttgggcttccccagctttctctccaagtgccaactaaaccaaatcatgtgcagctccctgaccaggcttatcttcccaaagttttgactttgcaattgccattttcatgtgactaaaaagccccttttcctctggaactaacttgagaaactggcagcctacaggaaagatttaactgagatactgtttttcactatattttccaacatttaaaatgtgggagactccacagagaatcacctgcttcacctggctccacggggctctccctgttttgcagtgttaagtgcagccaagggcttggcggttccctatcccacctgctctgctcccatacgcttcttgcctggcctccattggcctccgcattagactcctggtctaactttcaagcaactaaatcttcaagatttagttcctttggccaggcacagtgactcatgcctgtaatctcagaactttgggatactcgtgggaggatggcttgaacccagaagtgtaagaccagcctggttactgagaccccaccactacaaaaaaaaaaaaaaattaatttttttaattagaaaaaaagatttaattcctttgagaggtatgtagtgaataaaaatttttagaaaatgtatctccagggccacatccaaaatcctctgtccctgtgggaaaaaaaaaaaaaactttttttgagatggagtctccatcttgcttaggctggagtgcggtggcgctatctcagctcactgcaacctccgcctcccgggttcaagtgaacctcctgcctcagcctctcaagtagctgggattacaggcctgcgccaccacggggtttccccatgttggccaggttggtcttgaactcctgacctcaagtgatccgcctgtctcagcctcccaaagtgctgcaattaacaggcatgagccactgcacctgtcctaaaaaaaaacacaaaaaaatttttttaaagagagggtcttgttctgtcacccaggttggagtgcagtggtgtgatctcagctcactgcagccttgacagcccaggctcaagtgatcctcccacctcagcctcccaagtagctgggattacaggcatgtgccaccacacccagctaatatttaaatttttttgtagagatgggagtctcagtatgttacccaggctggtctcaaattcctggcctcaagtgattctcctgccttggcctcccgaagtgctggaattagacatgagccaccatgactagcctaaaaaataataatgtattgattaaaatgtatcaaacagccttttatgactttctagtaatggtttatctgacacactggaatttcttaataaatgttaattgaatcagtgttgtttcccattttgactgatgaagaaaacaagcttaggttaactgtccaaatcacagcataagaaatgaagccaagatttgaacctgagcctgactgcatcaaaaggccattcacttcccacattagccacttatctttagtcttccttccttcactcttgtcagcctttcactggagtctgataagagactgcatatttatgtggaacagacaagaacctatgtgtttgcagccggtagtgctacttaggaaagcattatcaccaactgtccaggtctaatcctagctctgccactgggcagtcatcagcctttgagcaagttactcatctctggacttctaaacagatgataatacctgctctgccttcttatctcatcgaaaatgcaaagataaaatggcaagatcagatgggccgtttctgagtactctttgaaagctatgagtatacaaatgttaatttcactatcattgttcagtttacttatatgtccaattctgacattcactctgcactcaaagaggcagttatttttcagaaaagaaatcagtgagtttggcagggcgcagtggctcacacctgtaatcccagcactttgggaggccaaggtgggtggatcacctgaggtcagtagttcgagaccagcctggccaacatggtgaaaccccgtctctactgaaaatacaaaaattagctgggtatggtggcgcacgcctgaatcccagctacttaggaggctgaggcacgagaatcgcttgaacccgggaggcggaggttgcagtgagccaagattgcaccactgcactgtagcctgggagacagagcgagactgcatctcaaaaaaacaaaaaaaatcagtgagttcaaaaaccacaaaactcaagatgtgttctctgacttggcattgatacactgaactcactgatacaaggtagacagatactgtcctgtccctggagtcagacagatttgggttcaaatcctgctcttgttcttgggaggtcatttttctgattctctgtttttctatttatgtaaaaagctgccagacacagtggctcacgcttgtaatcccagcactttgggaggctgaggtggaaggatcgctggagcccaggagtttcagaccagcctgcgtaacatagtgagaccccatatcgacaaaataatttaaaaactagccaggtgtggtggcccatgcctgtagtcccagctacccaggaggctgaggtggggaggattgtttgaactcagaaggtcaagattgcagtgagccatgatgacattgcactctagcccgggcaacagagcggaaccctgcctcaaaaataacaaataaataaaagagtaggtgcccaccatacagcagctgtataatcattaacatgctgagctatgtatctaatgagtatagtgagtaggttaactagtaaattctgaaatttatattttctaatttgattcttgtctttgttctcaaccaatacatattttaggactctaagagttgcatgaaagtcagatttcatactaaactcacagctccttactctacagtctgtaacctggtctgagctccaggctccagccattactttcattagtaaatttaagttatgatatcatctaggaatcagacctggcttgttttcagcaacttattccaagaaaaatgaccaataagagctttgagagctgcaatccccctgtaggtatccaaatcataccacactgcttatactgagccaggttgataataataatgcatgatgaagagcaggaactaggcctcaagttgagttctaatcttagctctgtcatttcctagctgtgtgaccttgggcaaactgcttaacctctctgggcctcaggtttgtcatttataaaatggagataaaattagtacttacttcatagagttgtcagacttattacttgagatactgtgtgtaaagcacagagtgctcaggaagttttagctattgtcttaaaggagattggcaatggaattcgttcacaggaacatagagaaaagtttttctccagggaggtgagacaaatactgattcttgaaaaaagggaagggtttaagggcaacagtgatgtgtttgggctgctgcaggaaatgaggattggagaatgccagatgggtgggcctgcctatcaaagttcaggccatggggtattagcttgttttctggaatgaatgaattatacagttttctactgaccttttcatcacatttgcggatgtccattcccttgagtggttcccttctgctattctgggaagatgccaaacttttaaacttcagataactgcttttgaatgtctgctttcacattgcataggcatgagatgttcagccacataattttctttttttttcagacaaggttttgccgtgtcacctaggctggagagcagtggcatggtttcagctcactgcaacctctgcctcccaggctcaagcgatcctcccacctcagcctcccagaactgggactatacaggcacatgctaccactgccagctaatttttgtagtttttgtaaagacgagttttcgccatgttacccaggatggtcttcaactcctaggctcaagcaattcacttgcctcggcctcccaaagtgctcggattacaggcatgaaccaccgcacccagaagccacaggacttttgacgtgagttggatgagcaagtaattgaatcttccaggaaccagacagaacccaactaaccacgagtccagcattctctgctgctgctgcagactttgagcagttcctatctgatagtttaccagagtcttgttcattgtccttttaaactggtattttttaattagataagtagtgcttatatatggtacaaaattaaaaggtaaaacaaaaaagtagacggtgaaaagtatgtttctttgtcaccttgagtctcagtcactcggttctctccagaggcactgtttccagtttcttttgtagccttccaaaaacagtatttattatattcatattcaattgaatgtttattgaaagtttgatccatgagaaagtcctcatgagaaaagcaggccatccaaatttaaacagctatataaggttgatttattatctgaacaccataattacaaaaacatgcacagatatgagaatgttctttgaccatcagaaataactaaattggccgggtgcggcagctcacacctgtaatcccagcactttgggagaccgaggcagaaggatcatgagggcaggagatcaagaccatcctggctaacacggtgaaaccccatctccactaaaaaaaaaaaaaaaaatacaaaaaaattagtcgggcgtggtggcgggcgcctgtagtcccagctattcaggaggctgaggcaggagaatagcgtgaacccgggaagcggagcttgcagtgagccgagatcacaccactgcactccagcctgggtgacacagcgagactctgtctaaaaaaaaaaaagaggccaggcgcagtggctcacgcctgtaattccagcactctgggaggccgaggtgggcggatcacgaggtcaggagatcgagaccatcctggctaacacggtgaaaccccgtctctactaaaaatacaaaaaaaattagctggggatggtggtgggtgcctgtagtcccagctactcgggaggctgaggcaggagaatggcatgaacctgggaggcggagcttgcagtgagccaagagtgcacaactgcactccagcctgggcgacagagcgagactccgtctcaaaaaaaaaaaaaaaaaaaaccaaaaaaaaaaaaaaaacactaaatcaaccactttccaatttattcttggcaagggtggctagttctagaataggcttttaaaggtctcatcttatgcagcagatgatgtctgaatcttgtgaagttgtgtgtaatttaggattctctgtatgccgacttatttcttgaaatgggagaggctgtcagtcggcgccacatgtgggctggtggctctgtggcagtggtggcggctggactccggcaccatgagcggcttcagcactgaggagcgcgccacgcccttctccctgaagtaccgagtcttcctcaaaaatgagaaaggacaatatatgtctccatttcaagatattccaatttatgcagataaggatgtgttccacgtggtagttgaagtaccactgtggtctaatgcaaaaatggaggttgctacaaaggaccctttaaaccccattaaacaagatgtgaaaaaaagaaaacttcgctatgttgcgaatttgttcccgta

SEQ ID NO: 96898 - DNA, 14141 bp, Homo sapiens
  misc_feature (1)...(14141): n = A,T,C or G
gcattgtcaaagatactattttacagaatcataaatattccagagctcaaaatcaagggaccgtcttagcattacaggtaaggtacaagtaaagacgtatgaactttgcttgtacttgcagcagagcacaaaatacaagtgttcgttaccctgcaactaaatccagtgagttgtaaattcgaagagcaggcaaataattcaagatgcttctatgtctgcaatgtctggagggatagaactaggccaagaatgaggtaagagtcaaacaaacacctgatgtaattgtctggataaattaggagaaaatatggtaaaaattacttgactagtttagataagcataattcagcattgacattttcatttaatcattcctatagtatttcatttgatatggacagggtctaaagagacgttaaaagtcaactaaaaattagagaaattttagtcatttcagaaaagattgattttgtatgcgttctgtattgaagaagtgatttgttcaaaagaattctggatagacgcatgaaagatagttaagaaaatagatatttgggttgattaaattctattttgggggccctataggcacaactgggtgtacctgagtcacgctgtagaatctgattccagaagcaactgagaactgactcactgtgttctagagaattttccctgtgtcctttcttgtcatcatttcctgtgttcctgacaccgtgaaatggggttggctgccgtctcaatgtgttcgcttttagctgggttagcggaaaaatcaacaggaataactccaggttctaaagtagtgattgtgaagataatacccaaggcacaccaagaagcactatggaaaatgttattgtataatagtaagtgcagaatgcaggatttaagcttgcatcttcctgcgttcttttttttttattagagatggggcctggctgtgttgcctaggcaggtctcaaactcctggcctcgagctcctcccgccttggcctcccaaaagtgctgagattacaggcgtgagccactgcacccagcctcccctgtgttcttgataaaataagaatgtgtatttcctataggcaagaggtaaatgaaagtacaggacgtggaaacattgtgtttagaaactatctacgatattatgtcgtctttgtgattaagaaaatgagccaggtgcagtggctcacagctgtcatcctaaagctttgggaccctgaggtaggaggatagcttgaggagttcaagaccagcctgggcaacacagtaagacccccatctctacaaaagagtaaattaattaattaattacatttaataaaagttagaagatacattggaaaaattaggtttattgactgtaccacattcacagatacaaatatatatctcctacaaatcagtattacctggaatttctcactaatgtgatcagggaagcagggaaatgaaaacttgagcattcaatcaataaatagttgattgtgcggtggctcgcgcctgtaatcccagcactttgggaggccgaggcgggtggatcacctgaggtcaggcgtttgaaaccagcctgctcaaaaatggtgaaaccccgtctctactaaaaatacaaaaattagccaggcatggtggcaggtgtctgtaattccagctacttgggaggctgaggcaggagaatcgcttgaacctgggaggcagagatttcagtgagccgagatcgtgccattgcactccagcctgggcaacgagagcgaaactccgtttcaataaataaataaaataaaataaaaagttgcttgtctactacatacagacaatgctaggagccagaaacatgaggaatacatgagctcggcgccaatggaacatgctttcacaccgggtgcagctaaccaccacatcatacaaaactcgtcgctgacgttttagatgtataatctgattggcatggactcacagaggagggagtaagggaagagtaagaagatttcaaaggagaggtaattgtgtcatttattagaagtatgagtgtggggtaagagatacgtgtgtatgcatgcgtgtgtgtgaacggacttcttgtttagtaccattttgctgctgctttaccaccccaatctgttcctggacacggcgatggactctgtatatgttatctcattttattctcacaattgacctctggtggtaaaattattctcattttttacagattaaaaaaaaagcctcctttaaagcatttgtaaatctggacataagagcctctctcctaaaattcaagactgagatgctcttctctccttcctctaagcatcagggttctctgtctgcatcctatgcggaccagggcaaaataaacttgaaattcactatgttagcctgtatgcaattttgggtgatgatgggctattggtcgttttgttgttttaaaaaaagaagttagcctttattcatccgagtgccacagtcactttgtgcagtaagttaggtggtgaggtaagcttgctaattaatgggcattttaaaggactttacccagcggcagacaaaattaagccctggaaagaatttagcccagtagccagtcatatgccatgtcgtatagcatacccagccaatggggagagcgaggtgtggctgtggaaaaagacagggttaagcaatttttttaaagcactacatatttattgatagaatatctctccaggcagtattcacatgctttaaactgaagctcgtagcttggcagtgcagtttaagcaaataaactcaggctgttgaacacaatgattaacaggaagcaggggaggggacatagttactagactctggccgggacaagaggctgaggttaaggtcttagagccgatgacttgcagaatggtcacctcacccacttgtaatttcatggtgggaacaggtggaccccctggaatcagaacctctctgaggacatctgtttttgtgtagacacaggttgcaggttagcaggagaacaggcaagccaaatgcaaaggagccacttcagaaatgtgtcacagaaaagtgaaaatgcaacctagtggtaagtgaagaggggaagaagaaagaaaaaggaccagaaccgtgaactgaagggacagggaacagccagacgagagcttcagccatcacgaggatgatttcggaacctggagaaaatgtaagttaaatatatctacactctgatcctatctcaagagagagatattttactcatttcctggttgtgaatgatgggctcttggaagcactgtctttttagcgcgtctcttatctctgccctgatttttgtatttgtttacaatactgagttatgggagaataaacgttttctgagggcagctctgtccaatgcttcactgttagcagaagcctgtcatcagatttttgaggggaaagttttttacccaacagaaaatgcattgaaaactacccttgatgaagctacctgctatgagtacatggttcgaagccactatgtaacagaaacactctctgaagaagaggctgggttccctttagcttacacagtgaccatccacaaagacttcggcacttttgagaggctcttcagggcgatttatatgccccaaaatgtctactgtgtgcacctggatcagaaggcgacggatgcctttaaaggtgcagtgaaacagttactcagctgcttcccaaatgcttttctggcttccaagaaggagtcggttgtctatggggggatctccaggctccaggctgacctgaactgcctggaagaccttgtggcctctgaagttccctggaagtatgtcatcaacacctgcgggcaagactttcccctgaaaaccaacagggaaatagttcagtatctgaagggatttaaagggaaaaatatcacccccggagtgctgcctcctgaccacgctgttggacggactaaatacgtccaccaagaactgttaaaccacaaaaattcctacgtgattaaaacaacaaaattaaaaactcctcctcctcatgacatggtgatttactttggcacggcctacgtggctctcacaagggactttgctaacttcgtcctccaagaccagctcgcacttgacttactctcctggtccaaggacacctacagccccgacgaacatttctgggtgacactcaacaggattcccggtatgtacgtctcttaacttttatttttacgaataaacactgcatggtcaatactaaataagttgctttgaaaagagtggaaaaaatgggacaaacttctttacggttttaaatgtcaaattaaaaaaaaaatttcatctgtaaaatggtaaaatggagatgtgttatatcacccactcttgtgaaccgctctgttcacaggacaaaagaccgaaggaacactggccatataaataaaaacgtgaccgagcacagtggctcaagcctgtaatcacagcactttgggaggcggaggcaggtggatcacttgaggtcaggagtttgagagcagcctgaccaacatggtgaaaacctgtatctactaaaaatactaaaaaaattagccaggcgtggtggtgcatgcctgcaatcccagctactggagaggctgaggcaggagaatcgcttgaacccaaggggcggaggttgcaatgagccaagattgtgccactgcactccagcctgggtgacagatcgagactccatctctaaataaataaataaataaaatgtaaaccttattctcctttaagcgcaacgcatttaaaatcaggaatatgtattataaataaaatttgaatgacaatttgaagatttcataatatttttgtctctgttgaagctcccatccttttgaaatgggagcaagatacaactttcaaattttttatttgcaagctcttttctggtcttgaatcaaaaatctaaagcatggccaggcatggtggctcacgcctgtaatcccagcgctttggaaggctgaggcaggaggatctcttgaagccaggagtttgagaccagcctgggcaacatagtgagacactgtctctattttttttcaagaagttaaaacaaacaaacaaacaaaaaaaccttattgcaccttaaagatttctaggctgagcgcagtggctcacacctgtaatcccagcactttgggaggctgaagtgggcggatcacaaggtcaggagttcgagaccagcctggccaacatggtgaaaccccgtctctactaaaaataccaaaaattagccaggcgtggtggcgcatgcctgtaatcccagcttctcagaaggctgaggcagtagaatcgcttgaacccaggaggcggaggttgcagtgagccaagatcacgtcatcgcactccagcggagactctgtctcaaaaaaaaaaaaaaaaagatttctagactagtacctccattttatagatgaagaaacttcaatgtgattacatgatgtgctcaaatcccacagctagtaagcaaatgcaccaattataaaccaggtctcctaagcctgatgttctttttaggttgactttcaataaggtctcaattgttgctaaatcaattccatctctcctttggtccaagttccaaatgatttttgaataatctcaagttgtttatagtgaaccaatttagtcctgctagttcaattcaaaataagaattcatatttgcagttcaaaggaaaaagtaactggaacctgtatgaagatcacagtcctggtttctttggattgctggttcaaccctggatgcacattacgatcatctggggcttctaaaaataactaagccagggcctgtttccctccttggggcaagacctaactattgatatttgtacagcttccaagtgattctcatgtacagccaggggtgtaaaccattgcaggtgcttgttttagatattggcatacaaagcttcataggcttagaattctctttaagtctgtgattttctcagagccagaaggggaagtatagtgatcaaaagaaattagggctcaggaaagtctggtggggaaagcacagagctgtttaaatagaattgtagtgtccagagtaagggaagtgaaagcctcacttctctcccatgtgcttggagtaggatgtagactcttcaggtctggccaccctactatacggggagacattgacacagcagttccaaagagagcagccagggaggtaaaaaggccaatccccacttttttttttttttttttttagagaagaccaagacaaagaaaaaggataattgatttggaaaagacttgaagagggatyggtgtctttacctaattaaaagatttgctcaggaaagagaaattagaccaactctgtcgttttggaagtagaatctagggccagcgggtgggagatgagaacacatggagctgggaataaaacgggcagcttcctcaatggtgagcaaagccaagggaagcagggctggggaagtgctgctgaggaaacctcaaggattggaccggatggcctccgagtcccttcccactctcagagtctgtgatcctaatcaggggactcaacagaaacttaagggaaaccccctgacttctcgactcgatgtatctattggagctggatttttacaccccgtgttagcagtaacagattggcaaagcaatagaaaacaaatgcaccaattcatgtttttcagaaacttaacaaaagttagcccctgaagtcatttctgtgttatgtgtgtggaggaacactgccggaggaccctgaccagctctgccaactcttttttttctttttttggatctcactctgtcatccaggctggagtgcagtggcacaatcacggctcacggcctcaacctcccaaagtgctgggattacaggtgtgagccacacagcacccagcccgtgctggtcttgacctcccaggctcaagccttccaagaggctgggactacaggcatgtgcccccatgcctggctaactttaacttttgtagagacgaggtcctgctgtgttgccagtgctggtctygaactcctgggcccaagcgatcctcctgcctcagcctcgtgagccaccacatcgggcaagccctgccaactctttcctgacctgaggcagggctgaatgtaggaggttagggaattagaaacctaagggttgtcttgtttaattattattccggctatgtggagatctgagccattttccgttgtaagggtccttctggttgatgtgtatatgttgtggtttttgcttttttttttttttttttttggcaggtgtgcgaggganattttgagattgttccaattcattgtcatgattgagggattatgattaggattctgtaaagtaactagtccaggccaggtgtggtggctcacgcctgtaatcccagcactttgggaggctgagctgggtggatcgcctgaagtcaggagttcaagaccagcctggccaacatggtgaaacctatctctactaaaaatacaaaaattagccgggtgtggtggcacgtgcctgtaatcccagctactcgggaggctgaagcaggagaatcacttcagccygggaggcggaggttgcagtgagccaagatcctgccactgcactcgcgtctgggcgacagagtgagactccatctcagaaataaaaatttaaaaaaaaattagtccagaaaaacatctcacagctgaagtggtctcatgggaagggagaacagcactgcccaataggaatgctataatgggagccatagatctaaaatcaaattttagattttccaggagccacattaaaagaagtaaaaagaagcagataatatgaatttaaagaatgtattttatgccaggtgtggtggctctcgcctgtaatcccagcactttggggagccgaggtgggcggatcacttgaggtcaggagtttgagaccagcctggccaacatggtgaaaccccaactctactaaaaatacaaaaaactagccaggcgtggtagcttgtgcctgtaaccccagctactcgggagactgaagcaggagaatcgcttcagcgatttaggagaaccaggaggcagaggttgtggtgagttgagatcatgccactgtactccagcctgggtgacagagcaagactctgtctcaaaaaaaaaaaaaaaaaaaaaaaaaaagaatgtattttatttaactcagtttgaaacatcacttttacttgtggcctgtggctgcgaccacaggcaggggaggtggaccacgcatcctcattgctggtgcagtggtcaggctctgccgccctagcagcaccgagacgttggccgtcctcatgtcgcagagtctccacctctgctggttttgctttgcctgcttctactttatttgaaattcttgcctgtgcttcagcacttcccctggtttatgggctcctccaccctgtgggttctacttcctatgtcttcccctggtatctgccagattccatgctgctcttttttttttttttttttaagatggagtctcgctctgtcacccaggctggagtgcagtgatgtcatcttggctcactgcaacctcctcctcctgggttcaagcaattctcctgtctcagcctccgcagcaccagggattacaggtgcatgacaccacgcttggctaatttttgcatttttagtagagacggggtttcaccatgttggccaggctagtcttctgacctcaggtgatccacctgccttggcctcccaaaatgctgggattacaggcgtgagccactgtgcctggcccatgctgctctcttgacagcaagtgctctctgtgtcccattcagatgtccccagagagtcctgccttgggtcatgcagccattgtattaaacaatgaggatccccgttctcattccacaccacctctcaggctgcggctgacgtctttgcaggcagctgccctttatgtagccccaagttgtccaatcagctgtgaccagggtggcagggtcatgtggtttaaaaaagcaaagcttgggtaacacagataccttgtctctacaaaaaaaaatcaaaaaatagtcaggcgtggtggcatgcactgtagtctcagctgctggagaagttgaggcaggaggatcacttgagcccaggaggtcaagggcacagtgagctgcaatagcaccactaccctcagactgggcaacagagtgagactctgtctcaaaaaatggataaataaataagcaagcaaaacaaaacatgggtccgggcacagtggctcacgcctgtaatcccagctctttgggaagctgaggtgggcggatcacctgaggtcagaagtttgaggctagcctggccaacatgatgaaaccccgtttctactaaaaatgcaaaaattaaccgggtgtggtggtgcatgcctgtaaccccagctactcaggaggctgaggcaggagaatcgcttgaacctgggaggcggaggttgcaatgagccgagatcgcgccactgcacttcagcctgggtgacagagcgagactccatctcaaaaacaaaaacagacaaaaacatggtccatccagcaggtcctctggaggcctctcagaggataagactctctgcatggcctgctcaggtgaaggtgcccatgaggagaacagtgttacagaaagggggttcacatatggctttaaagatgtccaagaagcctcactagctgttatgaaattagggcttcctgccctccctttttcctctccccacttccgtcttttacccttaatctggtccacaacaagatggcatgccttttagtttcttgtgtgattcagctgtggatgatttccatttataagcccaagatgcaagttcatccacctcccactttcctcctgagttattattgatcctctgggttggatggctctgcctgtaatagggacattcagtgagtttattccattggtcatgtgtgccttgaattttacacatttcaaaactgaccagtgatttctgtttcacttgctacaaaggagtattttgaatataactccatgggagtttgtttcaaactcacattaaaataggaatgaatgcaaaaacagcctttcctgggagcaggctttgtgggcggtgggaggaaggagtgccaaggtgtccaaaggggaaggaatagagaaaggaagatacctggtgggtgattgagggcccgaaagacagaccctccctgcttccaatttgtttttcccctggagccagcctgcggactagccctattggatattccatggcaggcatcttcccctgaaccctaaatgtgggtggctcattgtatttctatttcctgtagagtccatactggccttactctttgtcactgtttgaggctgatatatcccgttagttcctctatatgtaaaaatgcaatgctgaggttccaggtgccgagaccttgagagatgcaaatttgggagcagagaagggcagatccgaatcaaggtggtcttgggaactcatccttgagccccagggatgtggctgggatcttactgtgtgcagagggaattgatattccccaaaccaatcgagcacacagagcttctgagatgctaggcgaatggacagacttgaaggggaggaagatttggggatttttactattagctccgcttaagcaatctctgtttttttatatctgccagaaatatcggtttttgtcaacttcttcttttttttttttgagacagtcttgctctgttgcccaggctggagtgcagtggcgtgatctcagctcactgcaagttctcctcccgggttcacgccattctcctgcctcagcctcccgagtagctgggactacaggcgcccaccactgtgcccggctaattttttgtatatttagtagagacggggtttcaccatgttggccaggatggtgttgatctcttgacctcgtgatccacccacctcagcctccaaaagtgttgggattataggcgtgagctaccgtgcccggtctcttgtcaacttctagaaaaggaaatcagagagttgggacacctgtgagttcctttttttttttttttgagatggagtctcactctgtcacccaggctggagtacagtggcgcaatctcggctcactgcaacctccgtttcctgggttcaagtaattctcctgcctcagcctcccgagtacctgggactacaacctctgcttcccgggttcaggcgattctactacctcagcctcctgagtagctgggactacaggcgcccgccaccacgcctggctaatttttgcctctttagtagagatggggtttcaccatgttggccaggctggtctcgaactcctgacctggtggtctgcccacctcagcttcccaaagtgctgggattacaggtgtgagccaccactctcggccacctgtgagttcttctcagggaaacagtttcttaggaaggtggtaaatggcctgacagacttcattttttaaataggtagattatcaagaaaacaatggcattaatcacttccctagaagaagaaaggaagagtttaatctgcaagtgatcttatctttgctaaccattgtcttccctcttcactgatcactgagtttgttcttcgggcattctgtggctcacactctatccttactttcttcttcctccttcccagctaagttagactacagatgctcttcgacttacagcggggttacatcccaagaaactcatcgcaagtggaaaataccataaatcaaaaatgcatttaatggccacgtggggtggctaacgcctgtaatcccagcactttgggaggccgaggcaggtggatcactagaggtcagaagtttgagaccatcctggccaacatggtgaaaccctgtctctactaaaaatacaaaaattagccgggcgtggtggcgggcacctgtaatcccagctatttgggaggctgaagcaggggaatcgcttaaacccgggaggcggaggttgcagtgagccgagattgtgccactgcactccaacctgggcaagagggagattctgccgcaaaaaaaaaaaaaaacaaaacaaagaaaacgaaagaaaatgcatttaatgtacctaatctaccaaatatcctagcttagcctagcctcccttaaacatgctcagaacacttacattgttagcctaccgatgggcaaaatcatcttacacaaagcctattttataataaagtggtgtctatgtcatgtgatttcttgaatacagtgcactatagagtacagtctcagttgtttaccctcatgatctcatagctgaccgggagctggggtggcctgccactgctagcatcatgagagagtatcctaccgcacctcgttagcctgggaaaagaccaacattcaaaagtcaaaatatggtttctacttaaatgctcatggctttcacacatcataaggtaaaaaaaattataagttgaggccaggcgcagtggctcacgcatgtaatcctagcactttgggcagctgaggtgggcagatcacctgaggtcagcagttcgagaccagcctggccaacgtgatgaaaccccgtctctactaaaaaggcaaaaattagccaggcatggtggtgcacgcctgtaatcccagctactcgggaggctgaggcaggagaatcgcttgaacctgggatgcagaggttgcagtgagctgagatcgcaccattgcactctggcctgggcgacaagagtgagactccgtctcaaaaaaaaaaaaaaaaaaaaaaaaaaaaaatatatatatatatatatatgttgaactctcataagtcagggaccgtctgtattctttcctgaatttatacccatgacaccttaaatataaaccctgatagatctcatggcatctatgttttgttatggaataacaggcttagttgctgaaagtcataaagtgacacagcacaactgaggactgctaatgattttgacttttttttgagtttataaaaagattgtaatttccccagatcagaaattgccccaatatgtagtttaattgatttgtatgcattttatgtatccatatatattaccatcaaaaatggcttacataataatgataatgtatataaatagttttgctttgccaattataccatcttctgggatctcagaggaataaccagagacatgaccctgttttaatattctgttgctcctttaggtagcaatttcctttttaaaaccaaaaaataatgtttcttcctatggggacctatcttaattttatactgaggaagctaaaagtagtttgatgagaaagaaaaaaataagggttgggcccagctggagtatagtcagatgacatcaattagaatgcatttaagatttaagtggactggtgaatggtttggaaaaatagtctaaagatttgtttactctctattagagttggagagtagctcacactcactggtggggtttagaaacaaacaggcctgagtttaaagcctatctctacagctcaccgtctcttttttttttttttttttttttttttgaggcagagtttcacccttgttgcccaggctggagtgcagtggtgcgatctcggcccactgcaacctctgcctcctgggttcaagcgattcccctgcctcagcctcccgagttgctgggattacaggtatgcactaccacgcctggcaaattttgtatttttagtagagacggggtttctccatgttggtcaggctggtctcgaactcctgacctcaggcgatccgcccacctcagcctcccaaagtgctggaattacagacgtgagccactgcgcccggccccgccatctctttaactttgggcaaatgcctcatttcactgagcctgattcttcatctatatcctggggataaaatatctctttgtaggactgttgaaggattagagagtacacaaactatacctggcacatcatagaaactcattaaatggagagagagagagaaaacagatgaacttctcaggtgttgatttttgaggttttaatgttacgattctaaaaattctatgtgcaactaaaacaaaaaacaaaaccttctaacatttggttttgaaagcataaggtctaatttttggttagaaatcaggtatgtgaggccgggcat

SEQ ID NO: 96899 - DNA, 39723 bp, Homo sapiens
catgttttgggcctgacaaaggctgaggctttctgctgcctgccctgcagctgcctgcacccacccacctgggcgggctgcttgggcaaggttcaggggtggtcctggctgctcctggagagtgggtgtgtgaagctggtgcccagaggctgagggatgcccagcccctgcccgcccagcacacggaacagatgtggttgcagggctggagagcttgggggaccaggagcttagagcgtggaggttgcaagttgcaggaccagtaactgggtctggagggaggtttgcagcggctgtgtcagccctgcaggccgagtgtggcactgggccttctgctggtctgagcgggggtctcagggtggaggtcagcaaaagaggcttagtgggggcttagggagcctgggtgggttcccagagaagctaggaatcagatgggaagatgggaaggcagtgtgtttccgtgttgggcaaatccagcgttttcatgccacggaagccaagaaagggctcacggcctccggcctcacagggctacgcaaagggggagttgaataaacacggtgacgggccccgggcggcagctgctcccggcactgatcctgctgggccagcggtggacttgcagggcccacatccggagctgcccactggtcctcgtgctgcacagccttggaggatctgaggctggctcagggtccctggcagcaactgccctgctaggtgggggctgctgggttccacagctgggccctccctgccggctgccaccaggcggcgctgcacgcccacgctgagtggggcaggccctggagcccctctgcccgggcagcctgacggcccctcctcctcggctgagaccgcagagtcccaggcatcacccactgaaagtgtgctcagtgacctgtgaatagggatgccacgtctgcgtgcagacattgattaggcgcctgtggtatacctggagctggagggtgtgcgtggacaacaggcagaaaggtccagtgggatggaggctgccaacaggacgatggggaaggggcgcgttggggacatcgccgggcacgcggcccaggtgggcccctggctcaggtctccccccacctccctgcctgggctctgtccatctttctgccgcaccctcagccccaggtgtgggcccaccgtgcttgtggacgcctcatgctctgtaccgggtgggaggtgtgggagttacaggtcagggcagccttgggagacgggcaggtttcctggggtgcttaccggcagatggggcgcctgggtccgtgcagggtcgtccgcccgagaaagcagcccctcacccctgggcactaacttcatcttttttctttgcacacagaaacgtaaacctgattcacaaaagtataaccactcagcatgtagctttgtacacctgccctcagcatttagtgtcctcgttcatccaacaagcatctaataagcactggggtacgcagtggtgggtgtccgccccgtcactgggtgtccagcgtggggtgcggaggtggatgtccaccccgtcggtgggtgcccggcgcggaggggtgcggaggtggatgtccgccccgtcggtgggtgcccggcgcggaggggtgcggaggtggatgtccgccccgtcggtgggtgcccggcgcggaggggtgcggaggtggatgtccgccccgtcggtgggtgcccagcccgatgtccaccccgtccctgggtgctcttggtggcaactcgctgaagcctgcctcggtttccccagaggtgagatggggaagtcaccaccgccaggtcatgagatgagattagatcatccttgccaagtatcaggaaaaggcctcagggctcccctgggaaccttggggtctcaggagtcccagctcccagtgggcaggggtagggttggggcggccagaggaacaagtgtttgttcatgggctggaccccaccgcggccccaaagctgggctgcctattcctgtcctgggcaaattggcctctcctccctcttaccccccaccccagtgggagcccacaaggacagggcctgccccatcccctccactctgggctgtggctctaagcagcacgtcccactctaggggctcagggcagggacagtgactcatccaaggtcccgccgtggagggcagagctgaaggagtgagaaggagctgctgacatggaactggcccgtgcggaaagactttggtcttccccatatttttcaccaggctcctggggcaaggtgagcccagcagggagaaggaaacttgtgtgaatcccaggccagcaggactgggggccctgctctcatcgcagacgctgcagacacggaggcctggggcaggggccctcagggctgtgctcctgcagagatggagcttgcgtgtgtggctgagactgggatgccaccccctttcctaagcctctgtttcctccgctgtaaatgtgggcccaggcctgccatgcacagctcatctctttaattttctttttttttttttttttttttgagacaagggtctcattctgtcacccaggctgattgtgcagtggtgttgatctcggctcgctgcagcctcgacctcctgggctcaagtgatcctcccacctcagcctcccaagaacctgggaccacagatgacacgcacccctccccctggctcgtttagtatttattgagtcaaactgcagattttccaggcgggctcagtgcctgccctggcctgattttgtcttcctggtcttaaactgcttttcactccaaaggccccaaaattgtataagctttcagggcgtgcgacctggacctgtcctgactaagtgggaaatgtaggtccgaggttggtaaatccggtaaacaatgccgagagaggctgcagggggcggggagatggggaagaccctggggagggaatggcagggcctggggaggttcagcgaggaggggtctgggagttcggggtccagtgacccaggcacacaaaggccagacttgggcggaggagtacaagctgctggagggacccgggctttcttccaaaggcactgggagctgtgagtggttttaggccacagaccgatgtgactgactgaggggccaggccctggggctccatgctccctacacaagccaggtgcggtcccacctcaggaccctcgcacaggctatgccgcctgcccagagcttcctgcagcttcccgggccgcaccccctccttcaggccttctcccagcacctggccccctccccaccctgagtgtttggacaatgctcaccaccttctgctggacagtatcttacttgctactcataaggttgactgtgatacccagctttctcccctggctggctctctgagtcagctgtactggcctctgagtcaatactcggcctggagtaggtgcttaataagtttttgttgattttttttttttttttttttgagacagagtctcgctgtgtcacccaggctggagagcagtggtgccatcctgactcgctgcacctcccaggttcaagcgattctcctgcctcatcctcctgagtagctgagattacaggcatgtgccaccacatccggctaatttttatattttttattagaaacagggttttgctatgttggccacgatggtctcgaactcctgacctcaactgatccgcctgcctcggcctcccaaagtgctgggattacaggcgtgagccaccgcgcccggcttttttttttttttttttctgagacggagtcttgctctatcaccaagcgctggagtgcaatggtgtgatctcagctcactgcaccatctggctcctgagttcaagcgactctcctgcctcagcctcccaagtagctgggattacaggcgcccaccaccacgcctggctaatttttgtatttttagtagagatggggtttcaccatgttggccaggctggtctcaatctttaaatattttttaaattaaaataaatgagcatggctgggggggtggctcacacttgtaattccagcactttgggaggccgaggcgggtgggtcacctgaggtcagcagttggagaccagcctggcccaacatggcgaaaccctgtctctactaaaaatacaataattagccgagcgtggtggcaggcgcctgtaatcccagctactccggaggctgaggcaggagaatcgcttaaacccgggagtcggaggttgcagtgagccgaggtcacgtcactgcactccagcctgggcggcgacagagcgagactccaactcaaaaataaataaatacataaataaacagataaatacagagtactccggcctgggcaaggggtcagagtgagtgtgccgaggccagggagggtccccgtgcacactgacaggcgctggcctgggtaagcctgtgggctgcagagccgtcgccaggatctggtgacaaggaccccgagccacagcctcccttgtgacttgcgggttctgccggcgcctgcaggaggcgtctttctgcttctcccactgccaggcatgggcggttctcgtgccgtgcgggtcccgcctcctccctgctcccagccgcgagccctggggctctggcgacctgcccggcctgacatcttcccagggtgaacataaaagaacccccttcagctggagcacgcatctgcctcggggcgggccacagcctggcactgccaactgtgccgcccgcccggcctctcccgcaccaccttgggacaaacagctgtcctgcccgcctatgcggaggtggccggcggggccggcgtgggggcgcagggatccccagggtgtggggcagccaggccgaggcgagagacacggtcgggctcagcccatccactgtcagccgggcacatgctggccctccctcaagtaccactgagtgcctcctgggtgtaggaagagggccatctctgccccggtggcctcgaggtgcagatgggtggggggcacccggcacacgggacatcgtggctgagaggacgtcaggccaggtgccaggagggtcccaggagggcctcctgcctccaggtggggatgttcagcctccacttcttcgagtgtgactgtctgtctcctctctctcacttgccagcttcctcacctgccccctcccggctgtctggtgggctgggtggctagggacagaggcctcatgtcacctggcaccaagcagcacccacgcccagccggcttcggcccagaagcagagccttgggaagcacctgtctcagagctggggactggaggcactgggggcacagctgcacccggagtccgaggggtcggggaaaggaggcaaccccggggcagggggctctggtacccgtgcgaaggcgctagtgggctttgggtctccctgtgaccccaatctaaagcccaccagacctagaggagacccccgccgcacggctccccagggcactgtttgaggggtgggtgggaaccccacaccctcgggtggcttttccagttttccttgtctggctgggcttggcctcagtttcctcaaatgcagaccagggagaggagtgcctgagtctcccagaacggcgcccaagccggcctgcccctccccacgcactcaagggtctctgtccagggcccacaggcgacccagcaagggctcctgtgacctttagaaacaccctttcgtcgtggaagtcttcaaacctcacagaaagcaaggaggcgctggccgtggcggcctctcccgtctcccaggcccgcgtccaccctccccgcgccggtgccctccggacagaggtggaagccgcggcgcaggagaggcggctccggccgggcagcggggcccggtgaccttgggcgcgtccttacacgtcgcgggcctcagtttcccctcctggggagaggcccgcgcggggctccgaggcctcgggccgcgtgaccttggggcgcccccgaccccgcggcccgagtttcccggcgccgagcggaggcggcgcgcggggagggggcgcagccgaggcgggtctcccgcccccgcccctcccccgcccctcccccgccgcgaggctccgccccccgcggctccgccccgccccgcccccgcctcccccctccctcgggctccggccggcggcggcggcggcggctccgctccgcactgcccggcgccgcctcgccatggacgcgcgcgggggcggcgggcggcccggggagagcccgggcgcgacccccgcgccggggccgccgccgccgccgccgcccgcgcccccccaacagcagccgccgccgccgccgccgcccgcgccccccccgggccccgggcccgcgcccccccagcacccgccccgggccgaggcgttgcccccggaggcggcggatgagggcggcccgcggggccggctccgcagccgcgacagctcgtgcggccgccccggcaccccgggcgcggcgagcacggccaagggcagcccgaacggcgagtgcgggcgcggcgagccgcagtgcagccccgcggggcccgagggcccggcgcgggggcccaaggtgtcgttctcgtgccgcggggcggcctcggggcccgcgccggggccggggccggcggaggaggcgggcagcgaggaggcgggcccggcgggggagccgcgcggcagccaggccagcttcatgcagcgccagttcggcgcgctcctgcagccgggcgtcaacaagttctcgctgcggatgttcggcagccagaaggccgtggagcgcgagcaggagcgcgtcaagtcggcgggggcctggatcatccacccgtacagcgacttcaggtaccgcctccgggagggccggtcggcgcgagggggcccggggagccgggcgcgcggggagccgtccttggagcgcctggggagggcggggcggcgcgccgggccggtgacctcggggctcctcggtgacctcgggcgtgtccgggacccgccccggagtgaccccggcgcgcgaggctccgcctctgggggggctccccgggtgaccgcggagcgcccccctcccacgcaccccgacatcctccgccctgcggcgcggcgggtggggtgggccgcagggccagggtctgagcgcagaggggcagagaggacgaatagaggggaacgtgggccccagagaggcggcggagcgggagggaggaggaacgaagggcgcccgggaaggacgcgccccagggaggccgggggagagggggttaagcggctcccacggcgtccacccgcgccccgcctgcgaggaggcgcgcccggggccgcgggcctggaaagcgtgcgggtccccaggctgtgtccccgggagccgctccacccgagccgcgggcggtgcgcgcatgcggcggtgggtgtgtagacgccgctgtggatccagccggctaatgcgtggaaggctcggagcagggccggcgcggggccaccgccactgatgtttgcggtcgtggttcctgggctgtgcgtgctgtggccggagagcgagaccggcgcgtgtccccgtgggctgtgtgtgaacaggggcccgtgaccgcggcggggttcccggggcgcgagcctgtggccggagaggtgtgtctccaggagtgtgtttgcgtggtggtcgcgggcgtgtgcgcctccggtgggtttattttggtgggacgtgtggtttgtgtgtgttgggaccaggtggcgggcgtgcgcgtgtacgcccggggccggtgtgcaccggtgggcagtagtgtgagccgcaggcaggtctcacacacgcgaccatggagggatgcgtgtgtgtttgtgtatccacgagtggggtgtgaggtggggtgtggagggtgcaggtggagggtgtaggtggggcccgccgggctagcgaggccgggcgcgcgggacgggcgcggtttcagcaccacggacagcgcgccggacctgggaagcctgcggttttcccgcctgtctctcctcctccaggcctgggcgccccaggacagcccccacggaccctggacccccggaactgggcagggaggctgtggggttctctcttcccctggattctctgcacccctagtgcttgactggagaaactgaggcctggggcacatgcgtcctggacagagcctggaggaaggccctggaatcctcctcccaccccaggccttcctgagaggtgaatacagctttgaccagaagcctggatttcgagacaggccaggggtgggaggagccccgaaatccccagaggggctgtgtccggcccctcccaccctgcctctgtgccccaccgggagagcttggtcagcatctgggctctggcctgcgaaatgtggacagtgagcgggaaggactggacttccagggctgctggtcggcctggccccacttccagtcgggcagtggcaccccctgaccggagagggacgcggtggagagggagctgtagaacgtgcccactcccctccgtcccctccagcatgaccttcgacagagatgggtgcaccgcagcgtgggggctggcaggtggaggcccacaccagccactccctcccctgggcagctccagcgaccccctggctgcagaggggcggtcggtggcctggggggcaggtgggcagatggctgatcccggggcttggggggaaggccggtggtaggagtgaagccctctcatccttccaccctccttgggcgtggtcgcctggaggcctgggcaggctgtggccccgctctgtgctctgaggcatagagggctcagaggcccctgtgtggaccaagtgcagccccaccccggcagatgagtgttgaagtggaactgagcaggcagggaatggggttagcggggcctgtcttcgggactaggggagtcacggcagtcagattttaaaaaaggatttcgatgttgccaagctgggtgcacggggcccctaggaccctccccaggcttgggacctgtgccagtgtggaatcagtgtggaaaaagacccccaagaatatctcaaaagctccctaagcaggcggccggaccctgctgtggagggtgttttggggcagcccacagcaagcgaaggggcctctacgtttgcagctgactcaggagcctggccccaactggcttcgggcccaaggcctcctgtgcctggctgggtgtcttgggtcctcgctgggcccctctgcctcagtttccccaattgcacggtggggatggtatgagggagaaggatggggtctttcacagccttgccagtgtctcagcctcacgtctcacactctcttcacctccccttcctgctgagagagtgctgtgctccttgcccagcctgtgccccccaggcacgccctcaccccggttcttcctcgctgcccagctgtctccgccacgcccaagtccaccctgctcccgtgctcggaagtggcctctttcacgccccacgtcccagtcccagtatacagcaggtgccacatatttgctgaattttctgaggggcagagcatgggtcctgggctgacgtgggtccagatttcggctctcaggcctgggcggctggcccctttggaagtgcagttggtgccagggtgcagcggctcacgcctgagatcccagcactttgggaggctgaggcgggcggatcacctgaggtcaggagttcgagagcagcctggccaacatggtgagatgatcccgtctctactaaaaatgcaaaaattagctgggcatcgtgacgagcgcctgtaatcccagctactcgggaggctgaggcaggagaatcacttgaatccaggaggcagaggttgcagtgagccgagatcgcgctgctgcactccagcctggctgacagagtgggacttggtctcaaaaaaaaagaaaaggaagaagaagtgcagttggtctattgctgaagtctctggggctgtgggtggctctacaccccggcctgacgtctgaaagtccccagaggcatgctgggcgcttccctggggtgctggtggaagagcaagttcaaggacccaagttcaaggttttgggttccagaggctcaagttcccttccttgtaggtgatcacggttggtgcctgaattggaacaggcgtgaaaaccaagaaggaaggggtttggccttatgsaacccccagggcttcggcagggtcttctgtgcctcccagagcaaaattaggtcaaaaataagtatagttcattcctactcccttcaccccagccgccgctgattctaaaggccacacaggtccacttgggaaagcctgagtcgtgcaaaggagggtgtctccgcaggagaggggcaggggctggaggtctctgcacgagaagggctggggctggagggtgtctccgcaggagaggggctggggctggaggggacacgaaggcccagggaggggcggtctgaggaggtcgcgttctccgaagcttgctgtcatccaccctccctgcccccggtgtcaccgagggggctgggcagacctggcggggtggagacctgggcagatcyggggtttgtgccctgggagctctggggggcacagggcaggtgtcgggtggagagaggctggcggcttcctgactgccctcggtccagttccagggctaagtgccctgtggccgccctgccgtctcctgctgctgctgacttgcaggtctgtgtttctgaattgtcttcagctggggaggccccgtgtgaggggagacagacgagatgctccccaaagccaggatctgttatgtcccctggggtccccgagaggactggtcggggaggagctgctccaagaccccaccaggacaggcggcccctgggccccgcctcagatggctgagygggtcagcgggagatcagcctgggggtgcagctctgcaaatccgcagtgatgaatcccagcattagggcgtgggaataaaccccccattatcctggggggatggccccgggggcagggcgaggcgagggtttgtctggctctggtcacggcaggaaggcccagcgtgtgcaggatggtggggtgtgcatggacccatatcccaggtggcggtggcctgccctctggtctgcgtggaggggtcaggggtcggggtggccaaggcctccccgctctcttcagggccttccctatgttccctgctcgaaaacggacatctttgtccaggcactgtggctcatgcctgtaatgccagtcctttgggaggcggaggcgggaggatcgcttgagcccaggagttcgagaccagcctgggcaacatagcaagacccccatctctacaaaaagttaaaaaattagccaggcgtggtggcgtgcacctgtagtcccagctactctggaggctgaggcgggaggatcacctgagcccaggaggttgaggctgcagtgagctatgatcgtgccactgcactccggcccgggaaacagagtgagaccctgtctcaaaaaaataaaaaaaacctaaaaacccacatattcaagtcaccttcatcagccccccactcacttgggccgggccctgcctcaccccccaccccacggttcagcctcgcaccctgtgcgctggccgcctctctcctgccagatgcctccccgtccccctttctggcctcccggctgtcagcatgggcctctccagacatcggtccttctttccctgtcacctctacctcctccctggctccagccctccccagtcatgtcccctggtcccgaggccgcccaccggccttgaagggaacccggagcatcaacctccgcacctgctgcccctcttcagccactgccctcccctcaccatcycatccacccacacgccacctcctccaaggagccctcccacctgcctggggctgacaggcccatcccatgtgtctgtcttggggctgggcctgtgtggtcatcgtgtgccccggcgcccggcgagagttcggtgaacatctgccccgtcgggatcacccgggaacccgagatctcccccacccgtagcagctccctttcttaatcctgggcacctgccacggatctggccatgactccacagctgagagtgccgtctcctaatcccccggcccgaggctctcccttaatcaccgacctccggcccctaatcctctcccggattgtccccatctgtaaatcctggacggcctccggcctgaggctgggctcctgcggggagggcctggctgccctcgcccgttccccaacccgggactcaggctccagcaggggctgaagaccccctgggcaggccctcccctgggatccaaggggctgagggtcctgggccttctgttgccaggagacctggtgtcctcgtggggtttgggagccgggtcggcggcctcctcccccaagcttcatccagccctggagagacggggacctgcgtcggctttgggaacttcaggggaagaaccctgagctcggggcaggagaatgacatggtctgtctgggttcccatcccactgtttcacttatggctggaggagcctcagtttccgtgtcagagccgagagagaggctgggcggctgttggaggagggctgagctcacatcggtgtcaggtgccgggggccccactgaagccactctggagtgagagggggtccgaggcttcttccggtcccccaggtgtgagagctgaggccggaaggtttccccagggacccagcctcatcccggcctccggagctggtctccctccctgcctgcgagggccaagctggacaaagtggcaggacccccgcgtttccgaggaaggggccctcgtagaggcctcactgttacctgtcggggatgggttttaaatacaggatttaatgatggtcactgatgtttctgtgacagctgaggggggcctgtccctgctcagcactggggttggacaaggagggcacagggtgcccggggagtgctggggcccgcctgggtccctatggtggccggatggggaaagggctgccggacgcggctgcacagagtgtgagggggagtggggttgggctttgggccttcccctgaccccaggtcccctctctggggtcctgtcttctggagctgcctccccctccccagggcgagaggcaggagagggtctcccaaggtcactcagtctagtgttgggcaaggagagggttggggtggagagggttggggtgcaccggcagagacagtgacgccctgcagggctctggggtcccctctgccccaggcctcggtttccccttggtaggggacatgcgtgggcgcccttcttccttctgacctctggctggtgacgacgagggttgcggccccaagccctgcttggaggcattgtggttggaacgggcaggcccagccccacaagggaccctcagggtggccaccccacctgtcccttctcctaggcccctctgctctgacccccgtaatccccaggaatactgccctgctgggcaagatgggctgaggagtcctttctggggacacaggagcagaaggctcaagggaggtggtttccagacagtgtgggccgtggataagaggacagtcctggggtctcatcctgcagtcccacttccatcagaggggaggtgtggtacctgcccccagctcaccccaagaataaagggggagaatgtctgttaatcatcacctggaaaggaggccttcatgttatatggccgtttaaaaccaggtaccccttggcggtttctaggtcctcctggtggtttctaggtctccttggcggtttctaggtcccccttgacagtttctaggtctccttggtggtttctaggtcttcctggtggtttgtagatctccttggcggtttctaggtcctcctggtggtttctaggtcccccttggtggtttctaggtcctcctcgtggtttctaggtctccttggcggtttctaggtcccccttgacagtttctaggtctccttggtggtttctaggtcttcctggtggtttctaggtcctcctggtggtttctaggtcctcctggtggtttctaggtcccccttggtggtttctaggccctcctggtggtttctaggtctccttggcagtttctaggtcctcctggtggtttctaggtctccttggcggtttctaggtctccttggcagtttctaggtcccccttggtggtctctggagccccctgggagtttctcctcgcccctcgtgggggaggtttctaggccctgtggccttctcaactgctctttcctgctggttttgtcccaagactggtgctcgaaggtgggaggcaggtctcaatccagagggtgaggctggggctgagctccacggtgagccccctcggggctgaggggcagggggccagcggcaggcgggtggcatcccctcagcccactcggtgctggggccctgggggtctcgttgctgagcagatgtgtcggactgggggcctgagccctcatgtcctgtctagactcagggaaaggaaggccttaaatttctagtccttttagtcatttgatttcacccttcaagcttgtgaggggacccctccccaccccgagatcaagtcagccttttttttttttgagacagagtctcactctgtcacccaggctggagtgcaatggtgcagttttggctcactgcagcctcgacttcatgggctcgagcaatcctcctacctcagcctcccaagtagctgggtccacaggtgcgcaccaccacgctggctaatttttgtattttttgtagagacgggatctcactatcttgcccaggctggtcctgaactcctgagcttctgtgatcctttagtcttggcctcccaaggtgctggcattagaagcatgagcccctgcacccacccttcccttcttttttgagacggagtctcgctctgtcgcccaggctggagtgcgatggcgcgatctcggctcactgcaagctccgcctcccgggttcatgccgttctcctgcctcagcctcccgagtagctgggcctacaggcgcccgccacctcacacaaaaaaataatacatttttgtatttttagtagagacggggtttcaccgtgttggccaggatggtctcgatctcttgaccttgtaatctgcccgcctcagcctccttaagccctggaattacaggcgtgagccaccgtgcccagcctgagtcagcccttctctaggttttatccccagcctgggtggttcttggggggtgtcccgaaggctcagcccctccccatcccgaggcggtggatgcttggaagaagagactgaggttctcaggggctgcaggaacttgtccaaggtcactgtgccagcaggcgggtgccagcccaggtctggctgatgccaccacgatgtgagtcgctgggtcccttccagcgtttggctcttgcagaccgagctgctgtgaacattttggtacaaatggctttttaatttttttctcttccttttggaccgtttcctcgggatcatttccccgaagtggagcgtctgggtcaccccgcagacgtggtgttaacagcttttccctcgaggagccgtccagaagcaaggagccgactttcggcggctcctgaaacaaaggtcccggcggccacgccagcgatgagctcccaggtttttctttattggtgttaactttggggagtccctccagtccctcagcatctcctccgaaaggatgtggggaccccggccatgatagggaggggctgggcctggggtggggataaggcctcaagaattggccgggcgcggtggctcacgcctgtaatcccagcactttaggaggccaaggcgggcggatcacgaggtcaggagttcgagaccatcctggctaacatggtgaaaccccgtctctactaaaaatacaaaaaaaaaaaaaaattatctgggcgtggtggcgggcgcctatagtcccagctactcgggagggtgaggcaagagaatggtgtgaaccctggaggcggagcttgcagtgagccgagattgtgccatcgcactccagcctgggcgacagagtgagactctgtctcaaaaaagaaaacctcaagaactaagaaggctgagttggtacagggatgggaaggggtcccgtgtgtgtgtgtgtgtgtgtgtgtgtgtgtgtgtgtgtgtgtgtgtgtgkcagagggtctcatgttacccaggctggtcttgaactcctgggctcaagcgatcctcctacctcagcctcccaaaatgttggaattataggcatgagccagtgtgtttggcctagcccccagtgttaatggcaaaatcctatgaatctttgtgctggaaattcaagaccctcccttgtctgagtcaggcacacgcaggccatgtgggctcagaccccagtctggaacctccccttcagcaagagcccttggccccagagcccagaggtttttgttttgttgtgttttgttctttgagacagagtctcgctctgttgccccggctggaatgcagtggcacgatctcggctyactgcaacctccacctcccgggttcaaacaattcacctgcttcagcgtcccgagtagctggtactacaggcgcccgccaccacgcccggctaatttttgtattattattttttgagatggggtctcactctgttgccaggctggagtgccatggcgtgatctcagctcactgcaacctccgcctcactggttcaagcgattctcctgcctcagcctcccgagtagctgggactacaggcacgtgccatcatgcccagccaatttttttttttgtattttttgtagagctggggtttcactctgttggccaggctggtcctgatctcttgacctcatgatgcgaccacctttgcctcccagagtgctgggattacagacgtgagccaccacacccggcctaatttctgtatttttagtagagacggggtttcaccatattggccaggctggtctcaaacccctgacctcaagtgatccgcctgccttggcctcccaaagtgctgggaacacaggcgtgagccaccgcacccagcaggcttttttcttttatcagttttccaattagccattgtaaaacctatcaatcagtgtcattaagcccattcttgctgttgtacaaccgtcaccactatccatagtccatacctttctcattcccccggacagaaaccgcaccccgcacatgccacttctcacccctccaacccccggcccccggcacccatgcatccccttcctgtctctggattggcctgtcctggacatttcgtagaaatgggctcacacggccgggcgcagtggctcaggccggtaatccccacactttgcgaggcctaggcagaaggatcatgaggtcagggtttcgagaccagcctgaccaacatggtgaaaccctgtctctactaaaaatacaaaaatgagccaggagtggtggctcatgcctgtaatcccagctactcaggaggctgaggcaggagaatcgcttgaacttgggaggcggaggtggcagtgagccgagatggtgccactgcactccagcctgggcgacagggtgagactccgtctcggaaaaaaaaagaaatggcttctctcactgaacgtgacgtcctcaaggggcatctgcgccrtggcctgggtcagagcctcactccttttcgtggctgagtcgtgttccatggtggacgggtcgcgccgtgtttgtccctccgtttggtgatgggcacctgggctgcctctgcctttttgctactgtggatcgagctggtgtgaacacagcggagtggtcrtcgbccgcagtcgagctggtgtgaacacggtggggtggttgtcgtccgcaatcaagctggtgtgaacacggcggggtgctcgtccgtccttgttttcatttctttgggtataatctcggggcagggagaggctggtaattttatgtctttttaaggagccacccgtgtttgctccgagtcgttttgattttcattttctcgatagcgaaagggttgggcatctgtccagtagccatttgctgaccctctatgacctcctgtgtggacgcggcactcccagcaccgtgtctggcccgccatacgcaggccctgaaccgacaggaccttttctgccagagcttcccagggagagttttgggatccaccttggggacttggactctggccgggtgtatctgggagtggaaacgccctctggtctcttgtccacgggtatttatcatacggaacgtccgaatggtgccaagtccggctcggccgttcctcccaccctctcggcctcccctgtggcgccagccccgtctctgcttggcttccctccctcctgtgtggacgccccacttcctcccctctcctcctgcgtggacgccccactccctcctctctcctcctgcgtggacgccccacttcctcctctcctgcgtggacgccccactccctyctctctcctcctgcgtggacgccccactccctcctctctcctcctgcgtggacgccccactccctcctctctcctcctgcgtggacgccccactccctcctctctcctcctgcgtggacgccccactccctcctctctcctcctgcgtggacgccccacttcctcctctcctgcgtggacgccccactccctcctctctcctcctgcgtggacgccccacttcctcctctctcctcctgcgtggacgccccacttcctctggaaatgcagccggtgctgccctggttcagtcttcctgtggcccctgtggaggctcccgcttctcagtaaggcatctggggccctcacctcccggcgtgagctgagcacggttcatttcccaccctggcttcccgccttcgctctccctgtgcgcgccgccctgcctcgccctgctgcttcccagtgcccctctgcaccccggctcctctctgctcctctgctgtcctgtcctgtctatttttttaacgccaaccttgtgccaggcacattgtccctctctggtcatgtgaagcacttaatctattttgagccacctcttgggccttgtgaggtctcctgcatcttcaaggacacggggtcaaagttgggcctgaggaagggacctgggctagggcagcgcagtgggcgttgggctccctcggggctgggtggccttcctggggtgggagcctggtcccgagggaggagtgcccagggcttgtcctgcaggcgcctggggggaaggcaccggcctgagstgtgggcaccctygccccccagggaggaatgcccggggctggtcccataggtgcctgggggaaggcaccagcctgaagtgtgggtrcccctcgcccccagggaggagtgcccagggctggtcstgcaggcgcctggggggaaggcaccagcctgaggtgtgggcaccctcgccccccagggaggaatgcccggggctggtcccataggtgcctgggggaaggcaccagcctgaggtgtgggcacccttgccccccagggaggagtgcccagggctggtcctgcaggcgcctggggggaaggcactggcctgaggtgtgggcaccctcgtcccccagggaggaatgcccggggctggtcccataggtgcctgggggaaggcaccagcctgaggtgtgggtgcccctcgcccccagggaggaatgcccggggctggtcccataggcgcctggggggaaggcaccggcctgagctgtgggcaccctcgtcccccagggaggaatgcccggggctggtcctgcaggcgcctggggggaaggcaccggcctgaggtgtgggcaccctcgccccccagggaggaatgcccggggctggtcccataggtgcctgggggaaggcaccagcttgaggtgtgggtgcccctcgtcccayagggaagagggcccggggctggtcccataggtgcctgggggaatgcaccagcctgagctgtgggcaccctcgccccccagggaggaatgcccggggctggtcccataggtgcctggggggaaggcaccagcctgaggtgtgggcaccctcgccccccagggaggaatgcccggggctggtcccataggtgcctgggggaaggcaccagcctgaggtgtgggtgcccctcgtcccacagggaagagggcccggggctggtcccgcaggctcctcggaggaggcactggctcgaggtgtgggcgcccctcgtcccccaaggaagagtgcccggggctggtcccgcaggtgccccggggaggcacyggcctgaggtgtgggcaccctcgcccccaggttctactgggacttcaccatgctgctgttcatggtgggaaacctcatcatcatcccagtgggcatcaccttcttcaaggaygagaccacygccccgtggatcgtgttcaacgtggtctcggacaccttcttcctcatggacctggtgttgaacttccgcaccggcattgtgatcgaggacaacacggagatcatcctggaccccgagaagatcaagaagaagtayctgcgcacgtggttcgtggtggacttcgtgtcctccatccccgtggactacatcttycttatygtggagaagggcattgactccgaggtctacaagacggcacgygccctgcgcatcgtgcgcttcaccaagatcctcagcctcctgcggctgctgcgcctctcacgcctgatccgctacatccatcagtgggaggaggtgaggtggggcgggggcggggccaaggcagcaggggcggggctataatggtgcatgggcggggccaaggcagcaggggcggggctataatggtgcatgggtggggccaaggcagcaggggtggggctatgagagatctgggtggggtcaaggccccaggggtggggctatgggagatctgggtggggtcaaggccccagggatggggctatgagagatctgagtggggtcaaggccccagggatggggctatgagagatctgggtggggtcaaggccccaggggtggggctatgggagatctgggtggggtcaaggccccagggatggggctatgagagatctgggtggggtcaaggccccaggggtggggctatgagggtgcaggggtggagctacaatggtgcagtggtagagccaagacagcaggggtggggctatcaggttgctgagcagggtcgaggcagcaggggcagggctatgatgctgctggggtggagtcaagcagcaggggtggggccgtgatatctgggtggggtcaaggagcaggggcagggctgtgagggtgctgggcggggtcaaggcatcaggggcggggctatgagggttgtgctgagcggggtcagacatccgagtggagatatgagggttgtgctgggcggggtcaggcagcaagggcgggactatgagggttgtgctgggcggggtcaggcagcaggggcggggcaatgcgggttttgctggggcagggccagacatcaggggtggggatatgagggttgtgctggggcggtgtcagacatcaggggtggggagctgtggatttggggggtgtcctagggcgggggctgtggatttgggggggtcctgcagtgaaggctgtagaggtgggcggggtcctggggtgggggctgtgggtttggagggcgggggtcccggggcagggctgcagggtggggcgggggtcctgtgcggggccttggatttgggggagggggccaggagctcccgcagtgggggcrcacggggctggggctctgaaggtgggggccgggggtcagcgggtagggtgggctcacggcgccttcctgcagatcttccacatgacctatgacctggccagcgcrgtgatgaggatctgcaatctcatcagcatgatgctgctgctctgccactgggacggctgcctgcagttcctggtgccyatgctgcaggacttcccgcgcaactgctgggtgtccatcaatggcatggtggtgagygccgcgggccctgacggagggggagaygcaggctcccatacagaggggggacccaggcccccttatcccgcttacagagggttgaacccaagcctttcagaggtggggacccaggcgcccccttatggaggggaggactcgggcccttwcagaggyggggacccaggcgcccccttatggaggggaggactcgggccctttcagaggtggggacccaggcgcccccttatggaggggaggactcgggcccttwcagaggtggggacccaggcgcccccttatggaggggaggactcgggcccttacagaggtggggacccaggcgcccccttatggaggggaggactcgggcccttacagaggtggggacccaggcgcccccttatggaggggaggactcgggcccttacagaggtggggacccaggcgcccccttatggaggggaggactcgggcccttacagaggcggggacccaggccgccttacagagggagagacacaggcccttcaggggtggggacaagacccccttacacgggaggactcaggcytctttacagagggggacccaggactgcagccccggcactggccccttaatgtccctgggggtctgaaacagccacttggaacytttcaggcctgggatcgtccgtggagagaagctgagtgtggttatgatgagtcctgtcacccagacatctgcttagcgcgttttccaatggatttcccttttaattaacccacattaattattattattttatttacttatttttttttgagactgagtttcactctgtcgyccrggctggagtgcagtggcacgatctcrgcttaccacaaaccccacctcccagggttcaagggattctcttgcctcagcctcccgagtagctgggactacaggcgcccgccaccacrcctggataattttcgtacttttagtagagacrgggtctcgccatgttggtcaggctggtctcgaactcctgacctcaggtgatccgcctgcctcggcctcccaaagtgttgggattacaggcgtgagccaccgcgcccggcctggttggatcccttgagcccagaagttgaggctgcagtgagccatgattgcaccactgcactccagcctgggycacagagcaagacctgatctctaacaactaaagaaaaatttacaacatggccctgaaatgggaaagtggtatcaccatgccaaagaaataataaatgggccaggcatggctgctcatgcctgtaatcccagcactttgggaggctgaggcaggyggatcacctgaggtcaggagtttgagaccagcctgaccaacatgctgaaaccctgtctctactaaaaataaaaaattagccaggcgtggtggcgcgcacctgtaattccagctactgtagaggctgaggcaggagaatcgcttgaacccgggagcagaggttgcagcgagctgagatcacaccattgcactccagcctgggcaacagagccagactttgtctcaaagaaataaataaaaataagtaaaagcaaaaggaagaggccgggcgcggtggctcacgcctgtaatcccagcactttgggaagccgaggcgggctgatcacctgaggtcaggagtttgagaccagcctgaccaacatggagaaaccccgtctctactaaaaatacaaaactagtttggcgtggtggcgcatgcctgtaatcccagctacttgagaggccaaggcaggagaatcgcttgaacccgggagcggaggttgccgtgagccaagatcgtgccactgcactccagcctgggcgacaagagcgaaactccgtcaaaaaagaaggaataataaatgaagttaggtcccagatactccttgcttcctagctgagatgtgctgactgttaagaagggttagttatgggagccctcggccgctacagtcaggttagtggccagtgagcctttgtccctgcctggggrgtgctgtgccccagcgtccagccacatatgggacttgggatgtgtttggtttggacacagagcaggtgggcattgatggggtcaggagctacagagggaagacccgccagtgcccctccccagagcctggcacagctgcccaggctgaggcagcccattgtctggctgccacccgcacatgcggtcccatttcctgaacagagccccgcggctcccctttcccggccgggtcagctgaggacttggtgcggcaggacctcctgggccggcctggtgtctctgcccgccctgcccctctgctctggcccagatgctccctggaacttttgccccctcttgacctcacagatgctctgatctcagaggctgcaaaaggcgggacccagactctcgcccttggggtctcagtttccccrggagtgaagcgggcaggtagaatcagccctggccctcctgccaactcactgtgacaagtgtgcaaaccatgtcatctacctgggtctccrtttctcttggttacctctgaacatggggagctcaccacctccagtgcttggcagagggtgggcgctgggcccttgaggaccgagggctcctggggcgtgagcacmtgcccaccacygcccctcctgctggccttgcagaaccactcgtggagtgaactstactccttcgcactcttcaaggccatgagccacatgctgtgcatcgggtacggccggcaggcgcccgagagcatgacggacatctggctgaccatgctcagcatgattgtgggtgccacctgctacgccatgttcatcggccacgccactgccctcatccagtcgctggactcctcgcggcgccagtaccaggagaaggtctgagggaggcgggccccggcctgggttctgatgggggaggcgggcctggatctggggtctgagagagagtcaggccaggccctggggtctgatggagggaggcaggcccggtcctggggtctgaggctggagggaggccttgccctggggtctgagggcggaggtagtccttgtcccggggtctgaggggaggggcgggcccggccccggggtctgaggggagaggcagwctcagcccttcactcagcttcaagtggcgcgctcagggcagagaccgcgtgatggggagcaggggaccctgggggtctgtggctgtgattaggagragaaacggccggtggtgagaggttctctgaccctgtgacagggagggaggtccagagcctggagatggacgtggggcgggggctggggaggggatgcaggctgggcaggaaggggtgagttgggatcagggcaggacagggtcagtctttggacatygggaagcccccgggctgaaggggcattgccaggaggctgggcccacctgggggtctctaggccggctcaggatggggctgggttrgggaagggcctggcggggtctgagaggcctggggttgcttcaggacacgccggtggccggcagtcagggccaggcttcagggagagcaaggctgccccactgctcagatgcggcctctggcctgcagcgtccattgggttaatcctaggcttggcagtggaggggacacgggggagctgggaggggtggagggagattaggattggccccattggcagcccctggagttgggcctcatgcaccactctgtgcctcagtttccccatgttaggcggctggctggtcctggctgggagccaagtgcccccctctcccgcgccccgagcagtggctggctgggtcagctgggccccgtgccaggcgccctgctgtccggaagccacgggcctcacacccaaacataagctggtgccaccacccgcccgccgtcacgggttccgctgagctcagggcagctgcggccgggcggggctggggcggaagtgaggctggagctgccggggggcaccgtcctggggacagcagggcctggcacccccgcccagcacccacgctcccttccctgctcaggaggggctgacccgatggtttctggaaagatcatcagggaagggccagagcccccgggaagggggtcctgtgtgtcagggtacctggggcctctcctygtagagtcaggtgcccacccattcctcagggatagggttgctagataaagttcagggcacccggcctggtgcagtggctcctgcctgtaatcccggcactctgggaggccgagacaggccgatcgcctgaggtcaggagtttaagaccagcctgagcaacacggcgagacctcatcgctacaaaaaattaaaaaattagcagggcagggtggtgcacacctgtaatccccactactcaggaggccgaggtgggaggatcccttgagcccaggagttcaagaccagcctgtgcaatatggcgagacctcatctccacaaaaaataaaagaatcagccaggcgtggtggcgcacacctgcagtccctgctactcaggaggctgaggtgggaggattgcttgagcccataggcggaggctgcagtgagctgtgattgcaccactgcactccagcgtgggccacagagcgagacagtgtctcagaaaaaaaaaatggaatttatcattgaaacgaattcaactttgatttaaatagaagcatgtttatttgctcttgttgaatctggccgcccctgtgtgtggcggaggcctgtctccccgctgtgggcgggggctktgtctgacccagccctgaccccccacagtacaagcaggtgtgaaggcctmtctccccgccacaggccggggggctgtctgacccacaagcaggtgcccgtgtgcccgctgcaggctgggggcggtgtctgacccagcctcgcctccccacagtacaagcaggtgcccctgtgcccgctgcaggccgggggcggtgtctgacccagcctcgcctcctccccacagtacaagcaggtggarcagtacatgtccttccacaagctgccagctgacttccgccagaagatccacgactactatgagcaccgttaccagggcaagatgtttgacgaggacagcatcctgggcgagctcaacgggcccctgcgggaggtgaggcgggcgccgggcgggcgggaggcagcctccggtacagggccggcctccctctcctggagcccaggagccggtccctgagggaggcgaggtgcctaggctgcagcaggagggactcgagctagacctgcgtacacaccctcccctccccgccccgtgagcctctgcacccccaggacccccgccacccccgccttgcttcccgctgcccccttagcagaactgcctgggtctgtrcctgacagggcggggcagaagcagggcagggggtggggagggaggagccgcagaggccccgctgagcaccaggtcctgggggcrctgaggctgattggagcgggtttaactcccagctctgttccggtagcctgagtgaccctgggcaagtttcccagggttgcgggaacaaatacccacaggctgagtggcttgaacagcrgagattcggcctcccaccgtcctggaggccggaagcccaacatcaaggcgtgggccgggccgtgctacccccccggagcccctggggaggatccttcctgcctcttccggcgtctggggctccaggcgccctyggcttgcagattgatctccctgatctctgcctccatctgctcacagccttctcccctgtgtgtctctgtctcttcttgtaaattcatccgtcgttggatcagggcccacccggttcctcgtggcctcgccttaactgggccatgtctgcagagaccctatttccacataaggtcctattcacaggaaccgggggtcaggatgtcagcctgtctttctgggagatgtagttcaacccacaacacacatcaaacagttattgagcgccgactgcgtgccctgccgtgtgcttgaaggtcccaccctcaggaagcggggcctagggatggcggccgtgatcacgcaggcagcagagagcagctctgggaagcggggagggacgaggacggggaggygacatcagcaaggccrygtgtgagccaggcagggtgtccccggtgtagcacctggctcgggcagaggccccgaggaggggctggaggagctgggcgaggaggcgggcaggacgggcctgacactagggacctcgggccccgggaatgcctctgggggggcgtgtacacccgttgctcccaggaggcacacactgcggttcgcttcgccaagaatgtttaattgcatttgatgactacggtttccattcattcatttgtagagatataacactcagaccacaaaatgcataaaatgcggtggcttttagtattaacagagtgctgcacccgataccacagcctcactccagaacattctcatgggcccaaaaggagacctggggtgttagtcaccagctcactccccgtccccagcccctggcaacccacgctacttagtcattatttaggtgtttaggagttgcaaagtcaaatctttaaacccacatatggccaggcgtggtggctcacgcctgtaatcccagcactttcagaggccgagrygggcagatcacctgaggtcaggagttcgagaccagcctggccaacatggtgaagccccgtctccactaaaaatacaaaattagccgggcgtggtggtgggcgcctgtaatcccagctactctggaggctgagacaggagaatcgcttgaacccaagaggcggcggttgcagtgagccgagattgtgccactgcactccagcctggacaacagagcgagactccgtctcaaaaaaaaaaaaagtaccaaaaagtgccccaggtcataagggcacagctcgatagctggtccctaaagggaacgtggtgtaaccaccacacagaacgaagctggaacgttcctgccgtccttagaagctgcctttgctaaggggaattgccctgacttcccacaccattgattcatctccagacccttggttttcatgttgatttttcaaaaatcacctgatagtctgaccgaatgtagctttccactggtgtgtgtgtgtgtgtgtgtgtgtgtgagagagagagagagatggagtctcgctctgtcacccgggctccagtgcagttgtgtgatcttggttcactgtaacctcctcctcccgggttcaagagactcgtgcctcagcctcccgagtagctgggattacaggcacccgccaccacacccagctaattttttgtatttttagtagagatggggtttcaccatgttggccaggctggtctcgaactcctgacatcaggcgatccrcccaccttggcctcccagagtgctgggattacaggtgtgagccaccacgcccggccttatttttcccccattttctttttttttttttttgagtcagggtcttgttctgcgctcaggctggagggcagtggtgtggggatcacggctcactgcagcctcgacttcctgcaccaccacgcctggctgttttttttttttccggtagagacgggggtcttaccgtgttgcccaggctggtctagaactcctgggctcaagcgatcctcccgcctcggcctccgcaaatgctgagatcacacgcgtgagcccccgcacccggcctcctttccaccgctcttgtctacagccgcccctcctggtccgattgtattggcagatgtcgccaatacggtgtcaaacggcgaaggggcactgagcgttttttctttctcccgtccttggcggcagcagctcggttccggctacggggctgagcccgtctctcagacgaggaaactggggtccgagaggtgagccggtcccagaggcagggcgagggggaagcgggagtggggtccgcagcggacccagccctgcctcccccctgcaggagatcgtcaacttcaactgccggaagctggtggcctccatgccgctgttcgccaacgcygaccccaacttcgtcacggccatgctgaccaagctcaagttcgaggtcttccagccgggtgactacatcatccgcgaaggcaccatcgggaagaagatgtacttcatccagcacggcgtggtcagcgtgctcactaagggcaacaaggagatgaagctgtccgatggctcctacttcgggggtgagcttgaggggggcgcgcctggagggggagggggcacgcgacccccgcggtgtgcagagccagggggccggggccggggccggggccggggatggggatggggatggggatggggccggggatggggatggggatggggatggggccggggatggggatggggatggggccggggatggggatggggccggggatggggccggggatggggccggggatggggccggggccggcaccagggagagcctgggtgggaagcgcccacgctggccaaggtgcagaggccgggccgtgtgcctgggcggggagggccgcggcgcccgcctcgtccagcaacccccccctgcgcgccacgtgcagagatctgcctgctcacccggggccgccgcacggcgagcgtgcgggcygacacctactgccgcctctattcgctgagcgtggacaacttcaacgaggtgctggaggagtaccccatgatgcggcgcgccttcgagacggtggccatcgaccgcctggaccgcatcggtgagcgggccgggggcgtggccggggcgggtgccctggcgggggaggggcgtggccaaggcatcaggagagtggcttggacagtggcagggggaagggcgtggctgtggcatcaggggcacggttggggcagagacgtggccaaggcatcaggagtgtggccatggcagcaggggcgtggctggggcaggggcagcggctggccgctcctaggacccctttgggtctagaggctgattttctgacctattgtcctacttcagccagaggcagcctgtttcccaagggagggaatgcacagggtgtttgcggttgtgccgaatgctcggtgagcacctgctgtgtgctgggggtgcaggggacagacccgggggcccactcagactcccagggaggcttatggactggtgatgaaatcacacacgactgggctgtgtgccagcagggcaggtggggccggtgggcttccctgagttgggaatgcagagtggagaccagggtaagggatgccatgtggaaacggggaggaagatgtgttcgtggagtggacacagcacatcccaaggccctgaggtggaaaagaggcctagagtccagagagccagggaggcctggaggaggttggggaagaaggggaggccagacacacagggcccagtgggcggcagggagagtttagactaaatcaggagcatcagggagccatggagggttctaggtgggcggaggacctggtcagattgtatccgccaaggcgggccgtgtccaggagggagacggtgacctggcctctcaggggggcagtctctggggcagggaggggcagagccctgatgactggatgtaggcgccagagagatggcggctcatgctgctgttcgtgggaatgggaatgaagaccatggctgaaacgcaggacaggtgcgacggagtggtgtcagggagctcccyggtgtacagtaggaagctctccacaacttgctctatacagtgagtatgcaacccgttcctgagtatcaggtgcttaggttataacttctgtatacagcaggtgctcagcacaggctgtgtacaggcaggtgttttcggtatgcctgtggcacactggaggcagtcattacataatcagcgtatacaggtggtacacatgcatacttggtgcacagtgatacctgctccatgtacacagcaggcattaaatacctgtttactgccaggcgcggtggctcacgcctgtagtcccagcactttcggaggccaaggtgggtggatcacgaggtcaggagattgagaccatcctggctaacatggtgaaaccccgtctctactaaaaaaaaaatacaaaaaattagccgggtgtggtggcgggcgcctgtagtcccagctactcgggaggatgaggcaggagaatggtgtgaacccgggaggtggaccttgcagtgggccgagatcgcgccactgcactccagcccgggcgacagagcaagactccgtctcagaaacaaagcaaaacaaaagccctgctttctgtatgcaggtgcttcatgcatgctggctgtgcatagcaggtgctcagcctgtatatggcaggtactcaatatccatactataggccagagatgctacatatgtgcttattgtatacagtaggtggtaaatgcatgcttgctctacacggcaagcactgtgtgcgcacccgcggtgcagagtargtgctcggtgcccgctgtacgcagcaggcgctccctgtgcacacgctaacgccccctctccckcaggcaagaagaattccatcctcctgcacaaggtgcagcatgacctcaactcgggcgtattcaacaaccaggagaacgccatcatccaggagatcgtcaagtacgaccgcgagatggtgcagcaggccgagctgggtcagcgcgtgggcctcttcccgccgccgccgccgccgccgcaggtcacctcggccatcgccacgctgcagcaggcggcggccatgagcttctgcccgcaggtggcgcggccgctcgtggggccgctggcgctcggctcgccgcgcctcgtgcgccgcccgcccccggggcccgcacctgccgccgcctcacccgggcccccgccccccgccagccccccgggcgcgcccgccagcccccgggcaccgcggacctcgccctacggcggcctgcccgccgccccccttgctgggcccgccctgcccgcgcgccgcctgagccgcgcgtcgcgcccactgtccgcctcgcagccctcgctgcctcacggcgcccccggccccgcggcctccacacgcccggccagcagctccacaccgcgcttggggcccacgcccgctgcccgggccgccgcgcccagcccggaccgcagggactcggcctcacccggcgccgccggcggcctggacccccaggactccgcgcgctcgcgcctctcgtccaacttgtgaccctcgccgaccgccccgcgggcccaggcgggccgggggcggggccgtcatccagaccaaagccatgccattgcgctgccccggccgccagtccgcccagaarccatagacgagacgtaggtagccgtagttggacggacgggcagggccggcggggcagccccctccgcgcccccggccgtcccccctyatcgccccgcgcccacccccatcgcccctgcccccggcggcggcctcgcgtgcgagggggctcccttcacctcggtgcctcagttcccccagstgtaagacagggacggggcggcccagtggctgagaggagccggctgtggagccccgcccgccccccaccctctaggtggcccccgtccgaggaggatcgttttctaagtgcaatacttggcccgccggcttcccgctgcccccatcgcgctcacgcaataaccggcccggcccccgtccgcgcgcgtcccccggtgacctcggggagcagcaccccgcctccctccagcactggcaccgagaggcaggcctggctgcgcagggcgcgggggggaggctrgggtcccgccsccgtgatgaatgtactgacgagccgaggcagcagtgcccccaccgtggccccccacgccccattaacccccacacccccattccgcgcaataaacgacagcattggcgccaagcctggccgcgtgtgattgcccgagacccgcagggcgtgcacccttcctgaagacagtggctcctgggggtggcaaaagagctttatttacacactgacaaggctcacggggtgtcagctgaagaagtaggtggaacgcttcacctgctccaggtcgaaggcccctgcggaggaagcagagcggacggcgtgggtggcgggaaagccccgccctggcccgcagttcgagccacccttgcgaggctgcccacccgcctacctggcttgggcaccgcctgcagtgtctccttcagctggctggcctccaagatcttctggggcctggggttggaagcagggtggggtgaggctgaggccaggttttggggtggggggggaatccaggtagttggggtcagggagcgccttactcagagcagaaccgcttgaccaggaatctggacaggtcctgcaggatgggctcgctgtgcaagcggacaaactgctcccggcacacctgggcaggagtcagaggatccccaggggtgatcaggcaggctctgggcaccacccctacccaacgccccagtgtgggggccccacccatgggtggactgaggctcagactacgggggcacctggttcatgacggagacatcagctgcgtgagtccagtaacagtcgtgcacagagacgaaggtcaggcccttcctgtggcagagcggaggactcctgaagggaggggagctcacagggccacccagtgaccagcatcctggccctgcgctcagccccctccacttgaggtccagggaagcccaccctcctgcaggcctcgccccacccctcgccccgcccctccccaaacatcctgggttaggtatcagtacagggggaggaaatgttcccagaagcctcctcgccccacccctgccgccccccacgctgctgtgggagcctcagctccgagggcggctacgaggtcccctcctgccagggccaccaccccgcatcctgagcattcccagctcccgtggccggtagattctgctggaacgacctccacgtgctccagatctaaccacacatcgcggtgccaagaaatgcccagcaggaaggggcagcgcccatgctcggctctccctgtcgggccacaggaggggagctgccaggaccacctacattcggggcacacagcctcagggcctctacacaggccccacagacacagcagatccactctgcccagtccctgcccccagctagacccagccttgccagctgtgccctgctagccagaagacgcccctgggaggcgagcggcacccacgccgtccggagacgcccacctgtagcagtgcagggcggtgagcatcatgtgggaggagtccagcgagtggatgaagttgggcgggaagccgttcttctgcttacgtgtgttgggctttctgaggacggaacaggtgccggtgggggcggcccagggacacccctaactggccgctgtctccaccgtggctgctctccagacccccggccaggccccagcccgggccccccactcaccggctgatgtctccgttgtgggtgtaggtgatgctctgaattccacctcctatttgctaaaaaggggaaggggccggtgagtcccacccgaggcccagcacggtggtggtacattgaggtggtggtacactggggtagtggcacgctaggatggtggcacactggcgcgggatggggtggcacactggggcggtggtacactggggtggtggtacgctggggcactggtacactgggacgctgttacactgggatggtggcacactggggagggatggggtggtacactgaccttgaccttggagtccaggcgatagggctggatgacggggacgcccaggggtgtgacccactccaccacagagcccatgtgggagatgaggcgggcactctcggtcagccagtgctgtgggacacaggccgtctcagggcagggggctcaggccggggatcccgtccacttgcttagggagtcctggccgagcggggacaggacaggacgtacctggatggcccgggtccccgagaacatctcctgtagactcttgaagacctggcgtacgagatagtgagaggcctcccacacgaactcctgcagagggcgggcagcaggtgcaggtcctcaggggctggcccgttcacgccctactcccccctatttcagagccactgaggcccaaggcctagggcctagcaggggggcaggggaatggggcctggcgcccacgcagtcagcaagaaacgcccaagccctaacaggcagccagtggtctgggggagcagccagggctcctgctgggaggctgggtcgggggcacacccgtctgagttttaaatggcagtgaaaccaacgtgttcgcagcgcgacatgcctggcgcacctggggaaagtcgctcagctcccggaggcgcttctcaatctgcaggcgcccgccatagcgcgtgaccccgtacaccaccgtcatcaccgtctgcttcaccaccttgcgggtgatgaaaccttccagcacctgtgccacccgcatgccccgctgggcgtcctgcctacggaacacctccacctgcacggcgggtgggccgggggcgcgggtcagccccgctagcagcccaggggccaccaagcacccatgaagcccccgccccagccccaccacatcctcaggacaggccaaggtgagggcacctggggccgagactcagggctcacattgcccccacgccgagatgcccccgggcagcagggcacaccctacctgcgcggccacgccgctgtacacgtcctgcggcacatccgagggctccaggttgacggaggcggcgcccacgctgtcgcggcccagagcagcataatgctgcaggccgttgcaagagccgtcctgaggaaggggcggcaaacgggagatggaagctagagaggcagagacgtgtgggaccccaaaccaccccccaggtcgagccgttcctagggccgtgcaccccccagccaagtgcaccggagcccccgcacgctcccgggagagaccaggagccatggctcccgcacactctaggaccacctccagagaataccacgagcgaaggtgaaatctcacaccctcaagtcgagccccaggcccagtgcacactgcacggcctcgggggccagacccagctggctcacctgatggacggggaggtgggagacataggcggcagggtcggaggcgcgcacagcgttcgccacctccatacagcaggccagcgtctgccagggttcctccgcgcccatccaccactttcggccctgcggggacagcggatggggggcagtgaggcccgggcccgatccctgagcccgctgggaggctgtgttgcggggaggtgggaaatggggaggagacgcacacccgtgatagtgaacacgggacgcatgtgggcgagagacggggcggtggctggatgagttctccatagccacggatggaggatgggagctgcgggtggaccgggctgaaacaagcgtgtccggagctgccgggggaggagggtggacagaggacctgggggcgccgggggaggaagcagctcggcggatgcaggggaggggggaacgtggggaacgcgggggccctggggcaggggagaagggagaagcaggacgggcagggggcgcgggggaggagagcgggcgggggacgtgggggcgccaggggagggggaggggaggaggaagacgggcagggggcgccaggggagggggaggggaggaggaagacgggcagggggcgcgggggcgccgggggagggcgcgggggcgccgggggagggcgcgggggtgccgggagggcggggaatgcgggggccccgcccctaccgtcaagggttggtccgcggagtccaggatgtcatccatcacctcctccgcaaaggccaggcgcttccgcagcggctcccgcttcttcaaccccgtgagattgaccaggtggatcttgagccaatccaggccgtgcgggccgagcgggcggccctgggcgaactccagcagggcccgcgccacgtcgctgcccaggtggttgaagtgcggcgggcaggggtaggtgcggccgcggaagtccatgttgtgcggcagccagaagacgcggtcccgcaggtgctgcgccagcgagaggcggtacagcgcctccgcccgcaggctgtgcatctcccgggccaccttctggcagtgcgccagctcacggcgcagctcggccttgcgggcgggcgcggcgctgtgcggcaggtgggcctcgggcggctggggcgcctcggagggcggggccggcacgcctagctgggggcagcccttggcctggaagagctgcagcaccaggtccagcacgcgcccgttgacgcgccaggcgcagttgcccagttgggtgagggcgtccagtgcgccatgcagcgcggtgggcgggcaggtttccagcagctcctggtgctgcgtggcgccttccaccgtgcgcatcagcttggtggggctgagcaggaaagcaccagagtgcggcgatgtccagggcagcggggggcaaagcatgggtacatccaccgcctcgaaggtcagcgtgggctccgcggccttctccagcagctgcacgtaggccgggtgcggcttcaggatgccgatctggggtgcgacaggcagacgggtcagggccccggtgctggggctttcctgttcccaccccttaaacttgggtgagaggggccggctccccggccaacaagaaaccagtgtggcctcccacgaacagaagccacctccagaaacggccggacacctgcatggacacccatggtgtgtcccgagtcctgggaggtactgacggctgcgctgagatcaaggctccgcccaaaggcgccaaccccatggggtccctggtcctcccagcgggatgccccccagctcaggagggcactgcctggcacctgctggacgttgcggaaggaatacacgtggtagagcacggggacaagccgagaggaacgatgcggcttgtccaggctgcatggcatctgcgtagcctgcaccagcatctccgccagcagcttgcccagctccatctgcactggcaggggccagggctgctcccgcagggcctcgggcgcccccagctcctcccagtactgccgcggcaggcagggctcgggcacctgtaggacagggcggtcagggcgctgggcaccggggcccctgagctagatgccccaccgcccgtgcctgacgcccggtggggcatctgtcagcccaagcatacagatgaacagactgaagcttgggtgcaaacccggctgctccagggagggagagcgcccacccaccactggccccagccaggaggagagggggtgcgagcctcacctcggcgtcggaggccagcaagcagaggtacttcctgtagtggttctgcagcgcctgcacctggccactgacccgctgcctctgcaccacgtgccggctgaaagtgcgcgcactcagctcccgggccagggtggtgaaggactcaccttgggcgggcagcgcctgcaggacctgcggaaggcagccgtgagtgcctgcccgccccgcccggggacccggccgcgcggaggaagacgcacctgcaggagcatccgcaccacctcgcgctcgtccagcaggcacaggaaggggtaaagtgagaaccggccctcgtacacctcgcgctctaggcggttcttggtctcccgcagcgcccggcacagtgctttctcccattggtcccgcagggtcttcagggtcttccgctgcgggggatgaacgggcccggtgagccccgtggcagctggtgggacccaggctcacaggacgggggtcaccgcagctccctgcagagacctcatggccctcaaggtccctgctgtgtgttccgggtagctcctcaccccggcctgccctctgc

SEQ ID NO: 96900 - DNA, 13985 bp, Homo sapiens
atctcaaacactgacagcaattaaaacctcatctccaggccccctagaagatgccaatcaaaataaactgcattcctgagacgcagggccagaaattaaaggcatttaactcctcaaggcccaggggctattgcagaagaggtgggcttgtgagatcacaaagttaatttttagagataaaatgagttcagtttctctataaattaaccattaatgtcaaaggcacactgatgcaagaccagcatatcaacccatgtcaaattaacaaggttttcttaaaacattaaccaactccttaataaaggttacaaagatataaaaggctcatggaagatatatcttatgatcaagattaaacctttatggattgtttataaaattttggaaaactaattggcttcatgctgtttttttattagggcttaatgtttagaaaattaagtcttctctctcaaagaatgaaggtttttgcccttttgttttgaaatccttatcactttggctaaatgaatgacttattttacaatgacctgtaatcctattttgtgatattaagtgtttaaaacctttgatatttgacaaactttctgaaatcaaattatacattatgtctttttctgaactaattagtcctttaagatggtattaatgggttccctaaagtccaaaagtgacatatttggcttttttggtatgaaaattatacaggaagcattgtccaatatgaaatggtgtttggttttctttgggctgtatttgtataaatatgttattagtatgtattccaaaattatgggaaactcctattattctgatatgacacactgtatgttatcagtaataattataatttttatgttaaattattgtgtgctacagaggtaacagaatgtctgactatggctgccctaaaacttttcattattcacagacaattgtcatctttttttggtccttttcagaggtagttttataatcagctataaaactcttaacaggtgttcttgaatgcatgtttctgatagctctggagactgtgacatcaaaatagagaaaaaacttcgaggactcatggagagctgaaatgttcatgaatatcaagcagaacaagaattaactgcatggactaaactaatagaagtttgaagtaatcttttttaactttttgcttaaaatgttgctgataatttgtttttcaaaatcaagaaacttttaagctatttacagcttttaacaatggagtatactcctttgaacaaaatttggagcatatttgtttttaaaactacctgatttctacagaatttggaatctatttgtgagtattctttacttatgacaatacagttatttgcataagtgcaataagaatctgttttcatttgtaacagcacacatttgaagaaactggttattttaccaaggctttgactgaaatagtgtgctttcctttaaagaattaaacttgacttatggagccaataaaaagtcccttggaaaaactagcctcatacctttgtctccacagtccctgtacagggttcctgacctgtggtaagtaaaaaaggtcacttactgacaggcccaggagccccaggtttttgttaggagctcaaaaggagaggaattcacccaactcataggtatttcatggtacaaatccatggctgggctgtgctttaaaaaagtcttctctgagattccttctgtggaaaaagttccatcaaagccaatttaaaagcttatataaaaaataattattcttgctgcactgtatacaaagaattaggccaagtataataaggaaaaccagtcctgccatgatttgtctttcataaaaatgggaaaggggagagagaaaaattatgtttcaaaaactatagtacatctattgttagattctagtcttgtgtaatgtttttcaatttttattattttctacagtttggactgaattctaatttttcttagctacatgtcttcaaaataatgttttcaatttttttccttctttttttcctccatttttccaaatttggagtcactggaaactaagatgtgctttcataaagccctgtgaaatgaagctaaacaacttgagcttcagaagaaaatagcagcgacctatttacatacataagccactttcatacctgcctactgatgtatggacttcagagtaatgtggcatatatctattttccagaattgttcttttgtttgttgttgtcctccccctattttctcttcacaggacatgagacttcacaaccttctaaaaaggagctttcctaataactcaggacctatctatctaggaataaaccatcctagccatgagagatcagacgaaacctgaggccagagactcattttcttctaaaatgcgttctccaacagatttttaaaaagaaaaggggggaaatgtgaaagtattttgggcccctcaaatcactaaactaaaggaaaacttcaagtggggaactgcttagggtaaacctgcctcccattctgttcaaagttatccctctgctcaccaagataaatgcatatatcattgccttctgtggagaggctaattagaaactcaaaaaaaatgcaaccatttgtctcttatctacctatgacctggaagccccctccctgcacctttccagaccgaactaatgttcatcttacatgtgttgattgatgtcttatatctccctaaaatgtataaaaccaaactgtgctctgaccaccttgggcacatgttgtcaggacctcctgaggctgtgtcctgggtgcacgtcttcaaccttggcaaaataaactttctaaattaactgagacctgtgtcaggtcttcaggattcatagtggttagttagcatttaaaaatcaaataacatgaggggctgggccttgatactaggtacagagcaaagtaaatctgtgtgaacgttagacagcattctagatttgggtaacaggtaactcgtggacaactactcagctcttattctgaatgcaccagcactaaactacccctaaatgacctgagaaataagattgacaacacagtggaagaaaaaagcctaataccaagtgactaaagccacatagggcaaattaggctaaagcaaagcttgaaaggtggggtaaacactcacagagttactggtgttgagaattagactgacaaaacacatgcccaagagcgctatctgactctgccaggccatgttgctatttctttggcagtcattgagaaaaaaactaacaaaacaatcctgtcctggtattgctgctgcactggggagaggtgatctatacagaagggagagaaggggaagggacagtagaggaggggaggggatgggagggaagttggcaacaatatcagttctaggaaatggtcagaagagtcactgttcagggcaggaacagtcggggccctgctatttttgtttagtaatcacaactagcctcccgggaaaattctatctgctgtccagcaggctttggaaaagagcccccctatacacacatgcacacacacaggagcatgcgcacacacacacacacacacttatgggagagagaggaaggagacccataggaggcttgggtctttgaataccaaaccaggtaaatgtgtgctttacctatgcacacccaaacacacacacacacacacacacacacacacacacacacacacacataccccagagaggttttactatttatcaagtcaggaataaattttaaattagagttcttataagagagaggaaaattaaatagaacatacaacttttagatcagagaaatggcctaaacacgcaagagtaaaattttctaggggaagtaatttgcttattggttcatttaaaatttctagatgaacacatttcctgccaaatctaattgcaagaaaggtcaccagtgagagaaagcaaaggactcttggtaccttccggctaaatcctcgatatcttttatgaacaggcctccttggtgcttgcacatattcttgcatgccctcagtcggctcttattcttgtacaagacgtagtctttgccagtgctcttattgcgaaagaaattgattccttccttaagactggcaacttcaacaggtgataggcacaacaggatctcagttgtttgttcgatgctatgaaaaggcaaacattttgagggggaaggttaataatgttaggttttaagagacaatcatttcaaactgacagctcaaaaccccttttccctaaaatattttgtaagccccttgcgttccaagtacccaggtttagtggctacctgaggatgcatttctccccaccctgatatgaatgtaaatatacttcttacttgttaaatatgcctctccacttttctagggaactaatagccctcttacttgcctgcccatcgtctgccggttcctctgcctgggtattttgaaagaacagcagttgctcatatcgtttctgttgctcatttgctcccctaaggcattagtcagcctgaaaacaggacgtttaaggtattttcctttaacagttactgatttcctttgacagttttctccctctaccacagctcttttagaagtctaacaccatattcaattctgagaagccactgtgctgtccctcccatctctgctcttgcgcatctggacttcctctgcctggaacgcagttcctctccttcaccacgcagcatcagtcttgggtcaaatagaaacgaatcgtccccttcctggttaagtcttccaagacacaccagaggtccaggctggcattcttggtgtacatccctcttctgtagaacattataacactgtaattggcacactgccctgttgacttacatttaggcacttttgaaagcactctgtatcttccttctccccctaccacttagcccactgcctttcacaggatatgtcttcactagctctctacttaatgaatcacccctcccactgcactcaatttgattaatttacaaaaagctccagccgcaaaccaagcatttgaatcttttttttcttttaaggaaactagccgttacacttctcaaaccccaatttctaaacactctgtttacagtgcaacactgaatcataacagaatatgatttctgccaagaaaggtttcaaaatagcttttgcaaatccatggtaggaaatctgggcacatgttgtttagttttatatttgactccaaacaaaaagtagccaaaattctctttgcatgttaacttaaaactgatttggagcacaagcatatttgtggcactttcagtttcatttttagaagcgctgcaaatttcttaaaggagataaaaataattttaagaacactccagggtagaaaataacagagaaaccacttccaattttaaactgatgaaggcatagctctgtaatattatgatctactttctcaaagcagattctcattgtcacctctgtcccaaattcctagtaattgtgttcccaatggacttgaaattattccaaaaatatgttctaaatgtatttgacaggaagaagccattctaaatttcatgacttcttttttgactttgttcttacgagtacagatatctgacaccaagctaacataagcactgaggcaattcctggaataattagtctaagagtttaaaaggcaaacctctctagatttttgttgttccattgaatgaattcatatagccaaagttctctgttagatttcaacttatatcacaaccatgtagaacaggttcactcaaccacacttttgtcctcagttccacgtgaaagtcacattggagcagaaggcaaaagaaaaaaatatgtgcacctatatacatgcttttctgtgtattgtttaaatgattagcttttccccaaagtatttttaaagatatcaatgaatttgcttctatcaaaatcagaaaaataaaactgtagcaaattcttgttttgctataaaacattaaaactaaaatgaattgccttttttcgaattggttttgggggtagattcgagttacaaaatggccgcccggagcgtgttcggcgcggttcccccagcggtctctggctgaaccggcgctctcgcctccctgctgaacacagcgtgaggaccccccctccatggacatggtgtttgagtctctgggcttgccgaacaccaagtcctctgagttccgcagsgcagcacyggaagcggccgagcgcgctcagcccggcgacccctgcgggctccagacccctgcgccgctkcgccctgggtttcgccgcacccaagacccagcgagtgcagcggcggccgccgaggaggttcgaaaacacggccaaaagaaatgccgagaaggaactgacagataggaattgggatcaagaagatgaagctkaagaggtgggaacattctccrtggccagtgaggaagtcttgaagaatagagccataaagaaagcaaagcgcagaaatgktggattcgaatctgacastggaggagcctttaaaggttttaaaggtttggtggtaccttctggaggaggacgctttcctggatttggtagtggcgctggagggaagcctttggaaggactgtcgaatggaaacaacataaccagtgcccctcccttcaccagtgcaaaggcagcggcagagcccaaggtagcctttggttctcttgctgcaaatggccctaccgccttggttgataaagtttcaaatcccaaaactaatggggacastcagcagccctcctcctctggccttgcttccagtaaagcttgtgtcggaaatgcctatcacaagcagttggccgccttgaactgctccgtgcgggattggatagtgaagcacgtgaatacaaaccccctctgtgatctgacacctatctttaaggactatgagaaatatttagcaaacattgaacagcaacacgggaacagtggcaggaattctraaagtgaatctaacaaagtggcggctgaaacacagtctccttccctttttggctcaacaaaattacagcaagagtcaacgtttttgtttcatggcaacaaaactgaagatacacctgacaagaaggtggaggtggcatctgaaaagaaaacggacccatcatcactaggagcgacaagtgcctcatttaatttcgacaagaaagttgatagctctgttttgggctcattaagctctgtccccctgactggattttctttctcccctggaaactccagtttatttggcaaagatactacccagagtaaaccagtctcttcaccatttcccactaaaccattggagggccaagcggaaggtgacagtggtgaaygcaaaggtggagatgaagaagagaatgatgagccgcccaaagtagtagttaccgaagtaaaagaagatgctttttactccaaaaagtgtaaactrttttacaagaaagacaatgagtttaaagagaaaggcataggtactctgcatttaaaacctacagcaaatcagaagacayagcttttggtgcgggcagacaccaatttaggcaacatattgctgaatgttctgattccacccaatatgccatgtacgcgaacagggaagaataacgttcttatcgtctgtgttccaaatccaccaattgacgagaagaatgccaccatgccagtcaccatgttgattcgggtaaaaaccagcgaggatgcagaygagttgcacaaaattttactggagaaaaaggatgcctgaacacgcgaagttggctgcggaattattgccaagttgctgcttcttccaccgcyccttaaagttagtcagtttttcttctcttctttgacattctaagaacttayagataacctaaaacttttgtgagaaagattaatgtggccaataaaacctttaaatgttaagtgtcaaaaaaccgcactctcccttcttaagaactgcctaaagtgtaaaatacatttgaatgcaatttttggaaaaaaaaaaaaaaaaaactaaaatgaattttaatacacctactttttaacatttcaatattttttcaaatacattaatattcttgaaaataaccattaaaatacatttatacaggggcacgctttttcctttttgcctcagaagtaatggcagtgtggcagtataacatcctgtctttaagttttggatatttcgtttgtcatggaatttgtgcgttcattttggccttaaaaaatattgtgttggccaggtgtggtggctcacacctgtaatcccagcactttgggaggccaaggcaagcggatcacctaaggtcaggagttcgagaccaacctggcctacatggtgaaaccctgtctgtactagaaatacaaaaattagccaggtgtggtggcaggtacctgtagtcccagctacgtgggaggctgaagcaggaaagtcgcttgaacctgggaggcggaggttgcagtgagctgagatcgccccactgcactccagcctgggtgacagagtgagactccatctcaaaagaaaaaaaaaatgaaaaaatattgtgttaaaataatttgttttaatcaagttttttttacattccttaaattttctacaacttaaaagtggtctcacttgtctcaccctaatcctgggctctgttattttctgatgcttaattatgatctaaactaggaactagttagaagtcagcttcatagtcaatgtatgtatctcacctgacttatctccatcctgttctttttctgaagattagtaggaaccagatataagtgtgtaacaaacgaatttttaaaatttacctcactagagatcacagaaaatacctatattaataaaaatgtcattggtttactatgtcgagggcctatggaataaacagtgatgctcttgaaacttattttgaaaattcaaaatctagacctcaaaaaaatacagagaggagtagagttttatgaggtaaaaatgtcattcattcatgctctgatggcacctcacaccctgaagatctcttcaaagaccagtggctggggcttctaagctcagagctgagggagaggcaaggataggaatgatataaatgtcaactatacttgcagtccaagcagggcaaggagcccaaataaagactacttatgaagctagaaatcctccagagggtcataatctgagaaaaagggtggaggaagaaaaggcaactcattcagaattttcagtctgtatgtacattttgctccccgtcttaggtattttgttttcaatgggaagatgttcagtattctgttcaagaaaaggtaaactctatgaaggccaagactacagtgcctgtcccgtggtaggtgctcagtaaatatctagtgaattaaagaatatcctcacacgaacaaaatgtgtactccatggttaaaagaagaaaaattcacctactgtaccctgtgatactcaatatctaaaatcaatcacataagcttccactttaggaaactagaaaaaggaaagtaaattaaattcaaaggaagcagaaaaaaagaaatgaaaattagagcagaaatcaatggaattgaaaacagaaaactaatagagaaatgcaacaaaaccaaatgctggttcttcgaaaagatcaaaaaagtgataagcccacagctaggctaactaatattttaaaagagagagagagggaggatgcaaaaatattaatatcaggctgggcacagtggcttatgcctgtaatcccagcactttgggaggccaaggcagaagcatcacttgagcccaggagttcaagaccagtctgggcaacaaagtgagaccctgtgtctaaggcaggtgtggtggctcacatctgtaatgccagcactttgggaggctgaggtgggcggattgctttgagctcaggagttcaagaccagcctgggcaatacaatgaaaccccatctctacaaaaaatgcaaaacaattagccaggcattggtggcttgtacttgtagtcccagctgcttgggaggctgagactggagaatcacttgagcccagaaagcagaggttgcagtgagctgagatcgtgccactgcactctagcctgggtgacagagcgagtccctctctcaaaggaaaaaaaaaaaacagaccctgtgtctacaaaaacaaaaaatacaatatcagaaatgaaagaagggacaacactatggaacttatggacattaaaaagataataaaggaatgctatgaaaaactctacgctcacaaatttgataacctaggtgaaacagaccaatccattcaaagacacaatctgccaaaacttgtacaaaaagaaatagactatctgagtagtactatatatattaaataaattgaatcggtaactaagaaccttctaaaacagaaagcatcaggcccagaagggtgtactggtgaattctactataattttaaagaagaatttataccaattttcaaaagtctcttccagaagacagaaacagagggaatatttcctgactcattctatgagcccataaccctaataccaaaatcagacaaagttataacaagaaaaaaaaactacaggctaatttctttcatgaacatagatgcaaaaatactcaacaaaatattatcagatatagcaatggataaaaagaattatatgctatgaccaaatgggatttattccaggcatgtaaggctggttcaacattcaaaagtcactaatataatgtatcaaatcaataggctaaagaagaaaagtcacatgatcacatgcatttgataaaatccaacactcattcatgataaaaactctcagcacactagaaatacagtgaaacttcttcagcttgatagagaacatttacagctgggcacagcagcccatacccattaatctaagtgtttttgggggtcaacacagaaggattacttgaggccaggaggttaagaccagcctggtcaacatagcaaaaccccattgctaaaaaataaaaataaaaaagcgccaggtgcggtggcttatgcctgtaatcccagcactttgggaggctgaggcaggtggatcgcctgaggtcaggagttcaagaccagcctggccaacatggtgaaaccccgtctctactaaaatacaacaattagccaggcatggtggcctacgcctgtaatcccagctacttgggaggctgaaataggagaactgcttgaacccaggaggcggaggttgcagtgagctgagctcatggcactgcacttcagcctgggtgacagagtgagactccatctcaaaaaaaaaaaaaaaaaaattagccaggcatggcagtatgcatctatagccctagctacttggtaggccaatatgtaagtatcacttgagcccccagttcaaagctggggtgacctatgatcacaccactggactccagcctgggagacagagcaagaccctgtatcttaaataaataaataaattaattaattaattaattaaaacatctacaaaaaatgagaaagtagaagctttcttactaagataaggacaaggcaaggatgtcgtctctcaccactgcttttctacattgcattgaaagttctagacaataaaatagggcaaataaataaataagtggtatacaaattgggaagaaagaagtaaaactgtttttgttcacagataacatgattgcctatgtagaaaatctgaaataatcaattcttaaatgtgggctgcacatagagacttcctttcatagagacttcctttcaaagagtacagtatggaaatgatgaaaaaaagagtaactttaacagtaaggaaatgtgacaatccgtcaatatcaacggtgataaattatgttagaatgtaactttaatatgatgtggtcttcctcctgcaaacccataatcccagtctaaccatgagaaaaaaaatcagataaattccagtagagaggtaacctataaaatacatggtctgtactccttgaaactcaaggtcatccaaaacaagaaaaatctaagtaaatattacagccaagagaagcctaaggagacatgatagctccttagctaatgtgatgtggtatcttagatgtaaccctgaaacagaaaaagacattaggtaaaagtaaagagacctgaataagctactcagcacattaaggcaagaaaaaaaaaagtcaaacacataaggagtggaaagaaaaaaaatcatttttgaagatacttagaactgactgtatacataaacattcagaagaacccacatataaattataagactctgagagtttagtacagctgttagatatataatcaatagtttaagaaatcaatttattctcacatcagcaataaaaaatacaaaaattgaatttaaaaatatatcatttaagatagcagaaaaggctgaggtggatcacctgaggtcaggagttcgagaccagcctggccaacatggtgaaaccccgtctctacaaaaaatacaagattagccgggtgtagtggcacatgcctgtaatcccagctgctcaggaggctgaggcaggagaattgcttgaacccgggaggcagagattgcagtgagccgagatcgtgccattgcactccagcctgggcaacaagagagaaactccatctcaaaaaataaataaataaataaaaattaaaagatagcataaaaaatgaaatatcaagaaatacatttaacaaaagatgatctctttggagaaaattataaaactctattgagagatattaagtgtatctataaacgaagagttatattatgttcatagataggaagctcaatattatgaagataatcaatttactccaaatttatctgtagatttactatagtctcaataaaacccccagaattttttttttttttttacagcttaaaaacttactctaaaatttattaagatatgccaagggccaaaaagagaaaaaacattcttcaagaagaacaaggtgggagatgagagaggatttgtcctagcaaatatcaagacttattgtaagctataataattaagatcatatagtgttggctcagtggtagataaaataatcaagggaacaggatagaggcctggaaacaagtccacatatacaccaacacttgataagtgacactgtagatcactagggaaaggataaatgtttccactaaacttgctggggtaactgggatcccatattggaaaaatagattggactccttccttattccatagataaaaatcaatttcagacaagttaaaagacttacatttaaaagataaacaatcaagcttttggaaggtatttaggagaaattttttataatcttgggacacggtggatttttttcaacaaaacacaaaaagctctacccaaaaggaaaattattgcaattttagattacaccaaaagaacatatacaccccaaaacacaataaaagagtaaaaaggtaagacacataatgaaaatttgcaacataaatatgacaaaggatttctatgcagaatatagaagaatgtctataaatcaataagaaaaagacaatctataagaaaaatgggcaaaaaggtttgaataggtacttcataaaatagaatatccaaattgtgactaactgtataaacagagctcagccttactagcaatggggaagtgaaaataaaaaccacaatgaagtaccactatacttaccagaacaactaaaattaaaacaactgcaagtactaaatgttgataataggagtatggaaactctcatatgttactaatgacaatgtagtgaggttcaatctcattgaaaaatagtgtggcattctacactaaaacagagaatacacatatactgtcacctaacaatcctactcttagctaagtctcaacactggagaaatatgtgcatatgttcttcaagatacatgtacaagaatgtacatcacagcattattcatattacatttgagtatattacattggaaacaatgcaaatgttcatca

SEQ ID NO: 96901 - DNA, 12252 bp, Homo sapiens
agacctatgagaaccaacacaacagctaggtgtaagcaggcaagctcatgaatgagcataacagaaatctccaatgcctaggaggccaggccatttctacaatgagtgaagcaggcctgatgggtactatggcaaaccacagggcacatgccccagctaaagaggggcagccgctgctcaagtccagccaactgtagccaaatgtaaaatgcaggcaaaggatgccagatctgctttgtcgagataagcaggaaatcccaattttgatgggatgtctcccaagttttaaatgttcacagctaatttatttcattaaaaaatccaaaacaaacttcagcaggccaaaccaaagacatccacaagccagcaatttgcagcttctaggatatgactgggaaacgaggatggagactccaggcactagaaattttcttacttcttacccagggatcggaagggcaaaaacactgaaaataaagctgacctccgggaaggcggtggtggcagcagccagggcagctgctgcccaggagtgaaagcaaacctctctgaaagccaagaatgagccggggccttcagaatcacagccccacatctgtgacctaagttagtcaacaaatgctcactgagggccgactatgtgcttggcactgttccaggctctgaaaaagcagcagtgtagaaatccaatgaaattcctgctctgcactttgggaggccaaggtgggcagatcacctgaggtcaggagttcgagagcagcctggccaacctggtgaaacactgtttctactaaaaaatacaaaaattagctgggtatggtggtaggtgactataatcccagctactcaggaggctgacgtaggagaattgtttgaacccaggaggcggaggttgcagtgagctgacatcgcgccactgcactccagcttggacaacagagtgagactcctgtctcaaaaaaaaaaaaaaaaaaaaaaatccttccctagaggaatgcacttatgtgtcgcatttccgggcaaaatgaaaaataagacagttttcagtggttttagcaaaggctgtgatagagggtcatcctcttcagctatagtgccactcccttcttggaaactcaaagacgacaaaaacgtgtaagtgaaacgggctccatgggcccagtgctccggcattccagaaatgaagagaatggggttttcctgcttgtttttggatgtatccccaacacctagaatggtgcctgcacgtgctaacatctgctgaatgaatgtgacaattgagggctaagagatattcccaagagcccggtgcggggggcggagaaataatatcactgaagttggtattggtttttcccacatgaaaagcatttctctttgcttccaaatgtctatgtgatcatagataggtagaatcaggtcttaaggtaaataataataatcatgataattggtctttccctgtgttagcaagcttgggtattcagaaacaagcagaggcaaaatctaatagcccactacaaaaaggaagtccaaatggagcaatgtggacttctcacaatcatccttccacattttcatctctgcttctcacttaggacaatcccttttctttttattttattgcaatgtgttttaaagtaagtttgccggctgggctcggtggctcacgccttaatccctgcactttgggaggctgaggtgggtgaatcacctgaggtcaagagttcaagaccagcctgaccaatatggcaaaacctcatctctattgaaaatagaaaaattagccgggcttggtggtgggcacctgtaatcccagttacttgggaggctgaggtgcgacaattgcttgaacccgggggcgggggtagtttgcagtgagccgagatcatgccacttcactccaggctgggcaaaaaagcgaaagtccatctcgaaaaataaaaataaaataaataaaaaatgtgtttgccggtctcagggaaaacaaatacaaagcagtgttgtgcaaaatcacacaccggtacgtttggttgaactctgtcctaaacacagacagcagtcgtggtgggcacggcaactcaccgcacgccggtccagctgcgattgatttcaagacccatttccattgtagatactttataattgtactctaattgtagttaagatggcactcaagataaatgaatcatctcagatatgggaacagggtgctccatcatacaaattccctgaccgttccccgtgctctgagaccagaagaactctgctcctctcaagtcccagttggtgataaaattccctttgccttccttgaaccagatcctgacagccagcaagccaagcgttcccaatcgccgactgtctccatgtctctgtgttggattttttctttttttttttttttagaggaggagggaaagtaccctgtttatttccaaactcccttgcatctgatgcacgataggctggcatttgctgttaaagcagaaaattataaggagggcctaattgaccctcttgcgtctttgaaaaagcctgtctgtggtctctaattgaccctctaggtacctatggaacaatgaatgaatcttcaggaaataatggagggcgatgattaatagcccgggcctggctggacctccatctctcacagttcttctccctgttacttcccttcctcccctccatgacactcgattccttgcatttcataagcagcgatttattattatcacagaataataaataccctgcagtagacacttttaagaatcggagacatcacgattctgcagagattgtgataacatttatttaagctggcattctcatttttcttattggcatggctcagaagagtcctcctctggcatttgtgggcaaagtcaaacaagaggcttcttttgcactccttgtgaaatcattccaaatgtggagtcatttggaactgcaggggcttcttacttccagtccaaagggtgaacattgtcccttttgccttgctcataagaggactaaagcccttcagacgtacagcaacaacaacaacaataatgcaagtagtaaaaaaaaaaaaaaaaagtggcactcctttagtggggaatgtggtactggcctgcatatattaccttgatgaatactcacagaagccccgagacatcgatgttgctactgtccccattagtcagaagaatacactgaggtgcaaagagaataagtaatttacctaaagccacaaagtccaaagctgcagctctgtatgctatacacatcgccttccaagtattcaacaataactgtgccaaatgtacaatattaaggatatgttttgggaaatgtgagtattagaataaaaaagagtacctttccctttcagtttggttgaaaaatgcttcctttccccggacagtataggagaatacatttaaatttagaaatatacacatgcctccaatgaggattctgagaaactagaatttttttttttttttttttttttacaaaatcatagcattaactatgagagaaagagaaaaagacagagagaaagagagatagagacaaagaggaaaaaatccgtccttccaaacccaccctggcccccaccaatgtctccacattcctcgggaccttaaatggcaagggagccagaagttgtctgccaggccctgctggtttatccgggccccttttcttcttactcagtgctttgtgggagaacaggccgcctatgcagcaaaattaatgcttgggtaaggcttacagtctttgtgaaaggaatggattgtctccagcaccaggtcccacctctgtcttcagaaagcactgggccaccattcagagtcaggggctctgggtgggcagtgggcttctgacagataggtgcagcccacgtgactcagaaatagagaagaagggagctgaggaaccaaatctgcgtgccctgaatggaaggctgccttaggccacctctacggtcctattcaactgcagcattttaaaagccaaatgagactgtcctggggatttttttttgtccaaaggcacatatatatttgtgtgtacctgtgtgtgtacacccacgtatatgcatggatatgtatcatacaatatatgtacatatatcaaggtctttacctatatctattactgtgcatatatgtgtatatatgtatctatatctatcacttctaccaacccatcagccagaactgttttcatatgctaggttttactgtatggagcttaaaacccatttatgcctcaggttgcaattttttgaattttcacgatcagaccttggtgatggctttgagcggtaggatataaataattcccacatacttagtgttccaataatggaacactaggcatattactacggggcttataccactgatagtgaaaatcttgacagttcttctcttccctttccatcatgtccacatgcatctggccaccaagtcctccccatccctgctctagtgctactgccttagggcaggccaccttcagcacttttctgcatggtagcaagaagctgataagagggaaggggtgccacatggtttagcctgttacccattaccaacttgtactgcactcaaagtatctgtggaacaactcagatttgttgcctccctgcttgacggcgtgtttgatgccctcagaaaaacacttccactcctcagtagagcatcacagccctctgctgtatgacacccgacctttctacacttttctctctgcaccaagctgtgggagtttgctctcttaaactcccacgttccaacctcagccaagctctccgggcagccacacttccctttgccagctgtgaccaccaatactgccaccaggggggtctgcaggacctgcagggccacactcattggcacctcggtgacttcacttactctggtcaccctgctgtctctcccaggcctcctccctcacagaccttctagggaaagcttctctatcatggtcaactttgagccgtgtatattggccacaggcatccctccttctattagggcgccatactgctcacttattattgcctaaaacctgctcccttgtaggctttctttacagggctctagcggattcttagagatagtagacagctcactggtaaccacagttcaaatgcaaaccaaccaattcacagccacaccctcaccactggctttattgggctcgaactccaggccacacccacctaccctaatcaccccatagccatgggtcagacacctaaagacaacccctgtgtcccagagcccatggaaatgacccaagccagccaatcctaagcctgcttaccctgcctggccccttctttcctgtgaaaatcacaataaaaacattttttaaaaaaatttaagttccagggtacatgtgcaggatgtgcaggtttgttacataggtaaacctgtgccatggtggtttgctgcacctatcaacccatcgcctaggtattaagcccaacatccattagctattcttcctgatgctctccctcccccaaccccactcctcacaagccccagtgtgtgttgtttccctccctgtgtccatgtgttctcattgttcagctcccacttacaagtgacaccatgcggtatttggttttctgttcctgtgttagtttgctgaggataatagcttccagctcaaaactcttgacagttctccccctctccctctgcctcctgcccaaccctggggctttcccaggtaactccctgtggcatgtggagtccccatggatctgtgagtaacaaaccatctttgcaatagcagtcatttcctcatcttggccttaccataccacaataagaataaaacctgttaaaacagagagaacagagggagaaaggaaggagaaaaggaaaatgaatgaagaaggaataaagaatgagtaattaaatgaacaaatgataagttacttaaaatctgctttttcttaggaggagaaagaactaacagagatgcagaagtcctcttctactcgggctggggatatgcrtgagaaagacacgcgtggatgccgtatgagctctcgttctgaatgcggaaatctgacctcccaccggatactcagttcagggggctcctggaccctccagctgctcctctactcatcgctccctcactcagaaaaccagcagagaagtgaacttcctcaaatgactgacggtaaatatccagcatggagctggattacaaaactgtataaactgtaaatagcatcacgctattcccttttaaagaagtgtcagtgcttttattcattaagattcagatgctatggagggggcagatgcgccttctcccctcctggatcccaaataaaacaccccgtatggaagcagatggctttgtgtaaatcagatgacagtttacggagtgagacggcctcatcggaacggcattacaagtatcatcttttgaggggaaatggggttaatcaagtccagctttaattggaggtcacatttgcatgtgaaattctgggtccctgtaaggactgcctgggtccctgggtcatcaggccagtaacctctccaccattttctttccagagggagccccaggtaatgcatgagaaaggaagtgttataagaagccaagaatgggtgccccccaccccccaaccaagagccagttctgttaacacagcagagagccctccccaggtctcaaagtctccctgcctttgctgccacaggtaagagggggtggttttgctcactgcaaaccacataacagaaacaacacctgcttgggcacttaaccctggaacgggaaagctgaaagtggtttctgtttattttgatctcgagcgtaaaatgaagagcaatcatgtccctggagtctcggcagaggacaaacaaagctgatggaggaagacaaagtctgctttttcaggatgcttcatgggaggctggggtgttaagcgctcctcagcctgcctgtgtgatctgagaaacggggcgggggcaggtggggcgggggcagtggcatcaggtgcctgcctcccgccgagggtattcaccattcaaagcacaggcgcgaagagcaaacagctaccagacagaatcctttaggtctaggctattcctttcctttgaaccagagacaggaacagaacaccttagcccagcctccctgcaacattccaacacttgaattgtaggatgggagtcccaatttcccagacatcagggcaatattctcccatttccttacaacactgggtcaatgtaaaggttaaaaatttaaataaatataaataaataggagatcaacatcctcctttcttgggaaaattcagacaatgctacacaaaagtttggaagacgagatatctaaagatcacccagaaaaaagatataggagcatgctgttttcattaggtttcttcaaaaatcagtggtatgatttcacagtattttgtttcatggaatatattcacgatatttgtttcatggaataaattcatgatatttgtttcatggaatatactggatatctgtttcatggaatatattcacgatatttgtttcacacaatatattcatgatatttgtttcatggaatatattcacgatacttgtttcatggaatatattaggtatttgtttcactgaatatattgactgttactcagaatcctaacatgcaatgtctttcttcaaaagacagtgtcatgcattccttacagtggatttatcaattaatgctgagtccccagccaagtgataagtcataccatctctcttactccttttttcttaatccttaaaaaaaaaattaggtccgccctcagcctttatattccaattcttcattccacactcctgactttttcccaagttattcaaggatggaaaagcgtatcatctccaagctagctctttcccgccttcccatccaaccaccccactctgctgccatccccagcacagcccaggagtaagatatttgacaagaattgtcagggttaacaagaactcccaaagcaagcactttgagttatgtcagacaaaaatgaaaattcaaaagaggagcattcatccatagtagaaaatatcatgttctaaaaccatgaaaatcaaaaaagaaaatgatttttgaaattatgtctcccagacaaacaagtgctcttgaccagaggccagcaaactacaacccacaagctaaatccagtctaccacctgtttttctaaataaagttttattgtcacacaaccatgcccattggtttatagattatctatgtgctttcactaatgcatgatagcttagtagttgtgataggtaccttgtaggccacaaagcagaaaatatttatcatgtgaacctttgcaaagtttgcagatgctgttctagactcaaaattcatttcagtgtctctcaaataattgggtttgctttgttactctgagtataaatggaatgatccagtgagaacttttaatgacaatagtaaggaattattaatttgggtttagtgaagaagagaatgttaaagaaccaaagaaatttttaaagattcacagccactctttttgaaataaagattaaatccctaccaggtaacttcattcaaccatgaacatttattgaatgtgtattgcgtgttttcaacctaggcatttcccttcattgttgcgggggtgggatgggaattttcagtcctcctctcctgacttttcttttttttctttcttttttctcagtcaactctgtccttgtttattttatctggctaaataaaaaatcctttaaagattccccaattctgatggggttcctgccctacatacaccatacaaatgtttgttacaggtatttggatatctcagatcatctaagacgttcatcttacccttaggcttcatatctaaactgtaggattaagccgttcagaatgtacttgattcctataatatgtagtgattttgctaatgttgttcagttttgtttccttgcccagaatgatttccattagctcgcttgcagattagcagcctaatctcctaacaagagctcttcgatcaaatggtctggagtggccacatgtcttgctgctgccaagtgactgatttaagagatggacaaaaaggagacacacagaagtcgagatagcatgattaatggtcgatccaactttctctgaaccgcatatcatgactgaatgggaaaccctgaagagattaaaggggggaattacattaccatgaataatataaaaaagtgatattctgtctaaaaaccttttgagtgcaagtgactcgaacaaatatattaacagagcttacagcagattcaatcaggttgaacgctccccagaatttattttgaaataagctttatatatctgagacgtgaagaatgaatctattcgtggctggcaggaaagctattaacatgcagattttaattctgcctttgattctacagaggttctattgtccctcctttacgaccggcaatctctcccaattacggatgtagtacacctccacaaatctcaataccacagtgacactctagagagctgagatttattttcctcactttattctaacttctaaaaataagttcaaatatttattatcaaggcaccgataaaagtatgatgtttaaaagcatgaattatattacaccaacccatccatctgttggaaatgccagtttggggctatatttggggggcaaaacttggcagttaagatagaaaccttctttacaaaaactaggtgcacattaacttacaattaagccttgatgttaatgaggttacagcatgtgaccagttaacgggctgcagccaaaaggcaaatattgaaatgaaggcgtttattttcaaaccaacaaacctgaactaaaccattacactaagtcccattagcattctagttattgggcaaaataatttcatctccaaaattaattaaataaattggaatgacctggaatcacttctgtggcaggcggatggaacaatactgcatgaaaggcaaaatcatttagagtcaaccggcccatcagttccttgagagatgatgtttaaattgatgggaagtgaaagttaaaaatatgattcatccaatgaggcagtgatgtactgttaaaatgtttgcaaaacaattttaaaaataaaccttacttaaaaaaatgtctccccctaaattcagggataggatgtctttagattaaaataatatgttaacatgttcatcacttagaaaattcggattctgctctgcgtgagtcacatttattttctaagcaatctggatttttttttttctttaggaacaaaaattaataaaatacatgactgttgaatgcaattaatgggatccaagggctactgccaagtttttgaagagaatcaacagcagagtcttagctcaaatcatatccacatcagtactacggattaaatgtttgcgtcctcgcaaaattcgtatgttgaatttttttttttttttttttttttttgagacagtcttgctctgtcacccaggctggagtgcagtggtgtgatctcagctcactgcaacctccacctcctgggttcaagtgattctcctgcctcagcctctggagtacctgagattacaggcattcaccaccacacccggctaatttttaaaatgtttttagaaaagacggggtttcaccacattggccaggctggtctcgaactcctgacctcaagtgatctgcccatctcagcctcccaaagtgctgggattacaggtgtgagccaccacgcccagccatatgttgaaatttaatcaccaatataatatattaggaggtagggcctttgggaggtgattaggtcattgaggcaaagccttcatgaatgggttaagggcttaaaagaggccagatagagagaccctttgcccctcccccgatatgaggacatagcaaggaggtgaacatctaggaaccagaaagtgggccgttgccaaacactcaatctgccagcagcttgatcttggacttcccagcctcaagaactatgagaaatagatttcaggtgtttataagccacctagtttatgatattttgttatagtagccaggacagactaaagcacaaggctttctggatggcctaatgaatgagaagtagaatcacttgtaactaatacagtgtctagagcacagtcaacactaggcaaatgccagcaatcacacttcaccacagggtcattgaaacctggcatttgggtgcatgctgtgtcgtttgtgagctatgtgaccttagatacacatctaacctctctgtccctcatttttttcatctgtaaattggggatactaatagtgtcccctctagtagaattgtattaatttgaaagagctgatgtacacaaagcatttgttatagtgtctccgatgtaaaggctcaatcaatgttcatctcaccctatccccgtgggttgaaactggcagacattccaacaggcctggtagttgtttttttttttttttttctgagacaaggtctcacactctcccaggctggagtgcagtggcatgatcttggctcactgcagctttgacctcccaggctcaagcaaccctcgaacctcagcctcccaagtagctgggaccacaggcatgcactaccatgcccagctaattttttctattttttgtagaggtagggtttcaccatgttgcccagactgatctgaaacccctgggctcaagtgatccacccgcctcagcctcccaaagtgctaagattacgggcatgagccaccgggcctggcccaggtctggtagttcttaacaactactgttgtgcccaggttttctaggctctctctggtaacacacgtcagtaacttatctctttagatggagctttctcaaagtgtggttcatggacaatcagtaccagaagaacctgatgcacttcttaaacacactgattcctagaccccatcctgaatgtactaactcagaatctttagggagtgggactaggaatttatattttaaaaataagttcctagctgagtctcaggtatccagaagttttgagaattaattatttcaacaaacaatataaacaatggaatcgtaaataatcttttcttgggcaaggtaattgcaatcccacaatatgagatgtaattaacaaagtgatgaaactctgggtccagtattcttttgaacaatctcttgccctcactttctagttac

SEQ ID NO: 96902 - DNA, 12553 bp, Homo sapiens
ggcctctgtgcaaacgccactactcccaggacatgaaaagcaccctgcagatgcccagaaccccagccaccacagccagcaggctgcacgtgcaaagaaggctctggacccaagctgcctggacggggcgcctggatggggcacctcttgaaccgctggggctctctcccagcatccctgcggcgcctttgtctcaaatgtggaagcagcagagagctgaggccaggggccgctttatttccctattgctttcaacatcttcttttgaaattctctttaaactgaaactgtcaaaagttgtgtctgataaatctgaaggttgtagaggaagtggtttgttcttcctcctgctcatgatttctgcacaagatagtacacagtacttggtgaactgtcaggcaaggcaagagctcccagtgagggccagaggaaatgcaggagatcactgaggcctgctctttacctgctgctgctgtcagacaccagacaaggtcaagggtgcagcagacaggaggaccccaaagaaggccctcctcatccctccccatcccatcctccaagacattcagggaaatgttcaaacagaactggcctggtggctctgatactcccacggcagcctggctgtcgggtgttattatcccattttccaggtagagtttaactaacgtaatcagaatgtaaataacatgctcaacttaatttcaataactaacttgcccaatgtcacacatagtgagttctctgaagaactgtgaatccacagttcaggcaaagcctgaacttaagaaggtctgactccaaagcctgacgtcacctgccctgggaagccctctctggcccctcagaccttgggtgtagtcaggtcccctcctctgtaatcttggtaacagtagcaatgacagtggtaacggcagtaataagagccctctgtttttcctgtatactttctctgtgtcagacacaaggctaacaccagatgtgcattatctcactgaatccttcacagaagcccatggagttggtaccgctatctgccccattgtactgatgaaaaacaaaagctcagagaggtgaagttacttgaccaaggtcacacagcaggcaagtggcagagcccaaggtagaacttccaacatgctgttttgattactggcctgggctgatcccagttttcctatacgtgacaattctttgcattatcttgggtctagatgcttctagtccagaatgaccccaagggctgccagcccctttgggtttccccaccaacgtcaaaggttgagggacagaggacatttccctgttggcaacgaactgggccccacactcctgatcagctcagccattgccaggttcttgggcctaaggttgatccaaatcggggcaaagaattaggtcctctcaaagcggagtaggaaagaacaagacgttcatggggccttcctgtaattcggcttccatgttgaagtccaaagtcccaaggccagcatgcaggcagctcactgcgtccgccctccacaattccaccagcccccagcccactcaatacacctgaggcctatggagcgtgtgccaggcctcaccaggcccctcggactttcccaatgctgtgttctgcccagaaagctcctccctgctttctcctcctggcctgagcggacccattcttggatcagcagccttctctccagggaccctgctgcttcccacgagtgcccaccctgagtcaccctcgtttgcgggcactggaaccgattgtccataactctcttctcccatgctgttgtctccacactcccaacccttagcacaatgcctggtacccaggaggtgccccataagggcatgcttcaggcacgatgcctaactgctgaatgagagaacactctgaaagcacagagggcacggcacgcgcaggcccctgcgagaggcctggggcatatctgctcacttctcacttcgttctcaccctacaaggtgcggaaggttccatccttgccctcaatttacccgcaaggagagggacactcatgcagatggggccgcagagctggaattccagccccggcctctctctgagtttgcgctctacttccagaaaacggacacatcacctgggggtctgagtgggcagtgggagagtgagcacactttacagtttatcttgaagacaggcttgggagcctgagatgaacatagagaaccatggccttctgcctccccagccctctggcccctgcccaggaaagcccgctcattatcttgggctccaaaaagctacccaaaaggttgcccctgatcgtgcatttcaaagacttgttcacctggactagaggaccacaggagccccacattagaaacaaaggagcaagggccgggcatggtggtgcactcctgtgatcccagctactggggaggctgggatgggaggatcgcttgagtctgggaggttgagaatgcagtaagccgtgatttcatcaccgtactccagcctgggaaatacagcaatactctgcctcaaaaaaaaaaaaaaaaaaaaagaaggccaggcacggtggctcacacctataatcccaggactttgggaggccgaggcaggtgaattgcttgagtccaggagttcaaaaccagcctgggcaagatggcgaaaccccattgctaataaaaatttaaaaagtagccaggcatggtggcacatgcctgtaatcccagctactcgagaggtagaggcaagagaatcgcttgaacctggaaggcggaggttgtagtgagccaagatcatgccactgcactccagcctgggtgacagaacgagactccatctcaaaaaaaaaaaaataaagaagaaaaagaaaaaaataaaggagcaaaagagaagaggccaggaaaagtaaaaacactaaattcctcttttttccagaccaaacctggggtataaatgccatttttgagggtggcgcattcaaatcctctcatcttctcacaggaggcctttacggggtaaagagaaactgaggggagcctcacagagggggagaggcaccgctgctgggggcactgctatagaggctgctctatgttaagcccctgcctcactaggcaggctttgtcccaccttcccaacggggcagaaggttgtcaagcgcctcatctgggatgggaacaccaggctggggcactcagactggttgcgggatgtgcccaggtcccagagtgagtgttagggaccggtgacaaacatgggtccacgtccagcccaagggcgtgggcccacatcacacaacctcgcctaagccccttgcctggtgggatggaaactcgctcaactaaaaaaaacttctagagcccaagaagatccttgttcctgcccagcgaggatggacagcttcaaagggcagtttgggggtttctgtttattttcctgtatgttctggtcacctcaatcatctaaccagaagaactggcccaaaattaggcacaagaaaaaaggaaaaagtctagccctgccacataactcctggaactggttgcagaaactgaactttggctttctaaacttggtgaaggaacaacagcctctttcaagcaaggcccttttgttcctagttcccagggaggaggcagaatctttggctgaacaaattcggttcagcccaagtctcccagggaaacggcgctgtgctaagccccccatggtcaatgcattaacttgctcctatcccaggcagatcaccaatcaattggatggcattggttttgtaatttcaaaagcatgtagccatcagattcattatgcaatcatggcccgttcgtaagtaataccaataagaagtgcttcctgagcaatgtctcagttatgcctcatgataaccctgtgatgtagacacacccccatctttcgttacacagacaaggaaactgaggctcgccaagctcaaaaccattgccaagatcatcactagtaagtggcagagctaagattcaaacacagcaactgcacatccctggcctccaatcaaccaagaaacagccaaatgaagtaatttttttaaaaagggaaagaggccaggcctagtggctcatgcctgtaatcccaacactttgggaggccaaggcaggaggatcacttgatcgcaggagttcaagaccagcctggacaagatggcaaaaccccatctctacaaaaaatttaaaaattagctggatgtggtggcacacacccgcaggcccagctactcgagaggctgaggtgggaggatcacttgagcccaggaagctgaggctgcagcaagctgtgattgtgccactgaactctagcctaggtgacagggcgagaccctacctcaaaaaaataagacaaaataaaaagtaaaaaaaaaacaaatgaaaacaagagagaagaaaagaaaaaggaaaggacaaggatgtatttttcatcatcgacttcttgccacctgaaattaccagcttcttctctgcaagggttgtctccccgactggaacgaaggtgttctagtggggctgtgtttggttcaccccacagcccagccctcagccgggcacctgacacccagaagaccctgagcgaaggtctggagcgagggaactcacagggccctgctgtctgagccagggccacaggcacaacccctgcctttcccacaggtgacagcaaggacagctcaccgtgctgggtcactctgcccagtcaccaccacaggcgaaatggtcgagccagagaggccctctcacggttcagctgagccaggcccaaggtcagctcgctggggaatttctctcattcgttcattcaatcgatcatttcttattagctcattcaacaaatacttattgagcactaaccacaaccaggcattgtgcgaggcagccttcttgggacagtgagtgttagggactggtaacaaacgtacggggtccagtctggggacagagaacaggaaaaggaagcaagcacagcaggacacagcgtcagacacggggtgcatcctgcccctatcaaggacgcaacctggtggtagtgaaagtccagctggcatcccctccctccacagcagggcctcaggcctggtttatatatgtttctaaatgaagatccagcccacaacaccaaagactgtccaggtacagcatcatcaagtatggatggaaaaaacggcacatgcaaatgaacaccctacaaaaatgttaattatcatctctggctgtcggcattctaggtggatttggttttcttctgtttatttgcgttatctaactgtgctacaacaaacccgagttctttatgtaatgggtaaggggggtgaacatctttaaaaaataaatgtccgctcgtagatgtatatccaaaagaaccaaaagcaggggcgataataaatacttgcaccaatgttcacaggagcgttacccacaacagccaacaagggaacaactcaagtgtctgtcgaccgaagaatggataaatcaaatgtggtctatccagtcaatggaacattatttggccttaaaaaggaaggaaattctggcatgtgctaaacatggggggaacgtaaaaacctcacactaagtgacataagccagacacagaaggacaaataccgtatgattccacttagctcaggtacttcaataggcaaactcatagagacagcaagtagaacagcagtgaccaggggctgggacgaggagagaatgggtacagagtttgtgctggggatgatgaaaaagttctgggtgtagacagtggtgactgtgaatgtatttaatgccactgaattgtacacttacaaatggataaaatgataagtattgtgttatgcatattttaccacaataaaaaaatttttttaaaacctcagaacttcagctgccaaaacgaatgaatgaatgaatgaatgaatgaatgaatgagaccttcactcttccctgatcaagattttcctggttgcatcatcaaatagacaaagtgagaaaacagcatgctgtaccggggtagggacagcgactggggcagtctctctacctgggcctcagtttcgccaactgtgaaatcaaggcayctgccccatcggaccagatgtggagcctgtgaccagatgtcatctttcctctcttcagtctcacagctaattctaggaaggtgctggcactaggaagagctctggcttagccagccacctctcactgtgcccacgccacttcccytgggagactccttttctyacctgtgaaatgcggagactaatgacaaagctactgtctctacccctgcttcccttacacactggctgcggctccctcagargatcacaaaggtgaggtggatggagccctagcttcttccctgagctggctgcctggaaaaagccaccccggccaggtaactcaagggactaggaaaatcctggctgcactcaagcttggcaaggaggctgaggggcaggagaaatgaaggagaactctccaaggcctgccttgttgtccaaccaacacctacttcatttttccttaggtggaaccatacaagagtgggcacataaaggacacctgggaagtcccctgaggtctcaggaaaagcagtggagcctaggaaaagacacacgagctcgagtcggcctgacctgggtttgcatcgcagctccacaacccacagccatgtgaccctggaggccaagggcctggggtacctgtcccctctcttgtaacacggggacactgcccacccagggggctgaataagtgcctggcacatcataggtgcctgagaaatggcaggttccattatttcacccggtccagccctggcaatcggtacccagctgggcagagagccggcttgaatcgtcctacaaaatcctcagggaggagagaggactccatgcgcacagcacgctcataaaaacaaatctgagaataaaaaccacaaccgccgtcccgccaaacgtagtgggagtaatgaagcaaacaaaagggaaagttcaactcctttttttggctttagaacatgcaaatgcaaaattcagtggcaaaggaattatcccagaaaaattccatgtctaaatctgaaatggccccaaggaactctgtccctctctagtcatttaagtgacgttttgctctagggtgtggctaaagatcggggccagccaacctggggagaaacaaagacaatgaggaaacttgtttattggggtccttaaaatgttaacaaccaaggaaaaccctcagcttctcttagtggtgcttgcttaccattgctgaaggtgaagtccttggtatccagaaggaaggagcccattagacctgcactcatcgtccactgctccattcacatcagctgaatttgccaggtagcctccatgatagagactcagtaaaggatccatacttcccaaattccaggcgttcaaatgccaagactgcctttgcctctgtggatactccctgggcatattttctcatgcttagtattctttaatcgttggtcatcaagggtttgtggtcactctgtccctctgctttacaggtcagggaggtgaggcagcccaaggtcacactgagagccagggcaaagctgagcagtgagccaccatctgcctgattccagcagaacagccctcggactcaatcacaacgcagctccagtgatgcactacaccttatcagagagtgaagaactgctctaaatcttaaaacaaacattttaggggcaagaagtgccaaccttgaaactccagactgggataaaagaaaaaatatttcaccataaccaagaagactaaacacagctcaagcaagtacagaaaacgctgcagggaccagccccacacttacctggccaaaggagcaaaactctgaataaaaaccttgatctttctacttaatgaaacatttttttttttatcacttacatgtttatttctgtgcaaagctccatttcctgctggggaagcgtcactgaccccctagcctggtttattgccctagagagggaggtgtccatgaatccctaagaatgcctatattatggatgctaaaaaacacatagttgctaagttttataagccctgctctgtcttaccattttgccagcccaaggatccatagctttcagcacattttcaaagggagtatgtcattcccaaatctagacccagtaccccagaacatccattcagcagggaatagtctgtcattttgatttttggtgactgtgacaaaggactcactgaccatccacccagacacaagaatggaaatgagaccaggaatgaaagaaaaaataaatcacttcccaaagcaagtcatgggatgcagaaatggaccaaaatttaagtggatatgacagaagagaagtaaaagataatgatgacaacacagttccatgggtttccgagaaggaaagaggaagaaaactagcctcatctttatgagggcagccagctccatgagaactgcctatgcagctcaccgcaacacgcaatgcctagaacggtgcccagcacatactgctgaatgttggataaatataccatgtcatttactctcacaatcctgggatgtagggatgggaatttcagtttccaagatgagggtcagagaactcatgtgatctacccagagttacaagcaacaagaggcattgctgggatgtgaacccagatccaggcactgctttgcaaacccaggtgctttcctctataccacactttgtttaacccaaaatcatctcttaagagcgaacaccctggtgtggagaaggcttcaaaaaaatcccactggctcccttgagggtcatttaacgactctgggccttaagttcctaatctatgcagtgaaagaagctgggctacatcaagaatggcaaatagggtccccgttgcatgccaacaacaattgattattagtggctgtctctgagctcactgggaagactaattacgctagggttgattagcaatgtctaccacggtcaaggcaatgaggagtggcagcacatgtgtcacttatttgccatcccagaactagatgaacttcaagttctcttccaactatggctggctctgattctaattataaaaacaaaaaaagggggaaggggcaaatggagaaggaaaaataggctaacattttccaacatgggccatggctgaattcagtcaaatcaaggctgtctgcccagccagcccctcatgctccatgcacacagccctgccacatgggaggaagtggaaaacatcagatccactgcccacatactcaacaagacacccaatccaagccagaagctgcagaacaatgggttttgcctggcttggccttagttgtaaaacacctcaccaggaagcgtggtaacctcgcatctgggctcaaacctgggcgggacctcttgcccatcctgagccttcacagattactccaactctctaagcctcagtttccttcatcattgaaaaacttcacaggattgtcataacgatcacatacaacagggcatcaaagttcttcacaacaaggccacagtgggtaggcaaagaaatggccactaccatcatcaccgtcatcatcaccaccaccattttgctttgcagggggcaaattttcagaaaagagtccaagtgcaagagattcttttgtttctcccacgttcagcatgatgcccatttggttgctctgaactctaaagggaagaggctctgaacaccactccatctcctcaagctcctggtgcatcagccagggtcctgggaggaaacagatggcagaggaaattttcacaaaaggacaatatattaaggcatgggcagcgtacaggggaagcacaaaagatggtttttctacctagggtgaccagccgtccaagtgtgcccaggactgaggggcttcctgggccacaggactttcactgcaaaaacctgggacagtcctgggcaaaccaggacagcagtcacttcatttctcccccatgtatttctatccctgggcctgacactgcaggggaaggagcagttacagaaaaacctgggtagagggagtgacatgactgcaggagtggctgagggacgccacccacccatggcaaccgctggcaacccgaaggaaaagggaggagggaataaatagcccactcaccctcctcccatcctccatctcccccaggctctccactggccagacccacccagaaggcaggggagcagaaaagaatggagggtggggtttccaaggcaaaggctggaaagaatagaacatgggcccagaggcaaagaaaaacacacaggccctgtgttgactctggggtggccaggggagccaaacctcacctctcagagcctccatggtgaggccttgtggggactcagtgcccctagccctcacacaacaggaaggaaaggaacttcccttccccactggaggggacactgggatgtggccaaagtccccttggtccatgggtttggtttgtggcattcaaaggtgagcccagcagggctcggaggaagaagaccccttcagctggcatctgacaaggccacctcctaagagtgggaaaggctaagacaattccccaaagaagcagcagcctcctgggcttggtctaaagcaggtgctctgtcactgcagacccgagtgggggatcaaaggcagggcctgcttggggtggaagtctataaaatccagagagcacacccctggaattgctacgcagtttaccccacgggtgtgctcagaccggaggccaccagtcagaggcagtgcatgcgtcaggggcaatatcgtttagaaaataaaagcgactttcaattctgtttttaaatcatattttccgagatcaaaatcttatttcccaagcactgctgctgaaagctgaggtgaaaaccaccaataatatcttaatcctcccaacggcgggtttccatcttgcttgggttgggagcttggtggctggggttaggacaggggctgagagcccattccaaataatggtgcctgaggtcacggagcgaggtcacggagcagggtcacggcacggggtcacagcgcagggtcacagcacagggccacgggcacacccaagaagagcttcccttgactccaaggtcaccagaaggtttccaagaaaactgtgagactttcctgtcccttcacagcctggatgccaaggtcccccaccatgcaacagacaaaggcctttattgacatcgggtattcctggaaaaacggacccaaaccctgccttcaagctcacagtcctgcaggaagcaggaaggtatacaggtggcaaacccaacacaagagaagcggtagccacagtaatgacagtgatggtgacggtgacggtgacagtgatggtgatggtgatggtgatggtgatggtgacagtgatggtgacggtgacggtgatggtgacagtgatggtgacagcggagatgacagtaatggtaggggtcatgatgatgatgatgatggtagcaaacatctgttgagcacatgccacgtgtccacactctactaagtactttccatgtattctctcctttattctcagaattccatgtattctcccctttatcctagggagtggctactcttatatccccagctttcagatgaggaaactgagagctggatcacaccactggttaaatggcctcatatgaaatgtctggatcaaaaagcctggccagccctcctaatcaacctgcccgatcactgtcctgttttagggaaggactgacctgggcaggcaggggatttaacgcctccacctccctgcaagacgtaatggggaaacagtgtgcgggtttcaaagtggaggcagggggtttcctccttcctgatccccttcaagcaaagcttcccagaatggctgagcagggagggccctacgcaggagcacccagtggaggccagtgggactgagatcagccgggatcccctcctctagtcatgcccccagccagggctgtgctggcccagagagggtgccctgcttaccactgggggcaacagaagaaccccagactgttcgtctttgcagtgctccctgacccctaccccccttcaccaagcctgcgggtagaacctgcatgccaactccagaaccttgctttttaatagccttccaggtgatggggttcagctataaaaaggagagggacccactgcccagccgtggatgggtctggggtcaaacagatgaaggcctctttagaagaggtgagaagccagggtccctatcccctctcctccccacttcctcatctcccccaaaaacctgcttcaattcagacagggcacaagaagcaggttttgaagtcatttttccttacgccaaaactttctaatgctaatttctccccctctctcttattggcatgatgtaattccccttttcaacaacccagatctctgaagtcctgagtcatcagggcgaaggcagggacagcgagggggaggtcagtcgggagggatcaaaggtaggggggagcttgccaacgcccaggccagctgggatttccttctgggggcc

SEQ ID NO: 96903 - DNA, 45763 bp, Homo sapiens
ctgagttaaagactccgagctggggagggtgggtccaatgtcatcatgtgtccttgtaaggggggcaggaagatcaaagagagagagccatgtgactacaaagggagaggtcagagagagctcgagttgagggtgctctgtgctgctggtttcgataatagagagaggggtgggtcaccagtgaaggacggggggtggcctctagaagctggcagaggcaaggaaaaggattctcccctggagcctccagaggaacgcagccctgctgacaccttgactttagcgcagtcacaatgacttcagattcccatctccagaaggaagagacatctgtgtcattttaagccactacctttgtggcaatttgttacatcagccacaggggataaggataaacagtgggaggaagggatggatgaacagtcagttcagctttcaggacagcgaagagacaagctgaaaactctgcaacctcccttaagccaaaaccactatgtgtattcaggagccagaaagtctcagaggttcctgccatctttgactgaccagggtagacctgaggtcctcctcctcaccagctgggattatccagcttttcagtaaggctccagggcgatggctgttttcattgatgaaaacatttttccaaataaatcttaattttttcagagtgtgaatctgtcttgtgctcagtactccaaatcctctgttcttcctgacgtttcaagtcccatgtcttctcctccgttcaatcacttcctaacaagcaccaacaacatgtcagccctggggagaaacttcccttcctgtcccttcccttcccaggccgtggcactgcccccacctctgaattcctctccacctctcttacccatgtggcacttagcacacactgctttggattctatttaaacactcaacttgcttatatcttggtttcttggttgtccaaggagagcacaggcctctggagggcaggagatgtatagaaaacgaatttttctgtaactaaaagaaatttttgtttttaggccgagtcttgttctgtcttccaggctggagtgcaatggtgcaatttctgctcactgcaacctccgcctcctgggttcaagcgtttctcctgcctcagcctcccgagtagctgggactacaggtgccctccaccatgcccagctaatttttgtatttttagtagagatggggtttcatcatggtggtcaggctggtcttgaactcctgacctcaagtgatccacccacctcggcctcccaaagtgctgggattacaggcgtgagccactgcacctggcaaaaatgtttaaatatatacaaaagtatgtaaaacctattatgcacagttcaaagaataataaaacagccacttagccaccagcctacttaacaaaaccagtgtcgtggaagtcctgtatgctgttcctctgattacagcccctcctctatcctggaggcagcctctctcctaaattctggggtagtcactccctgactcttttaacaaaacagctgtataccccaagcatgtattctgaaacagtaacagtattgctggccgggcgcggtggctcacgcctgtaatcccagcactttgggaggccgaggcgggcggatcacgaggtcaggagatcgagaccacggtgaaaccccgtctctactaaaaatacaaaaaattagccgggcgcagtggtgggcgcctgtagtcccagctactcgggaggctgaggcaggagaatggcgtgaacccggaaggcggagcttgcagtgagcggagatcgcgccacagcactcccgcctgggcgacagaacgagactccgtctcaaacaaaaaaaaaaacagtattgctaagtttcgcctggttttgaacctcacataaaggaaccacaccacatggaccctttggtgacttgtttctttcactcaacatcattcccgagactcatccatgcccctgcagctatagtccatcctcctcggcagctgcacagtatctcacggttcagatgcactgcagttcacaggtccccctgctgctggttcagatacaccacgattcacaggtccccctgctgctggttcagatacaccacgattcacaggtccccctgctgctggttcagatacaccacgattcacaggtccccctgctgctggtgctaggcacgtgcactgtttctgctggttttgatttacagttaggaacagtgctgcagggagcgcttgtccccatctcctgcacacctgtgcaagagttcgcaaagggatttgcccatggtttaactgctggtccacatgcattccactgccaaatgcttttgcaaagcggcagaacccattcacactcccgccagcagcaggttcgtgccactcctcaatgtcactggctggtagcgtccaaagcttcaccttctgccaacagggtggctgtgaaatggtatctcattatggttttaatttacatttccctggttactagtaaggctgcagtcctttttatatgtatgtgctttctgtgttttgtaatctatgaaatgcccgttcctatcttttgtcctttccttttttttctctcagaattgtaagaattctttaaatattctagatactagctctctgtatgttttgtgtctcattatagtgtctttcatgaactaaatgtgttgttattattattgagacaaggtctggctctattgcccagcctgatgtgcagtggcatgatcacagctcactgcaacctccgccttccgggctcaagccatcctcccacctcagcatctcaagtagctgggacacaggcatgtaccaccaagcccagttaaattttttttgtgtgtgtagagatgaggtttcaccatgttgcccaggctggtctcaaactcgtaagctcaaaccattcacctgccttggcctcccaaagtgctgggattacaggtgggagccactgcacctggctgaatgtcttaattttgaaagagacaaatatatcaatctttctgctttagggtttgttttatttcagaaatccctccttagcctcaggtcatgaagaaattttttcgaattattttctagaaattttacatttttgctttttcagtttaagtctttaatcctcctggcgttttgtgatggtgtgaggctgggatctcacacatctttttttttttttttttttttttgagacagagtctcactctgtcacccaggctggagtgcaatggcgcgatcttagctcactgcaacctcctccttccaagttcaagcaattcttctgcctcagcctcccaagtaactgggactacaggcgtgtgccaccatgcctggctaatttttgtatttttttcttttttagtagagacgggggtttcaccatattggccaggctggtcttgaactcctgaccttgtgatccgcccactttggcctcccaaagcactgggatgtgaccggccggatctcacacatctttaatattcctcctcagcacctgacatgctgctgtagacaactttatttaataaacagaatcaaatactgctttgtgttcaaagctcaaatttcactcttgagaaaaaaacttaagcttttcatactctgcgtcagcactatgacaaagttagcattggtgtatcaagactttttgggatgtctttaccttcactgccaatttttggtataggactaaacgcacaatgaagctgagcctaaagagcagcaacatggaattagaaacctggattctcatccaagatccaacactcttcaccatcatgtctgtatttatgcagtaagaattaaaatattcagagtaccccactcctaggcagatacccaagataattagaaacttttgctcacataaaaactcctgcttgcatgttcacagtggcctactcacaactgccagaaggcagaaacaaacaaaatgtccatcaacaaatgaatgaataagcaaaatgtggtgttatccacacaaaggagtattattcagccataaaaaagcatgaagtactgatacatactacaacatggataaactttgaaaacattatgctaaaggacagaaaccaaatacaaaaggccgtatgttgtatgtttccacttgtatgaaatgtccagcataagcaaatccatagagacagaagataacttagggctgctgagggacagggggagaaaagaggtatgactgttaatggggttggggtttcttttgtaggtgattaaatgttctggaattagttactggtgatggttgcatagcattgtgactatagcaagaactactgagttatacactgtaaaatggctaaaatgataaattttatgtcatgcgtaagtcatttcgatttttgaaaacctactttaaaaaaaagtagcaccaatatgttcaactctgttgccctagaatattccagcagtgattaaaaccacaaacttggccgggtacagtggctcatgtctgtaaccccagaactttgggaggccaaggcgggcagatcacttgaggccaggagttcaaggctaccctgaccaacacagcgaaaccccgtctctactaaaaaaaaaaaaaaaaaaattagctgggtgtggtagaacgtgcctgtaatcccagctactcggaaggctgaggcaggagaatcacttgggcccggggtgcgggatggcgggcagaggtagcaggagctgagatcgcaggcaccattgcactacagcccgggcgacagagcgagattgtctgaatcaatcaatcaatcaacaccctccccctccccctccctctccctctccctccctccctctctctctctctctctctcctgtggcggtcagagtaaaattgagagctcactttatgcaaaagactctgctaagtgctttattcctattgtctcactttattctctcattaatcttataaagcgcagtcagactctcccgtttatagatggggaaattgagtcttatagatgtaaagtcgcacacccaagaccccacaactcagaaaggggctacctgcaattcagatggaggtatagcaaggcgcagagtcctgtccagggagcccactgtgagaccccccgactgcctcgcagtcacctgtacacatcatgttgggatcgccgaggggcgctgcagcgatccggtttctggggctgcgtctgggtggcacgttcagaacggggacctgcctggttcttcttcccagcccttcccctccagcacccggcaaggcccagtcaacacgagcaaactcggaaatcctggctgaacccacgaccgctgcatatttccattttagaaaaacacggcaacaacaactcaaaccaaatcgttcagaaatgagaataaagaagcaccgacaaaggaggcgattgctggggccgctcgggggaggagccgggtgagaggctgcagggagggcagggcatgcgccggcgacaacggggttcgcggtttggggggcaaggcccgggggaagagagagaacaggggtgcagcgccgcggcggggggcgtgaggatggagccgggggaaggggggctctgagatgtgaaggggcggggctggggctttttggtctgaaggaaggagtctcacgggacggagggacgaagatttcctggggtcaggggcgccaaggggcttcggggccggatgcagcggagggggcccggggcctggggggcgtggtgagagctcagaggggtctcgccaagcagccggctggcgctgaggggaccgaggaggggtctggggcgaaaggaccgcgagagggcgcccagggcgcggggggcgcggtacctgcaggccggcaaagtcttccaaaccggtcccgccagacccgcgcggccgccgcccccgtctcggccgccggagctgctgccgcgccgcgccctcacgtgacccgcgtacgcgccgggggcggagccgtctcagacccgcccccaccccccggcgtccccagcgcgccggtccgtcccgagtgcgcgtgcgcagcggttgcctgggcgaccggggaagcgttgggctgtaaagactagggcgccagcggctggcgaagaaggaaagagggtactctctggctgggctggggccgtagcgacgtccgccgcgaacctgggccccccaaagctgcggggcgttcggtgtcgccgaagtaaacatgcaccctgagccctcggagcctgcgacaggtggtgcagcagagctggattgcgcgcaggagcccggcgtggaggagtctgcgggtgaccacgggagcgcaggccgagggggctgcaaggaaggtgccgactgccccccagggagggcggtgggcgaggggcagacacggctaggcgctccagcccccttcccacaccacatacccgatcttcacagccaaataataacaataataataatggtagcaagcaacgctctgcagtaggggcttctctcgccatttcgtactgaggaggaaacatacttaagaggttacaaaacttgcaccaaacagataaccctcggctagtcagtgacagaagagacttggccgggtgcggtggctcaacgcctgtaattccagcactttgggaggccgaggcgggcggatcatcaggtcagtcaggagttcgagaccagcctggccaacatagtgaaaccctgtctctactaaaaatacaaaaaatgagctgggcgtggtggcgggcgcctgtagtctcagctacttgggaggctgaggcaggagaatcgcttgaacccgggaggcggaggttgcagtgagccaagatctcgccattgcattccagcccggacgacagtgggagactccgtctcaaacaaacaaacaaacaaacaagcaaacaaaacccaccagactcaggcccagacagtctgggtctccagagccccagccctaacccaccacgctattctccctggtcccaactytgatgctttaaatgtgtccctttattgctatcactatgtaagatcaaaggctttctctccctccagactgcatgttgtgtcagggcaagacatcttgattgaatttggagtctagtccagtgcctgacctagggtagagagtccgaatgaagacttggttctggggtcagtgtgtgatcccctcaccaaagtttgccagaatggacttgaaagataaccttcatggccaggcacggtggctcacgcctgtaatcccagcaatttgggaggcagaggcaggtgggtcacctgaagtcaggagttcgagaccagtctggccaacatattgaaaccctgtctttgctaaaaacacaaaaattagcagggcgtggtgacgtgctcctgtaattccacttacttgggaggctaaggcaggagaattccctgaaccccggaggcagaggttgcagtgagccaagggggaggctgaggctgcagtgagccaagatcacaccactgcaccccagcctgggcaatggagcaagactccgtctcaaaaaaaaaaaaggaaagaaggaagcctggcttcagcttctgctcccactagacttggtgccctaaaggaaaccttttagtgattacattaaaaaaccacttgatttgtgttccagtttctgaacgcaggcaacaaataaaccagctgatttgtgttccaggcarcaaatatatcttaagcatcaactgtccagatgaaccttgtatgaggagccatagggaactggcattactcagtggaaagacactggtcttggagccattgacactgggttcaagttgaggctcagcagctggccagctttatggctgttggcccagagcttaacctctcggagccttagtctcctcatctgtaagctggaataattatacaggagtataaggagagaattataattaaatgtcccagcatatagtgggccattattaaatggtagctcttgttattaattacatattaatatttatatattgagcgcttattctttattttttccacaaacatttatctgttgcttcctgtggctgggcattctatgcaaaattgatgagtttaagaaccagtccccacacgcacagcctttagtcttgttcaatagaccacacaaacacagaaagcagcagacaacagctcttaaagttaagtgcggttgaattggccaattttgaatgacctttaaaaaaattatttatttgaatgtgctcatgttattgttatcatagatattctcactatttttgtttcttttcatgtgattttcctttttatgattttttttttaagagatggaatctcactatgttacccaggctagatcttcctgcctcagcctcctgagtagctgggactacaggcatgctccactacacctggcttgagaaattttttaaaagacaaaagaacaaagaacattaaaacaaatacccgtgttttgccagcaagaattgaaaatgagtaacattttatcatatttatttgaagtcttttttaattaaagaaataagcccccccmaaaaaaaaaataaaaataaataagggtgggcacggtggctcacgcctgtaatcccagcactttggaaggccaaggcgggtgggtcacctgaggtcaggagtttgaggacagcctggccaacatggggaaaccccgtctctactaaaaatacaaaaaaattagctaggcatggtgacaggcgctggtaatcctagctacttgggaggctgaggcatgagaatcgcttgaacccgggaggcggaggttgcagtgagctgagatcccgccactgcactccaacctgggggatagaccaagacggtctccaaaaaaaaaaagaaataaaacatttcacatagagttggtgttccttttctcccctgtaccccaccccgtttctaatcccattcctttcctcccttgtccagaattttatatgaattcttgcaagcacttctctatacatgtatgccctgaaacagtgtatagtattgctttgcatatttttaatttatatatggtatcctgtgcttattttgaaacttgcttttttcactccatatacgtttctgagaattatccctatggatagatgtagttctagtgcattcttctcaaaggtagaaaagcaagtcattgttttatgtaaccagcccctatggatggacatttacgttgttaacagtttttggcttttataaaaaaaaacgcagaaacaaatctctttgtccatgttttcttgtgcacctgtacaagagtttttatagaggatctacctagaagtgaaatttacatagtctttgccaatgctttaaaaattgttacacatttaaagattactgttctctctctctctctttttttttttttttttyttttttttttttttttttggtgagacggggtctcactttgttgccaggctggagtacagtggtgtgaacacagctcactgcagccttgacttcccaagctcgagtgatcaacctgcctcagccccacaagtagctgggaatacaggcacgcaccactacatctggctaatttttgtagagatggggttttgtcatgttgctcaggctggtctcaaacacctgggctcgagcaatctacctgcctcagcctcccaaagagctgggattacaggcctgagccaccatacccagccactaaagaatactggtgttctatactaaaagtggatggtcattaaccaagctgaagttgggggtattttttggcatatatcttgatctctacagacctgatctcttttattttacagaaattaatgatcctaaggaaatatgtgtgggttcttctgacacatcctaccacagccagcagaaacagagtggtgataatgggtcaggtggtcacttcgcacayccaagagaagacagggaagatcggggccccaggtatgtgggcatactcctaattagtgcacatttrtggagtaaggtagatggcgtaatcacccccttgtacggataatgaaatagaggctggtagagattgaattgcctgcccaatgtctgagaatggagtgaggatggcactgcctctgccgcacagctgagcgcacattctattaaactttaatgccagactgcagagaggaacagcagtagttcctcatgacaccatttaaagtatttttattagaacatacaatgcaatttttaggccgggcgcagtggctcatgcctgtaatcccagcactttgggaggctgaggtgggcgaatcacaaggtcaggagttcgagaccagcctgcacaatatggtgaaaccccatctctactaaaaatacaaaaaattagctgggcgtagtggcgggcacctgtaatcccagctacttgggaggctgaggcaggaggatcgcttgaacccgggaggcgaaggttgcagtgagccgagatcataccactgcactccagcccgggcggcagagtgagactccatctcaaaaaaaaaaaaaaaaaacatacattgcaatttttaagaatgctgaaaataagccaagcgtggtggcccttgcctgtaatcccagtactttgggaggccaaggtgggtggatcacctgacgtcaggagttcaagaccagcctgaccaacatggtgaaaccccccctctactaaaaatacaaaaattagccaggtgtggtggcgcatgcctgtaatcccagctactcgggaggctgaggcaggagaatcgcttgaacctgggaggcagagtttgcagtgagctgagattgtgccattgcactccagcctgggcaatagagtgagactctgtctcaaaaaaaaaaatgctgaaaataatattcgatgaggccctaaaatctgtacaaaaaagaagaagaaaaaggaaaggagaaagagaaaaagacgaacttaaaataggtatcagggatataggatgttatagaattttgggcaggaatggatgtggtaaagaactgtgagaatatrttttacagctgacaatttgcaataagcttattcatatttttccattttaacagaatgactaaaagttccctgcaaaaactctgcaagcagcacaagctttatattaccmcagcattgaatgatacgctgtatttacactttaaaggtaaggacctaagagaggaagtgcttcacrtcaggtggaaagattctgtctagcggtataaaaaattacttgcagggatcacctttagttctcagaatgtatctaagcaggaaatttcaaagtttagtggagatttatggaaaaggaataacatttatttcaagaaaaagtcttgcctgaccagtttacaaaggagccactggctataggaataccaaggaaacacattatctttcatttttgtttcctaaggaatttttttttcttttctttctttttttttttttttttgagatggtgtcttgctctgttgcccaagctgaagtgcagtggtgcaatctctgctcactgcaacctctgtctccaggttcaagcaattctcctacctcagcctcctgagtagctgggttacaggtgcccaccaccacgccttgctaatttttgtatttttagtaaaggcggggtttcgccatgttggccattctggtctcaaactcctgaacccagtcgatccagctgcctcagcctcccaaagtactgggcttacaagtgtgagccactgcacccagccaggactttaatttttcataccagaaagttagtttgtaagtactttggggttgggaggtatatgttgggaaggattgcagcttgatgttggaaacaaatgatgaggatctttggatgcctcttagaatggagaggcgtgagcaggagccagggttggaggccagtatcacatatcaatggaagctcaggttcacagacagggcttttcccagcctgagggcttccagtctgtgctgatggggtgaccagcttgctcatcagtcctctcattgttcatttgtttcttcagtagctgcttgctgagagtctactgtgtgcccagcactgctcagtgctgaaaatgcacagagggaaccggcaaaggtgcctttggtgtcctgggggatgggagcagctattatgaggacggtgccacgccagggagacgcccaaagggatccaggagcacaaatgccttaaggggttggaacgactcctatgggtctcctcacctccacttttgcccactccaaaattctctacccagcatctaagcatagcagtgagtaagatgatgtaggaggacagactgccgggggactgatacttaagaggtgggaagaagaaaggaaccagtaagtttgactgagtagagacagtcagagaggtagaagagctgggagagagaggtgcccatattagttatctattgctacataattaactgccctgaaacttagcaacttcaactcatgatctcacccagtttctgagggccgggaactcgggagtcatcagctgggcggttctggctcagggtctctcatgaggcagtagccagactgtcagcgcagtctcactcattcgatggcttgacgagggctagagaatccacttccaggctctaggcctcagaccctcatagctgtcagccagaggccttaatttctcaccacatgagcctccccatggcagctggcttccctcagagcaagttacccaagaaaggaagcaaggccaagacaaaagtggaggtgacacttcatcactccattgtatgctgttggtgtctggatccactcctgtcttactgcatcgctaacatgaaggcattgactaggagggtgatccagagagcctgaggaggaagctgggaaaggggcgcagggcctgtgggccagatgccttggaatggtcaagggctaagaggactgaccgtagcgtgtagcagttaggatcttagggagactttagccaggtggttgcagtgatggtgggatccaggggagagcaacaagttggagatggcttgaacagcaaagggggaggagatggggtaagagctagagcaaagaccagggagaaaaaccagaatgtcagaaacccaaggggacaaataatccagtttcttcaacaaaaaattacaatgtaagaaagagagagagacatacacacactcttaggttaaaagtgacttaaggccaggcgtggtggctcacgcctgtgatcccagcaatgtgggaggccaaggcaggcagatcaggagtttgagaccagtctggccaacatggtgaaaccccatctctactaaaaataacacacacaaaaattggccaggtgtgatggtgcatgcctgtaatcctagttacttgtgaggctgaggcaggagaatcgcttgaacccaggaggctgtttgcagtgagccaagattgtgctaccgcgctccagcctaggcgacagagcaagattctgtctcaaaaaaaaaaaaaaaaaaaaagttggctgggcgcggtggctcacacctgtaatcccagcactttgggaggccaaggcaggtggatcacctgaggtaaggagttcgagaccaacctggccaacatggtaaaaccccatctctactaaaaatacaaaaattagccaggtgtggtgatggcgggtacctgtaatctcagctactcaggaggctgagacaggagaatcacttgaacccaggaggtgtaggttacagtgagccgagattgtgcaattgcactccagcctgggcaacagagccagactccatctgaaaaaaaaaaaaaagtgacttaagagacatccactaattacaaggtttggaccttatttgtatgttgattcagacagtaaacagtttggaaacaaagacaacaaagaaatgtgaccagttactggctgtttgatgatgacgttgaggaactgttgtttagacgtcacagtggtgttgtggctatcttaaagaaaaaaaaaatcctatcttttatagatactgacttcagcatgaagaccttggagcaatatggcaaatacttccactataaaaatttttgtggagagggtttgcaaggagggagagcatcaggaggaacagctaatgatgctaggcttaatacctaggtgatgggatgacctatgcagcaaaccacatggcacacatttacctatgccacaaaccagcacatccagcacaggaacccatcaacttaaaataaaacttgaagaaataaaataaccaaaatttttgtggaaaaaatataggattttaaaaagtctatctatacaatgcctgtgtttaagtgtattctataactatgttaaatattacttgtgcttatagcaagcttggaaggcgagagagaaaaatgaaaacggattatctgttggcaggaacatgggtgcatttctttttattttgctcaccattgatattagaattttttaataaaaactttttcaggcaacaaaataaagaactttaaaaagtgttggtaatagtaggtcaaggcatgaattacacattgatgacgagttactaaaggaaactaaaagatttgttttcctaaccgtaaatttggctcataaaactgaaaaagagaacaaaacaaggcccacagtttgcactagggtcaggcctggtgggaacattttcaaggcagggttacccccactgcacccccacctccacccactccccaccatgaaggcagcagtaggctccaccctcccaggtgggtaattccagcagaaagactaccagtcttttcagcaagaccccctaggattcatcaaagttcgccttgcttggctaagtgtggccacccccgaatgagtcaccgtgactctgataggctgccagagagccgttgggtgatattaggaaaaggatggttcctccaagaaaagttgctactggaggaaggaggtgtggatgccaggtaggcaggtgtcttagtccgttttgagctgctgtaacaagaaaccgtagcctgggtggcttgtacacaacaaaaatgtatttctcacagttctggaggctaggaagtccaaggtcaagctactggcagatttggtgactggtgagagcttgcttttttattcgcagatggcactttcttgctgtatcctcatggggtgaagatggcaaagaagctctctggggcctcatttatgagaccactaatcccattcctgagggttcttctctcatgaccttatcacctcccaaaagtcccacctcctaataccatcacattaggggttaggatttcaatgtatgaattttgaagggacacagacattcagttcctaatagtaggcaaaaacaagggtgaccgtgacccctctgccctgggagtaggagcttaattcccacgtgcttcctttttgttaggttttgatckcattgagaacctggaagagtacacagggctgcgctgtctctggctgcagagcaatggaatacagaaaatcgaaaacctggaggcccaaactgagttgcgttgcctcttcttgcaaatgaacttgctccgtaaaattgagaacctggaacctctgcagaaactggatgctcttaacctcagcaacaattacatcaagaccattgaaaacctctgtaagggtacccagcaagcagtgtgtctgtttgccatatgtccatcaccttcccctgagggatgttctaagcttttatattatgggcaagaagtggtgtttttttttgtcttttttttgtttttttttgagacagagtcttgctctgtcgcccaggctggagtgcagtggcrcgatctcagctcactgcaagctctgcctcccgggttcatgccattctcctgccttagcctccaaaatagctgggactacaggcacccaccaccacacctggctaattttttgtatttttagtagagacggggtttcaccgtgttagccaggatggtctcgatctcctgacctcgtgatccgcccgccttggcctcccaaagtgctgggattacaggcgtgagccaccatgcccagccaagaagtgtttttggttttgttttgctttgcttctttttgagatggggtcttgctctgtcacccaggctgaaatgcagtggtgcagttagagctcactgcagccttgacctcctggtctcaagcgatcctcccacgtcagcctcccaggtggctgagaccacaggcatgtgccaccagacctggcaagtttttctactttttgtggatatggggtctcactgtgttgcccaggctggtctcaaacctcctgggctcgaaagattctcccgctttagccttccaaagtgctgggattacaggtatgaaccactgtgcctggcccaagaagcatttttatgcctttgtttttgacttctgctgaccttaccttccagcctgcctcccagtcctgaacacattgcagatggcccacaatcacctggagaccgtggaggacattcagcatctacaagagtgtttgaggctttgtgtccttgacctttcgyacaacaagctgagtgacccggagatcctgagcattctggaaagcatgcccgatttggtaaaaaacaaaaacaaaaacaacgaaaaagcaccacaggaaaccgcttctattattttcatcaaatatcaagtccttttgtcttttctctccttcctgccttccttccctttttcacacttttttcctctttgtgtttttagctggagtatctgaaatgccagttatcgtattattttacccacaaatagttcagtgtgtgcctctaacagataaggactttttttttttgatatagagtttcgctcttcttgatcaggctagagtgctgtggcatgaactccgcccactgcaacctctgcctctgggttcaaggaattctcctgcctcagcatcccgagtagctgggatttcaggtgcctgccatcacacccagctaatttttgtattcttagtagattcagggtttcatcatgttgtccaggctggtcttgaactcctgaccttgagtgatccacccgcctcaacctcccaaagtgctgggattacaggcaagagccattgtgcccaaccaccactcaattaatttttcaaggaaaccaggtcctctgtctggtgttacccacattctggatttagctgattgcatccttgtggtgccacttaacatgttctgctggccctggtatttcctgtaaaatgatatcggagccagaggctggatggtatccaggctccatatttcaccttgaggtgtgtcaggtccttccactgccagctcctcacatccgggagcgtgtgatgcctgcttgcttctccttttgttgttttaagattcactagtgggttcagatattgtcagcctggtctagccattatgaagttccccgtcagtccttctcccagttattttagcagtcactgatgaacattgcctagattaattatttaatgatgagtcacacaatgacaactttccagttytctcactctctcagcatctgttagctagaatgcttctacacttctacaaasagctttcattcgccaactagtggttcatgcagttcatgcagaaaaggccaggatcaatgtttgacccttttatttatcatttttcttttcttttcttttctttcctttccttttctttctttctttctttttttttttttttttttgagacagggtcttgctctgtcacccaggctggagtgcagtggtataatcatggctcactgcagcctcaacctcctgggctcaagcgatcctcccaccttagcctcacaagtagctgggagcacaggtgtgcaccaccacgtccagctaatttttatattttttgtagagatgggttttgccatattgctcaggctggttatttatcaattttcagtaaaatgaattgaaacctggcaacctctcatggtgacagtgaaacctttctttttttcagtatcattatgaacgcatacatttatatatacagtatttgacatgatttaactctcgctatcactttaatttttcatgttcaaattttcccatccaggtgaggtatggtggcccacacctgtaatcccagcactttgggaggcccaggtgggcaggtcacttgaggccaggagtttgagaccagcctggtcaacatggcaaaaccccatctctactaacaatacaaaaattagctgggcatggtggtgcacgtctgtgatctcagctacttgggaggctgaggcatgagaattgcttgaacccaggaggcattgcagtgagccgagatctcaccactgcactccagacagaatgagacactgtgtcaaaaaaaaaaaaaaaaaaaaattcccgtcctttgggcttgagaacccgtcaggttgcttcctatgtccttttgagtcctcgctagtagcctttgacagcctccttgcttcttagtgtctatgtgttgtcgtgtgtactaggaaaaaaatactaaaactagcacacaaaaaccttgagtttattgtataccgcttaggctattgataaacatggagaaaagtgagtcaactgaaagcaaatcatagttcaggaacaatctgtagtgtgtactatcaaaagactagtttagaactgcagcacacggtgagaatagaaagctctattatattataatccccccgtttgttcgtttttgttttggctggggttgccataagtaccgggtggcttaaccaatacaaatttattttctcgtggccaggcacagtggctcacgcctgtaatcccagcgctctgggaggccaaggtgggcagatcacgaggtcgggagatcgagaccttcctggctaacatggtgaaaccgtctctactaaaaatacaaaaaattagccgggygtggtggcatgcacctgtagtcccagctactctggtggctgaggcaggagaatggcgcgaacctgggaggcagagcttgcagcgacccgagatcgcgccactacactccagcctgggagacaggcagagtctggctctgtctccaaaaaaaaacaaaaacaaaaaagaaacttattttctcatgattctggagactgaaagtcaagagcaaggtgtgggcagggctgggttctcctgaggcatctccttggctggtagatggccgtcttctccctgggtcctcacatggtccctccctctgtgccgtgtgttctctgtgtcctacttttttcttctaaggacaccagtcagattggattacggcccaccctaatgggctcatttcaacttcatcgtggttttaaaagtcttatctccaaatacagtcacattctgaggtgctgagggtttggactttaacatgtgaattttgattaggacacaattcagcccagaacgaaagcaggttgctttatgttaatagttgtttcgtgactgcttttaaatcctcccaacaccgtttacccctttattgctgcctgggtgtattgctcccaccaccccaccctgtgcagggtaaccacattttgaaatggttcaccctcatgttgccttaagcattcaacttctttttttattttctgagatggagtctcgcttagtcacccaggctggagtgcagtggcataatctcagctcactacagcctccccctcctgggttcaagtgatttttctgcctcaggccccatgaatagctgggattacaggtgctcaccatgacgcccagctaatttttgtatttttagtagagatggggtttcaccatgttggccaggctggtctcgaactcctgacctcaagtgatccacccacctcagcctcccaaagtgctgagattacaggagtgagccaccatgcccagccccactaagcattaaacttctttgagtttcttaaggcagtagaggaagagacagtatttaaagatgggggaggatggcaggtcggattgccgagccccttcctcctccctggtcctaagtgacagcggggagagctgtaagccgaggaagaagggccgtccatcctgcggcactcagcagaggtaagcgggcactccccatcctttcccttagtcactgctgcttctctgtctagcggctgtgtgcgttttggtaaaatggatcctggctgggaagaaaagaaaacaatcaattaggcagagattcatttcagtaaaagaggttgggtagcaaaactaatataatcaactgcackcagaaaaagcctcaggaaatgttttccagtattgttctggagggacgatgagatctaagatctgaagttcatgtggaagaaagggctgctgaatgatctagacagctctgatagcgtgagagcaatggaaaccttccgatttctcccatcaagtcaccaggacaggatattggcacttctattttgctcaaaaaatagattttgttcatttattcttagtgcacagcacatataaaataattcaatcgcatctttcagtaatcattttggttctgcttgtcttcttgcagcgtgtactgaatttgatgggaaacccggttatcagacagattcctaattacagaaggacagtcactgtacgactaaagcacttaacatacctggatgatagaccagtgtttccaaaggacaggtaagaagagaaaagcsttctgatcacattttaatatttagtagttgaccatgcttaatattaaactttttaaatttctgattcttgagaaatttcacatatcaaaaatgttctttggaaataggcttgatggctacataattgactataatgggaatytgagcacttattcatagatttttttatattcctttgataaatatctttgtatcagtcgtttacctctttgctgatgagtwccttggaatggaatttttggagtagtatcactgcattgaagaaagtggtttcagactttgtaaaaacycttacaaatattttctagttgttttctagagagtttgtaccaatttacaacctcacataacataaccatgaaaggaaatctttgccaagtttgttgatgggtgaagatcgtacsccattgttttaaattgccatttttggataattgatgaagttgggcattttcttcattgttattggacacttatagttcctcctttatgaatattctgtcagtgactttttccaagtttctttttgaagtgcttytcttaccgatttgtaagggcttctttaatatcaggaacatcgtaccctggactgccatgtttatcatcactgcttttatctgtgtttttaacttacttttaaatttagatcaatttagtaattctaattagaataaaatatcagtcatataggctacttgacgagatgtataatccgaattttgcattatacaacatttaaaataaatgtagcttgtaatgtgtttttaaactcacaaatttaaatcaaactaacaaatatttcaaatagagcttccactttagccaggtaagaaaaccagggccgggcgtggtggctcatgtctgtaatcccagcactttgggaggccaaggcgggcggatcacgaggtcaggagatcgagaccaccctggctaacacggtgaaaccgcgtcgctactaaaagtacacaaaaattagccgggcgtggtggtgggcgcctgtagtcccagctactcgagtggaggctgaggaggagaatggcataaacccgggaggcagagcttgcagtgagctgagatcgcgccactgcactccagcctgggcaacagagcgagactccgtctcaaaaaaaaaaaaaaaaagaaaaccagaaggcctgctcctgggaggttcaacagaaattgacgcagctccctgggccccaggtctgggggtggtaaggacggggagagcagccagtgtgcaggggtctgactcccaagccagctctgcagccacgagctacgttacacccttgggggagctccctcacctccctgggcgcacgttcctcatctgcagcgtggggatgagaatactgttgccacagggtccctgtgagcgcctgtgagcaacatgcaggactccgagcaggtgctgggctcctaggagtgaaccagtaggagcagctgccactgaagatcctgctcccgccccaggggccatgctgaggaaagtaacatggatgttagcaataggagccaccgccctttagagcatagcccaagactccagctcaggagtcagattaacctggcttgagtctctttttagagacggggttgcactctgtcacccaggcaggagtgcagtggtgcaatcactgcagcttcaaactctgggttcacacaagcctcccaagtaactgagattacaggcgtgcaccaccaaacccagctaatttttaagttttttgtagagatgggggtctcactatgttgtcaaggccagtctcaaatttctggcctcaagtgatcctcctgcgttggcctcccaaagctctgaggctccgaaagcctcacaggcatgagccaccacacccctggcattgaatcttaatccagccactgactaattgtttgacactgggcacttgctgtcatctaggatgcagcaggtatctgctcatctgtcgttttattagagcactctccatgacctatctaaatagtaccttctccacttgatgtctcttcggcctgatttgatttccttttaggacacatgagtctctgacatatactcatttctttgtttagggtctgtcttccccgactaaaagggctcctctaacagagatcagctcttacattcactgctgggtccccagcctctagaatggtgactggcatgtagcaggcaacagataggcctttgctggctgtctgctctgagatcaaagggtctgaggatttcttactgtgtggtaaatggactggaacatggtttattctccttggcatattctgtctcagtgactcgtggtctttctctgctatagtatactttgcaacaccctgtctgactatttccaaacacctgtacctttgattttacagcagggatctgcttcttctctcttaaggtaagcctcctgtttttaaaccaccagactttgtttttcaaataacaactttgttgaggcataattcacataccatacagtttacgtatttaaagtgtacaatgtggctggatgtggtggctcacggctgtaatcccagcactttgggaggctgaggtgggtggatcacttgaggtcaggagactccctctcaaaaaaaaataaataaataaaaataaaaaacaaagtgtacaatgcaatggctttgagtatattcacagagttgtgcaaccatcaccacaatcaattttagaacattctcatcaccctaaaaaggaaatactggatgggcatggtggctcacacctataatcccagcactttgggaggcgggggcgggcrgatcaccaggtcaagagattgagaccatcctggccaacacggtgaaacctcatctctactaaaaatacaaaaattagctgggtgtggtggcgggcgcctgtagtcccagctacttgggaggctgaggcaagagaatcgcttgaacccgggaggcggaggttgyagtgagccaagatcacgccactgcactccagcctgggtgacagtgggagactgtctcaaaaaaacaaaaaaaaaagaaataccatccccattagcagccaaccccctatttctcgctccctgaaggccctggcagccactcctctgctttccctctctgttgatttgctcgttctggacatttcatataaatggagtcactcaccatgtggccctgtgtttctttcactcagcatcctgttgtcaaggttcatctgcgatgcagcgtgttccatccagtacttcattcctttttattgccaaatgatactgcattttgatacactacattgtatttgtccatcaactttcagaaattagggttgttttcactttttgcctgttgtgaataatgaagtttttgtgtggacagctgttgtcttctcctgggtatgtatctaggagtgaaatttctgggtcatacagggactttacatttaatttttgaggagacaccacatggttttccaaagcagctgcaccattttacatccccatcagcagtgtaggaaggttccaattttcccgtatcctcaccaacacttcgggttgcctgtcttttttttccyctctctctctctttttctttttttttttttttaagatggagtcttgccctgtcrcccaggcaggagtgcagtggtgagatctgagctcactgcaacctctgtctcccaggttcaagcaattctcctgcctcagcctccctagtagctgggattacaggcatctgccaccacacccagctaatttttctatttttagtagagacagggtttcaccatgttggccaggatggtctcaatcycttgacctcatgatccacccacctcggcctcccaaagtgctaggattacaggtgtgagccaccgcacccagccctgtctttttatttctagtcctctggatggtatgcagtggtgtctcattgtggtttccatctgcttttccctggtagataatgatgttgagcacgtttcatgtacttattggcagtttttatatcttctttggataaatgcctgttcagtttctttgctgatttttaaaaaattaatagactttttttttttttkgkgggggacagcgttttgctctgtcaccaagcaaccctcccacctctcagcctcctgagtagctgggactgcaggtgtgcaccaccatgcctggctagtttttgtgctttttgtagagacggggtcttgccatgttgcccaggctggtctggaactcctgggctcaagccatctgcccatcttggcctcccagagtgctgagattacaggcatgagccactgcatctggcctagactttattttcagagcagttttagatttactgaaaaattgagcagaaagtagagagagtttccatataccacccgccctcactgtttcccctatttgtaacgtcttacattcgtgtggtacgtttgtgacaagcgatcaagcaatgctggtaccttattattgactgaagtccatcatttctttagggctcacacttggtgttgcacactgtatgggttcggacaaaggtatcatgtcctgtatcccccatcacagtatctcacagaatagttttactgccctaaaaccctctgtgctctgcttcttcatccctcctacctcctcagccccaacttctggcaacactgatctttttgctgtctccatggttttgccttatctagaaagtcatatagctggaatcctacagcatatagcctttatggactggcttctttcacttagcaaggaagttaggcttcttccatgactttgtgtggcttgacagcttgtttcttttcattgctgagtgatattcctccgtctgggtgtgccagagtttgtttatccattcacctactaaaagacatcttggtcacttctagtttttgccaattagaataaaactgctgtaaacgtccatgtgcaggtttgcgtgtggacataagtcttcaactcatttgagtaaatactcaggagcacaattgctggatcatatggtgagagtatttttagtccygtaagaatccgccacaccattttccaaagtggctgtaccatttcgcattcccacctagaacaagtgagcgttgccgggactccacatcctcattagcgcagcgttgccgtgttttggattttagccatcttgtagccatatcatgttatcttattgttctaatttgcatttccctgaggacacgtgatgtggagcatcttttcacaggcttatttgccatctctatatcttttttggtgaggtaccctgatcatttgcccagttttttattgsgttgtttccttatctttgaatttcaaaagttctttrtatgttttggatccaagccctttcccagttatctttttttgcaaatattttctcccagtctrtagcctgccttttcatttttttaaaactttgctcattttgaaattgtgtcatctttttattaatgagttgtgaggcttatttatattttccaggtacaagacycttatcaaatatatgatttgcaagtatcttctcacattctttgagttgtctttttactttttttcagtagagacagggttttkctatgttgcccaggctgatctcgaactcctgggctcaagtggtcctcccactttggcctccaaagtgctaggattacaggcatgagccactgtgccctgctggttttttwaaataatactttatttatggtatactttgcatgacaaaaatttttaattttgatggagtccgatttctctattttttctcttgtcacttgtgcttttggtgccacatctaagaaggctttgcagactgttccaccttaaataataaaatttacatgtggaacttttatccttgcagtcacatgtctgatgctcactttgctttgattttgaagaaaatgagcaagttgatcagacagtgtatgtttggagttcacctcccctatttatgtttctttgttttttaaacagagcttgtgcggaggcctgggctaggggagggtacgcagctgaaaaggaggagagacagcagtgggagagcagggagcggaagaagatcacagacagcattgaagccttggccatgatcaagcagcgggcagaggagaggaaaagacagagagagagtcaagagagaggtatgcgctcggccgaagacaacagccccagagttcctttgagattaggcaagtctaagctctcaaacccagtctttaatcttgggaatttttttttttttttttttttttttagacagagtcttgctctgtcactgaggttgcaaagttggagtgcagcagtgtgatcttggctcactgcaacttctgtctcccgggttcaagcaattctcgtgcctcagcctccccagagctgggattatgggcacgtaccaccatgcctggctagtttttgtatttttagtagagatgggatttcgccatgttgtccaggctcgtctcgaactcctggcttcaagtgatctgcctgccttggcttcccaaagtgctgggattacaggcgtgagccactgtgcccagccttggattttctttttttcttttttttttttttttttttggttgggacaggatcttactctgttgcccaggctagagtgcagtggcacaatcttggctcactgcaacctctgcctcaagtgatcctctcacctcagcttcctaagtggctgggactacaggtgtgcaccaccatgcttagctaattaaaaaaaagaatttctgtagagatggggtcttactatgttgcccacgctggtctcaaactcctgggctcaagtgctccacccaccttggcttcccaaagtgctgggattataggcatgagctgctgcacctggccagggatttttttaaaaccatttcctcwcaacctgcagatccatctgcagttggcctcacctacctgccagcaccagtgagaacctcaaacagtgatgagctgtttcaaaccacttttactgattggaacagtttttcaaaataaatgatgtattagttttctgcggctgctgaaagtaggaaaactcaaataggttgttttcttctcccacactctcaacactcagcacacttgtggtcacgcaatgtgcagggtgtccccacacccaccaattctctgacaccagccggctgtcctgcaattcatttccatcctgacactaaccgcacaagtgatgggcaatggtctcgcaagatgactctccacttccaatgccaaccgcgagtctcagggtgtcgcctgtacttctaacagaatggctataaaattagggttcccatgaccctctctttgggtttgataatttgctatgatggctcacagaactccagagaacacttatattttctgggttattatattaataaaggataaaataagggatgcagatgaacagcaagatgaagtggagcttagggaagggtctgtgggaaggggcggagcttcataccctctctggccacaccccgctccaggtaactccagtgttcagcaacttggaagctctctgaaccccacagtttagggggttttccagaagctccagcacgtgggcatgatggatgattagctccatttccagcccctctgccctctctgaagccccagctgaaagctccaagcctcttatcatggcttggtctctgtgctccagaagccaccccacccccaagagccgccccattcgaacaaaagatgtgcctgtcactctggatgcaggtcttaggagctctgtgtcaggaaactggggttgaagaccaaatattagaacaaaagagcctcctagcacccctatgtacaggggttttaggagctctgtttcagagatctatgtatcttgtaatttcacagctgccacaacaaattaccacaaaattagtggcttaaaagaatacaaatctggccgggtgtggtggctcatgcctgtaatcccagcactttgggaggctgaggcgggtggatcacctgaggtaaggagttggagaccagcctgaacaacatggagaaaccccgtctctactaaaaatagaaaaaattagctgggcgtggtggcacaagcctataatcccagctacttgggaggctgaggcaggagaattgcttgaacctgggaggcagaggttgcagcgagccgagatcgcaccatcgcactccagcctgggcgacaagagcgaaactccatctcaaaaaaaaaaaaamcccacaaatctgttttaccctattgcagttctgtgggtcagaagcccaaaatgggtttcactgagctaaaatcgaggtgtctcagggttgtgtaccttctgggggccccaggggagaacccgcttccttgcctttctcacctcctagaggccgcctgcgttccctggctcgtggccccttcttccaacttccatgccagcagtgtggcatcttccagcctcattctgactctgacgctcctgcctccctattctgagggctcttgtgattcttttgaacctgcctggataacccaggacaatttcctgatctcagggttctagatcctaatcacatctgcacagttcctttgtccgtgtaaggtaacrtattcatattctgacattaaggtgtgaacacctttgactaatatttttatttttattttttagagacagggccttgctatgttggccaagctggtctcgaactcctggcctcaagcagtcctcccgcctcggcctcccaaagtgctgggattacagacgtgagccactgcacctggccacacatacatttttatataaaaatggcagaaatatgttgcttcctgtctagtcttttgaattagcatactataactattttccatacaatagacattttcttactgcatatattgtcttttcctaactttttgttttgaaatgttaaaaattttcagaaaagctgaaagaatagtaaaacggatagctgtatgtctgcatttattaatagattctgtggtttttcataatttgctacacatttgccacatacacacacacacacacacacacacacacactttgcttttcccctgaaccatttgaagataaaggcaaacgtcacagcccttaaacccccagtgcttcagcgtgcatctcctaagaactgcctgcattctattttcttgatagctgtgacctgttccattaaagggctgtgcttggcagtgccttccgtaggcatttggctcccattattatccattataaacaacactaatgaacatccctcaaggatacttttttttttttttttttttttttttttagagagtctcacttcatcacccagactacaatgcggtgactcactgcaacctctgtctcctgggttcaagcgcttctcctgcctcagtctctctagtagctgggattataggcatgtgccaccccgcccagctattattatttttttgtatttttttttcactagagatgaggtttcaccatgtttgtcaggctggttttgaactcctgatgtcaaatgatccacctgcctgggcctcccaaaatgctgggattacaagcatgagctaccatgcccagcgcctcgaggacactttttaaactatgttccttatttatttataattttttttggagacagagtctcgctctgtctcccaggctggagtgcagtggcgcgatcttggctcactgcagcctccacctcccaggttcaagcgattctcctgcctcagcctcttgagtagctggggctacaggcacgtgccaccacatccgagtaattttttgtatttttagtggagatggggtttcgtcatgttggccagcctggttttgaactcctggcctcaagtgatccaccctcctcggcctcccaaagtgctgggattacaggcacgagccaccgcgcccagccccttgaggacacttttttaactgtgttcckgaccttttccctggtctcagaagtttgctgtgagcccttgatgtacccacaaacacccttgtcctcccaggacactcccacattcacctttgcattttctgccattaggggagatgacatcttcagatgatggtgagaatgtgcccgccagtgcrgaaggcaaggaggagcctcccggggacagagaaacaaggcagaagatggagctatttgttaaggaaagctttgaggccaaggasgagctctgcccggaaargccaagtggagaggagccgcctgtggaggctaaaagagaggatggaggtccagagccagaggggaccctcccagctgagaccctgctactgtcgtcacctgtggaggttaaaggagasgacggagatggagagccagaggggaccctcccagctgaggccccaccacccccgccacctgtggaggttaaaggagaggatggagatcaagagccagaggggaccctcccagctgagaccctgctactgtcaccgcctgtgaaggttaaaggagaggatggagatcgagagccagaggggaccctcccagctgaggccccaccaccacygcccctgggagctgccagggaaggtaatgtgagcggagaaacacacacagacacacacacctctcagggagccccagccttcgactcacgtctctgtgggaccwggggcctgagtttcacttcttctgtattgctgtttctagaagataatggacactagttatcttgttttctagaacagggctgcccaacagaaatggaacaggagccactactagattctctaatagctctatttaaaaaagyaaaaggaactttsggaggccaaggcagaaggactgattgaggccaggagtttcagaccagcctcagaaatatasagagacctcatccctaccaaaactacaaaaattagctgggaattgtggtgtgcccctgtagtcccagctactcaggaggctgaggcaagaggattgcttgagccccagaggttgaggctgcagtgagccaagattgtgccactgcactccagcctgggtgacagagtgagaccctccctcaaaaaataaattrattaataaattaattaaaaagtaaaaagtaaaaaaacagtaaaactattaatgacatgtttaatttaacgcaatatataaaaaatataatcatgttaacatggaatcaatataaaaattatcagtgagctattttacttttttcaaaaattaagtcatcaaaatccagtatgtatttgacatggctgaacggtaactttttactggtgaaaggtaggccattcatctctgacataaacgaagccccgagagcaatggagggatcagagcacaggacccaaggatacagcccgggggaaaagtaggggcaggccttgcgaggtggctcacacatgtaatcccagcactgtgggaggccgaggcaggcagattgcttgaggccgggagttcgagaccagcctggccaacatagtgagaagcccccttccccgcaacccccaagcctctacaaaaaacaataaattagctgggcatagtggtgaccacttgtagtcccagctacttgggaggctgaggtgggaggggaaggggatgggaggtcgaggctgcagtgagctgagattgcaccactgcactccagccggggtgacagagtgagaccctgtatcaacaaaataaaaataagtaaataaaaaggaaaagtaggggcctggatgaggaaggggctcctcgcgattccacattcctcaggcgatctcacagttatgaaactgcacaagctctgaccctggtgcagcaggaggggcgtgtgcctggctgagggacaggctggcggtgggctgtgaagcctgcccctccgtctctgagcgagtcgcccctgctggcatcccttgtcaccctgcagtcggctgccatttccaagattcctgcggctgctgctttgactcctggccggtgctcttcatctcatgggattcgcctccagattacagaaaagggcagccgttccgttctttttccagcagacagaagcctgtggtgagctgccgtgtttgtcatggaggctggcctttgggccctgaggagggtttttgtcttttttttttttttttgagatgaagtctcgctctatcacccaggctggagtgcagtggcacaatctcggctcattgcaacctccctctcccaggttcaagctattctcctgcctcagcctcccaagtagctgagactacaggtgcccgccaccacacctggctaatttttgcatttttaatagacacgggggtttcactgtgttggccaggctggactcaaacttctgaccttgtgatccacccaccttggccccccaaagtgttgggattacaggcatgagccaccgagcccggcccttgggagcccatcttcaccgtaggctcgtccatctgcctgccgtgtgttaaactaactccaagacttgttgttgctctttagaaccgactccccaggctgtggccactgagggtgtattcgttacagaacttgatggaacgagaacggaagatttagaaaccattagactggagacaaaggagacattctgcattgatgtacatgaagtatttaatcttggagataagtatcagttttactgttagtaaaataggtaatcagatgcagactttggagaccctcgataccccaagtgtggtccttgggccggcaggcctggcatttctggggcgctggttagaaatgcagactcccaggcctcaccccaggcccactgattagaatccaactttcatgcactgccctaggtgattcgtgcacatgcatgctcaagtttggggagccctgacccaaatcgctacccttgaaccatgtctaccaaactcttgattcctttttgccaaagaagctatcttgctaagtggttctgactagttgccttatccaaattcgtggtgagagttacattgtatcatcagttacattgtatctttatacattrtatcttttcccccctccgtggacaccgcccagcaggtagcttaggctctcactggccttctggctcatggaggtgtgacggttcagtgtcccatccccttgagtgaatgtttgatcgcagccttgcctgtcactcttccctgaagctcttcccattttgttgacagtctcaaatgcttaggcccacaagaatggtaccatgggaattcacacattgtctcacaaccccccaagaactgtcctttgatggggcacgaataggagaggcatttctgggtacctctgaccttataccttggagaggtggtcccctgcccacttccttgttaaacttcttctaaactggtgtttctaatgttcaaacttcagaatttcacatggcccagtaggagttaaagtgatcggccaggcatggtggcttacgcctgtaatcccagcactttgggaggccgaggtggstggatcacgaggtcaggagatcgagaccatcctggctaacatggtgaaaacccatctctactaaaaatagaaaaaaatyagccaggtgtggtgatgggcacctgtagtcccagctacttgggaggctgaggcaggagaatggcaggaacctgggaggtggagcttgcrgtgagccgagatcacgccactgcactccaacctgggcgacagagcgagaytccatctcaaaaaagaaaaaaagagttaaagtgatsacggtcagaattcacagtgggtttctagttttctggagctatgtaaaaaaaagaaacaaaggccaggtgtggaggcttacacctgtaatcccagcactttgggaggccaaggtgggtggatcacatgaagtcaggagtttgagaccagcctggccaacatggtgaaaccccatctctactaaaaatacaaaaacataaaaaataaaaaaaataaaattagctgggcgtggtggcaggtgcctataatcccagctactcgggaggctgaggcaggagaactgcttgaacctgggaggcggaggttgcagtgagccaagatctcaccactgcactccagcctgggcaacacagcgagactctgtctcaaaaaaaagaaaaagaaakggacataattgggcaatttatctctcacatttgagaactgaccatatagataactacaacactaatagctaatgttaattggtttcttattatatgggtgacaccattctaagcatgacttgtattgattgatgtaacccttcctacaactctaagcagtacatactattatcatcccaatttcccagatgaggaaaatgagaaacagagaggttaggcaacttgcccaaagccagacagctagaaaatggtggtgggggagtaacaacctaggcaccgtggctccagttcatgcatccaaccacacactatgctgcctccccaaccacgcactggttgttatggacaaagataccgaacaaacacccacaatacaaaacaaaaaagtcctacaagttttggggaggtacaaaatatattacttttataccacatagagttttcggactagtttgtacagaggtgcatttggtttgggtcccattatttcccccaagatgaactggctgtgtctcttaataaaaaagcagaaaaaagatgtggaaattctktaaacacgtcacaccttgcaagttccctttcatttattagatccagacacctgaggtggcaacgcttgctttgtgtgtatctagagttccttttggtggggaacaggcaggsgagtcacctgagtgatttgagtaactgtaactaaggctgggttgactgcgtgtttgcctttatcgtgcctatcagaacgttgacagtgcgtgtacctccctggtgatgtgcggctcacttgctctttcaggacctacctgacttggaagatgatgatgaaacaggcaaatctctggaagaccaggttaagktcattagaaaccattttcccacaggcagcttaattccaccttcgttcttgtcgtttaccgtttctctcctaaacttgaaagtaaaatgttccctgtgcataaagcattgaattcccccatattctttttcttttcttttcttttcaggcagagtctggctctgtcacccaggctgcagtgcaatagtgtgttcttggctcactgcaacctccacctcctgggttcaagcaattctcctgtctcagcctcccaagtagctgggattacaggcatgagccaccacgcccagctaatttttgtatttttagtagagatggggtttctccatgttsgccaggctggtctcgaactcctgacctcaagtgatccacccgcctcagcctcccaaagtgctgggattacaggcgtgagccaccgcacccagcccacatcccccatattttcaccttgctgaaggaaatgccatttgttcttgttcaatttctttaagattttatgatgaaccacttgaaaatctattgctggtttgtaacagctgagtacagtgcatagttasctgaaagtactttctgtcattaagatgtatttctatgtccatcctatgaatgtctgtctgaatataggggaaggaaatgaaaacaggagaggggaaagaaaggggtgagtctgtgaggcacaatggggaattctctcagagtgacgtgaccctactccacccagaggccattactggcattaccaggagcccacacgtgccagacccgtaccctgagggagaaggaggcatcagccatcatctctgwgcacgagctcagcagcaaagaaaacagacacagttactgtggggggsctgctgtccaaggagctaagtcccagagagtctgtgaaggaaacggggttcaggggcatgccaagcagagcccagggctcaggggtgcgccctctcaggtaccaggagggtgaggaatagccagtggctgggggagcagagggcagagagaagggcatagacatgagcwgtgcccagggagtggccacccccaggcctaactttcagagtcctgtgttcccttgggcctttcttggatgtggcaacagaatactttgtgacattgggtgaaaaagcagaactggcatggtgcattgtagagcgattctgttgygaaaacagaaactttcagacaccttttcttctgtaaatagaatatgtgctttccgaagattgaggtcatctcgagcttgagtgatgacagtgaccctgaactggactacaygtcactccctgtgctggaaaacctscccacagacactctgtcaaatatatttgcagtctctaaagacacctcaaaggcggctcgggtgcccttcacagacatctttaaaaaagaagctaagagggactyggaaatccgaaaacaagacaccaagtccccaagacccctgatccaggagctcagcgacgaggacccctctggccagsyactgatgccccccacctgccaaagagatgctgcaccactcacttccastggagacagggacagcgacttccttgcagcctcttctccgggtaagagcgtggggccgagagcacagtggagacaatgttggctccccggcctgggatgggtggggcagggcagtcactcagccttaccctgagctttcatgttgctggaggggtcacccaggacagaccacacagatcctctgaaggtcccattcctgagttcacgggtctgaagctgccacttgctggtagccagcctgggccaggaagccaccgagccagcctcctcttgggcagccgagtctgactgtgtgtgggggtcacaakccccctgtggtcatgcagatctcctggggcgggggcctaatgaccgtgcatttccaccccctcctcaccatccctggcctcagcctttctagaccagggcttttggaggggaccaccaacaccactgctggggagtgtggggcaagcgaggtgacagccacacaagggcgtggctgcttcacagtgacccaggcccgggtgaatcacaggccagtcctagtggccttcaaggcagggaaggcaaaggggcaaaggggcaccaggcagggacggcagccagaggcctggctgcagaagacccagaaaaacatgctgaatgtaccggggcctcccctcatactgcaggctggtacatgtgcctggcagatgcggttttggggagcagccggttagtgctgagaacaagcaagctgggactgttttttcattcagcatctgccttcaggtgcactcccaaattgggggctgtgtggagcccagaccgtgctactctcatccagcacgcatcggtggccaggctttttcctgaagacagctgcctggctgactccagacttgcaggcaggaagcagggagyggcctgagtgcatttcccgggaacactgagtggccttctcttccactctaggaaccagcacagaaaagtgcagtctgagctggagcccgtgcagcctcgggcgggggcaggcctggaggacgttgaataatttgtttttgtttgttttgtttgagacagtctcgcactgtggcctaggctggaatgyagtcatgtgatcttggctcactgcaacctctgcctcctaggttcaagcaattctcctgcctccgcctctgaagtagctgggattacaggcacccgtcaagggattttcctgcctcagcctccccagtagctggtattataggggcctgccaccacgcccagctaatctttgtatttttagtagagatggggtttcaccatgttgaccaggctggtctcgaactcctgacctcaggtgatctgtttgcctcggcctcccaaagtgctgggattacaggtatgagccaccacgcccagttgaggacactgaatttggcctggactgaaccccaaggctgcccccctgtccttgcagtcacagtgacagggagaaagcacaggtcacccttccttccacagtgccgactgagagcgccgccacacccccagagacgtgtgtcggrgttgcccagcccagccaagctctgcccacgtgggacctcactgcattcccagcaccgaaagcatcatagttttccccagttatatgyagcataaatggtttaatyataaatgtctcccttaggcatgataaacattttaacacccacgcgagtcagtgtatgattgggctagctcctgtttgtgtgagtcacatgcaattcctttcaccagccaacctgaaaaaagacctttctcttactatgtcatcagaaaccagacagacccgggtccctgcaaaatctcaagtgagcattttccccacaggaaaacagaatcttccactgcagctagagaaactcygaggaagagggacttgmtgctttagacatcaaaatgagaaggggagggaggaaagaaaggggggagtctstgaggcacaacagagaattcccccaaactgacatgaccgtgaccctctgctcagagggcactatcgacagcccacaggtgccagacccatgtcccaagggagaaggaacatcagccatcatctctctgcatgagctcagtgtcaggtagtagctgtggcgggacgctgtccagcctaaaamacgtgaccattccaattcatcttcagctgccaagtgtatttagtccctgaacctggatccamggcatctccctgtaggaaacatcagaccggggcagagattgacaaagcaacccacaacagcagctgccaacggccgytgtgcccacctcatcagcagctctgcaggggcctcactccaccctcaccaaacacgaggagccagcactcctggcccccattccactggacaggaaggcgtgagaactgagggacctgcctgaggcccccacagctgaggcgcagcggagccctgcctcccagcacagactaaaatcccagcaacacaggcccaccggcacctccagcctgccttgcgggatgatcttcaggcgmatatacaaaatacaaaagaaactactactgtattttgttgccctgtcccttcaacttggctccaaattgcttggctcatcatcacagtggcctccagaaggtggcgagctctgcttctcaagtttcaactgtggaaggcacatctggtcccagaggaaggatgaggggctctctggggcttgagggcagcccaccttgtgtcctcagaagcccattcgaggcttcttmcggaggggctgagagctagagaggaygggtgtgtgctgctgggagcgagtggcccggacgctggaggcctgggagtggggaggtgtggtggcacagcctggggtgtccctctggggtggtagcttggccatgtagtcacggagcatctgccgctgctctgatgggacgccctgggcgcatgcatccggagtcaactcctgggagggcggggtcgtggggggcaggggcagagcatcagcaggtggccactcagggctatgaggggagctggtgtcctctgagggatccacatggccactgagcgaaaagctgctggacagctgggtccggcgcttgggccgcctggtctgtctcccgggctccgaggtcctgccctgctgcctctcccaccaggcagcccctcggcctgcccaggcttcccccaggcgctcactgagcttgtcctctaggcctgactcgggtgcagggggtggctctgccgcagggagggagcccaggtctctctgcagcaggagctgccctcgggccatggccttgcggagcacacccagccgctgcccttcctcttcctccctccgcagctctgtgctgcccagcatctggcggtgggtgaaggtgggtgctgtccacacaggaggagccaggggcacttttagcagggccttcagccactggctgcagccggcagtgtcctgggaggtccaggaagctgtgggggcatggcagtcaggttgggtgtcgccaggaggcccagcatctctgcggaggctggagtccacctgggggcggagctgctggtagaagacatctcccgccgccgagagctggaagagcaccaggcctggtgtgggcgctgagggcatgggcgggacgacggcagccagacctggtgacgggaatgacaatgacctccagggcctagcggggggaggggatgttttccactgcgccccccaagctcactcccccaccccagcacacctatggtcggtgctttcaggcgctcctgcagccgccactggatcttaggctccagcagaggaaatgcagggagggagtcgatcctggaaggaagagactggggggggcctgccaggcggggcaccgacgccccttctcctgaggaaggacagacagctgaggccctgtccaggccccgaccgccccatctcccacacgccgcccaccctggcctggaccctcacctgccaggtgcagcagctgcagctgcccaccctggcctccgaggagcaggggctgcacgcagctgggccggggcggaggcagcagtcgggccagcaggagcggggaggggaggccatggttccacttcagcatcggcaccaggggaaggcgctcgtccactaggtagagagagaactggggcccgagaaggaagggggatgtggccgaacttgggagctgagctgtgtagtggccctccaggccccatgtggctctccaggtgagtgcagagccctgaggggcagcagcatctcccatcagcctccacgtgcctctcagacttcacctgccagccctgaacaggtgccgcttccttcaccaattctgaccgacagtccggtggacagacagaacaagtgggaaaggggtgctcagaagaggtgtgggggagccttgccagcagaaacctgcctggccttctcgcagccacccccactctcctgacccgggagcctgtgctcgaggcacgcctacgaatgtccccgggagggcgggtggaggacagacctgcttcctcagagcccccgcctcctgcacagcagaaactctccagctctgcacggaagccccaccccgaggcccctcctcccctgctccacccctggctgcacctcgaagctctactaaggggaggccctgggagagcttccccacctgcctgttagcaccgactgtgggatccactgcgtgtttgggccacagattcatccagggttgagtttggtttgctgggtggttgtctgggcccagcagagccgctggtaagcagcagcctctagtgaccatctgagacagagcagaggtggggcggggcggtgttgtgtgccactcacctgggtacagacgagatgaagagtaggggggaggcatttggggctggagtgccccaggtactgggtaagcaggacacgttcccctttctggcacgaagcctctgcccccaaacgaaaaagcaacagaccacagcccggcgggccctggaagataaacacagggtcagccctccccacagtcccaggccggtgacgctgtcctcgcccaggccgcagccagcctgggactcaccgctctgcggccgctcccgcagtcggggtgggtcctctgccgccagcccgtacctgagtgtccagcatcttcactccggtgcggtcacccacggtcagcacccgagggtgcgcagtgaagtctgcccaacgccacgaagaggagtcccggaacacgagggtctcagggtccctgtagatttgccgcagccttggggagacaggcaagccgtgggcagggggacaggctgatggggaaggggctcaagggtcgcgacatgctcaacagggcggagttcagttcgttagggtggggggtttcacaggaagcggcgatacccatcctcagggctccacaggcagacggctcccgagcggctgcagatggccagctccccgggcaggtgagggctacagggcaggaatgcattcacatcgggctgctcagccctgcctccagcccctcctcaccgaccaacctgacccccctcacctgaggctgatccccgtggcccctttctccacctgcattgcctgcagaagggttggctgccactgtttaccaaacttccacacggcacagtggtagtcagagcggacggccagcagagctgaggagggatggaaagggccaggggtcaggtagcaggtcagccagtgagggaggaaagtgtatataagggccttactttctccctggacggtgcatgtcaccacttgccggacaggtccctggagctggatgcgtccaggtttcccaaggaattggggattgtcacctggggtcagaacgacctcttggaaatctgggcctctcactaaggatcagtgcacgagctatgatcactgcaagccccccaaattcctgcccttctctggaccatgccaagagcacctcctctaccagaggcgagcccgctggaatctcctgtctcgcaagaaaggatacgcagcctgtcctgggcgcctccagcagggtagaccagctgcccgaactggggtgtccttccaggaacccaggccagcgcgcccccagtgcaggcctcatccagaagcagctgctcccaccgcagcaccagctcctcgtgcagcagctctgccaagtggctcgccaccgacgtgcccaggatggggcccccgaggatagagaagcggcgctgtcggttgctgaggtaagcccagggacacctggggaccagagaacagcaggaggatcactcggtggcactcaggggaggacaggtcccatcccaaggaggccaagtgcagtggacacatttcttatttacctagaatttcttcctttgggagaccaccccatcctgttcccatgccccggaagcaatcatgtgacccagacctggccaccaacaatattccattgcccttgccacagtgactggttcacagatgggtgtgagacccaagccaagccaaccaaagtcctttctgggacttctggtgccgcaggaaggacactggctctttccttagatcataagccatcttgctgctacctagagacagcctgtctagggaactgtgcagggagaggcaagtggacgagacaggaaagagagacacagctctatgaacattatttgaacacctggatgcagctgtgcctgaactccacaaatgtaaatctgctttcccctgagatgatttggagttggaagtctggtataagaaagtacagctcagactgcatggagcaggggggaagtgggtatgacggaaagctgtacgtgcgtcctagcacctcctacatccccaccaccagctatgcctatccatctcctcctttctcatcagccacttgcccccagggctggtgtccaccgaggtcctggagcagcttcttcacactgaccactgtcttcttcttagtgcggctctgcatggaaaggccttgtcaggctcacacaccctcgagttcacccctgaaggacagcagggagtccccacccctggagtcacgggccactcacccccgctccctccagcttgaaattctccagcatcagcttccccaggggcgcaaaggctacgtctccatgatccaagaggaaccggctgatctggggagaagaggaggccaggtcactaagcacagtctccaggctacgcagcactgtcccccgtgggcccactcacctgctcagtcacatccagcacgactcggggccgcttccgataccggtaccctccgcggaaaagcaggtcccgggcagtcaggccagggtcccagggatctgagaaggaggttacggaaagggctggggagggcacaggagtgcggccagatgccctgggcgactggaggtatccaagggtcctgagcaggcacaggcttagcagggagaggaaggtctcaggagcgggagcagtgggaagaataggtggagcagtgtggagtgagcccgggggaatgagacccttaccgatgaggggaggcagcatggggagaggcccaggggttgccggctcccacagcaggtccttggtcacatgcagtgccccattctgaagggaggacaatcgcaaggacagtatcatgatgaatgccctccctgggccaggctgtgcacaggcattcatctcttatcaactcatccaatcctcacaacaatcctgcgaagctgggatgactggcattgtcattttactgctgaagaaactgaggcacactgccatttgccccagaagacagagccggtaaagagaagagctgggatgtgaacccaggcagcctgaccccagagctcctgtttccgacctccacctgtgctggctctcaaagaaggaagcccctcatgccaccagtggctggtccacatctcacgtaacctcacttccattcaggagaccttgcagtcactctgggagcccggcaggcggctccacctccctttgctgggctggcctgggatgtttcggcccagacattcaggggacaaaagagctaggaaaccagactcccagaggagccccaatttgacgccagaccctccctcgtaaggatgccatccctgacccccgttccccaagcctctgctccactgtctctctttttatttgctcacccacttgcctctgccaggcttcattcccagacagggtgtttccaaggggaactaggcggctgaggattccaagcaaagggccagtgtccctccagaggcagcagaaaccctgcaggtctatcctcccctctcccaaccctactatgctgtttcagcatccttctgctttcattccaagctctgatcacattttgtaaacaccttatccattggataaagttcacttgtttattctcgctcaactcagctctccgttccaggaagggaggggtcaaccgactgattcaggcagcattctcacggtctcataagggacccggcatagtgggggcatccgtctagggatggcagggtagcccatgtaccccagaggaggtggcagagcctgtgtctcagcagactcgtgtgaatgccaccactctgtggccttgtcaactgatgtgaatgtgagacgggggacccagggaagggatgtccctggagctgccagggccccctgcctgcatcctcacctctgagttctggggctgggcctctggcagagtcagtgcgtctcgccagctgcacatgaaagagaggtcagggacgtcgctcagaccaagggggccggtcagaaacaatgcagggcggagggagctggggaagtccatcctggaaacaagg

SEQ ID NO: 96904 - DNA, 39895 bp, Homo sapiens
atttgattgtattacctatcaaagaaccaataacctttcctttttctgcagtaaagaaaatgaaatatcctttattttccaaatgtatgaagcacaaatgcaatatagttatttaaaatataaaatactttaaaatgaatgtgaagaatgggaaaatatatttttgcatgaaaacagactacttacaaatgtgcttaatatctcaggaaaaaaagaatgaataaccgtatataaaattggtaaactataaattggctgtatttccttgccggttttaattttaaggaagcatttacatgaaaagaaaaaaggatcctagtagtctgaatttcctctcaagtatgctagaaaatactttctatgaatttacaattaactgcaataagaagtgggttagcattcaagtaaggtcaataccccaaatgagaaactcttcagttagaacacattagtggttgtaacacagaggcagtagataaatatttgaaatgtgagcatttctaaacttggtaccaaatggaaagggtttcatgaggtgacagtggcttttaaacattcatttgaccgattattctaattttccttgttaaatcattgcaacagttgcatgggggagaatggatattttttgaagaattgcttattccactttcaatttttaaaaatcgaggggattaaaatattactttttaaatatgcataaaagtatcttaactgtaattacattttcagttgctttgttatagtagcatgcatattaaatataaaatgcatttatgaaaatttttgtaaaaaataaaagatttttcatttctcaaagttgcttataattactattttatatatttgcataatataataccctcatgtgagtatatttggtaattatcaatcacagttactgcttatgataaacatagtaccaagctgcattaccaatcagtatactttacatccgtactctacgtcctctgttaaagttccacaaactccaagaaattatggtccatccagagaagagctcctttgctcaagcctctgttggaatttttgctattgtcagatatctcctggatttaaatcatttttatgaatacataacaaataactgtcttcaaattttccatgatggtggcctttaaaatataatttccatgtcttttactcatattcagaataatggatacaatttcttaaaataatgaattctgctgtgtccaagatagacagattctgccttctccatatgtttgctatcatccattcctccctattgttacagctattagtgtagtttgtgccacccttatctcttgtctggaatattacagtgctttcttaactagccttcatgtttccattccagcatcctcaaatttcgccatccacatttcagccagggcaatctttctaaattgaaaatctagattgaaaatgccactttcctgcttaatagtccttcagtgacttcccatagtttccaggataaacttcaaactcgctggttcagcacacagggactagcatctcttctactccctcctctatggagcctcggctccaatcatattcattacttttgtagttccctaaaagcatcatactttcttgtgcctacctgcctttacacatatagtccctttctcctagaatgccctttcctctaattcccctaactccaaccattcatcttttaaaactcagattccagcatccttttctctgagaagcttcccacgtggttgattggttgatggtccttttgccccacccccacgtagactgagttgcttgaagttttatgcccagtgcggctctggctgatagcagatgctaaagaaatgttaaggaaaatccccttggtcctttttcttgtgttgcatagcattaagactgcaatacctgaaggtatatttcctctctcactgtaatttattccattcttgtcatccaagcaaaaataaactggtttgtggttggattcccatagttcacggatagcaccacaaagatgctcagtgggttactccataagaaaacatcattcaaaaggatttactttgggctccagtgaatctcaaacccacaaactggctgttttcccaaaagatttattcagaaatctctttgacatttgttttcccatggaagttaatatcttcatgactgttccaagcctagtcaaatccaccatgtgttgaaatgaaatgctgattactgagttttgggtctaggtatggaagcagtgcaatggggaaatggaagaagtttgaacactcatgattaaacacttgcactggtgtttgcagatttggaagtggagtagggggagatagatgactgaatttgagatatctctgccctgtctcatcctttttaggagacacgtttctttccccctttataggttgactctaggtgaagtatcaaagagaccaagtctgtctctagttccttcacttccccttgccaccaaggaattcaagctcctctctttgctccccctacttttctcccagccatgtgttaggaagaatgggagtatgacaagcgcagcagccagatgccaggagaaccatgttccctatgccaatcatctgttttaaatagcttccctacactctggtttcctcagtggcaaaatgagggggcatctagatcatctctaaggacccttttggctaaagaaatcatatcaaagtttatttctggttttgaaacctgatacgttaattcccacaaacctatgggaattacttgatgacatatcagtgaatgtaattcagtatagtgagacagagttctagggaacaggaccaccaaatggcagaccagcttttggtttaacctattttcattttgcaatgtttcttccatttctgggcctaaggcaccccaggctctagacctcccaaatgtcatttaagaagtctgaatttttttcacaacagcccccaaagggagaggggggagcataaaggcctggcttgtaaactagagactgcctgccagcatattatggacacgactaaagaaagaatgttgaaagatgataattgctttatactgcagcaaggctgtgagatctttaactgaaggaccatttctgattcacttctgtatccccaggacctaccacagtgcttaatacagattaaggtgttcagtaaatattgattcaatgactcaaaacccgaggtaaaaccaggtaagaatgcctaccatctgttctttagaaagctagattttgatgattaattatctagtaaattgattatcataaatgtttctgtgagcagattttaaataaaatattcagtgattatattacaaaaatactgtggatatatatgtgcttatattcgcacatacaagactgaggtgttacagaaaaacctttaagcttttcatagttttatctcttcaaactgcattttaaatgttatgaaatatttccactttttagaataaaaagatggttattgttatgtgcataatatgctcatctgatgtcgccagatggttcaacctagggtatggagagaaagggaggtaattccaacatatctctaattgacagagcagaagagtttgctaccgagcagtcaatgggctcactgcctgatgaatgcagaggctaataccatggcactggcttttgggaaaagaaaagctttattgcaagtgggctggcaaggagacaggaggaaatgctcaaatctgtcttcctaagctggggtttggtttggtttttataagcatagggtaaagagatgtgatctgattggatcttgtaatgaggtgatgctgggaggcatgatctgactggatcctgctatgggatgaagccagagctcaacccggttggatcctgccatgccatatctacttcttaattcagtccctcctccttgatctgagcacttggtttcccctgtggctgcatgcttggttcatctaggcatgctcaggttacatgacctcagggttcatggcaactgaaaaacaactcacaattttgttacataaaagttgaaccaaggctgggcaaggtggctcacacctgtagtcccaagaatttaggaggccaaggcaggaagatcacgtgaggccaagagttcaagaccagctgggataacatagcaagaccccgtctctataaaaaaatttacaaatcagctgggcatggtggcatgtgcctgtagtcttagctactcgggagacagaggtgggaggatcacttgagcccagagtttgaggctgcagtgagctatgattgtaccactccactccagccagggtgacaagccagaccctgtcttaaaaaaaaaaaaaaaaaaaaaagaggagaaggggaaggggaaggggaagaaagaagaaagaagaaaggagaaaagaagaagaagaagaagaaacagatcggtctggtgcagcaacaagttgaggcccagggcacaaggaggagagcccctatggaatcttctaccttaaccacaaggatgcccagatgtctagagatggctcctggacacaggctaagggactgtttgtcgtccagaagcagcctcctagagcccgggatcttcagaggcttggttagcctcttaattaccatagcttcccagtcagttgcaggcccaggggactgaagttgattcctcagggagaagctccttgtcactttaaggtgcattcagtcctctttgtgaccttcctgcactgaggccaacccctcacaagactgcctgtgctggtggcctaaaactccattactaaggccttatgcagtgctgatagggagagcttgctcagaggaagtgttgggcccacccaaaggagggaacgcctttactcctgcatgcccagttgaattaagcatgcagccacaggcgaaacctaagtgctcagacggaggaggaggggctgaattaaacctttttctggacgaggaaaaagttttttccaaaaaactctcgtttcgctggagttgaaggaacctgcgccagaaggccagaaaccactgggcccctataggaaggctgggcggctgccgcgctcctccgttttcccagaagcctctgcgcggcctcacagagataaaagcgcgggagcgaggcccggcggctccagttctggggcttttgctttcgctcgattagttgctgtgaggctgctccgcgggcctcgcctggacgctgactccctgtgacttagccctgatcctcaggaaggcaggccatcgagagtccagaggcacccgtggcctgggggtagggtgggatagcaatgtggccgctacgggtctatacccgcaaaaagcgggagggtcagaggctcaatctcaccccgacgccagacctaggctctccagcgaaggccgaggccccgccaggtacaggctcaaggctcgcccaccgtaagctcagccgagctgcctccgggacgggaccgagggcgggcgggggtgctaggcctcgggcccaggacccccccgaagccggtgggtaggtttcttgccctgaaacgtgccgccctctctcaggttcgaagagaaaaggcaaagtgcacggcttgtcgaagattgcagagaaagcagagcggagcaggcagggaggtagcggctctgggccgttcaggtatgtagcctccagtaacagcccgatcctagcttgccacctcagaaaacttcaagccgaattttctgctagtagccttttattctaacagtcaaggagcaaaacaaatacagtactctgattttgctcttctcagaacatggaccccaaaatttgacttcaggaagatttatttttaaaaaggggaaggcttgccaatttacgtaaaaggaagtgagataaattggtcggtgagctatacgattgtgtcactgcatttgggttttggtgcaagtcaccactctggtccttacttcttcctaaagatgtccctaaagagcctttcagattctaaagagtctgaacagagacgtggagagccaaatccagatggtgcaaactaattgcgttgtctctttgttagccctcgcttaggagttacaggagagaaaagcctgcaagaaaataggtctagtgaagacacccaggatgagaagattgcatcgttgcgtgtatgtatgcttctcttttagtccttggacacacttagtgtagagactatcagtacctgatgtacctccggatgaaagaataaaatgggctttgttctgtagatgttacatagctcaccagtatttttataaacacttacgtgtctttagacagggccttgaatttctgacttgggtagattcatagtcatgcatttttgtttttctctttctcttgacacgtttttggagaaacgtccataattggtgaattttctgtatgacaaatacaaaatgttacttaataactccttttttcatgttttccatttgattttccattaacaactggaaacattcattactaagggtttaatatgttacagagcattctaatgtttattcattagaatattttataacttcttgatgtgctgtatttaatatgaattctgtactatattttaaagttgtacagcactaatttagggaagctcagattttaaaaattgcttgtgactcatctgacattaacattaaacttcatagtcaagttccttttttttttttttttggagacagagtcttgctctgtcacccaggctggagtgcagtggcacagtcctggctcactgactgcagcttctgcctctcgggttcaagcgattctcctgccccaacctcctgagtagatgtgattacaggtgtataccaccacccagctaatttttgtatagagggggtttctccaggttggccaggctggtctcgaactcctgacctcaagtgatctgctcgccacggcctcccatagtgctgagattacaggcttgagccatcacacctggccaagttctatttttttttaacttaatattcctttataacatgtttttgggggaaggcagtttcaacacaagacatttttttaaaaggcttttatccatagtttaacagtstaaagtagtccttgtagagtatttatactatgaaaaaatagtgttttgaaagtttcttaaaatttttatatatttctgttccttttctcctgtgctttaaaaaaaatgaccagttgtcttattgtatattcccatacattaaatagtcttcaaaaatatgactttcagtgtcttcatagtgctttgtcttgtagatagatacactgtaatttgtattactatttccctgtggttgggaaattgagattgtttccaaggttttgctgttattgatatccatagacattctgttacagaaggtttttgtgtacctcacattgttaccctaagataaatactttgcagtggatcacaggttggatcatgtttcaagtttttttattcatgttgataaatcagcaccatcttacctgaaacttttatatatatgtgtgtgtatatatatgaaatagatagatagatagatgaaaagtagcatgttttttacttttcatttctttgaatgctggggaagtcgatattttttttctcaaattattggccatttgtactgttttgtgaaatgtctattaaatattaaagatagctatacttttgtacatacatatataaccaatatttccatatttgtttacttgcctttaattttatttctagtattttagacttactagtcttttcttttgatttatatatttgcctctatagatggaaaaaaagcccctccccactagggaaccagaaaaatattcacctctatcttctatttgctgtcatcccacagtagttacttgactagcatattgttgattacaagatatgttcatagtattatattttaatatttatttttaggtttaatattaaatatcagattacatctgaacaataaactgaatgaatgtattatatatatgaaacatataaaaagttgatgttttcatttttctaaaataaatctgtacaagattataatatagaaatggtcaatctcataattttgctatagctttaattcttatttcacttaggaatcagttactgatgacctccaggttgatagtagttcatcaaatagtgaactagtatcaggtaagactgtcaaatgtgaactccctcagctttctgtttttcctccaaacataagcatccatctgtatctctccccatcttcctatctcagtggaagaggtatcttttccctactccaaagtgaatccttctgactgtgctatagatctcatccttaaagcctttaagcacatgccagtaaatgtgaaattacttgtgataagtactgtaaaagagattgacttgagtgtgattgagtttacctagagaaattagggaagacttccatgagggaatggtaattgaattaagatctgaaggagagtagaaattaactatgcagagatgagtaaagagaaattcaggcagagggaagctctaacatgggactgagcattatgtattgagtaactgaagaaggccagtatgactgcagtacagagagtaggaggatatgtgagtgtaagacaggattagacaaccagtttgaggccctgcatagccttgtagtccatataaaaaatattgatgtttatatttggagcagcaaaaagtcattgaagtcattttaatagagaatgatatgatcactttagctgcagtgtggaagaaggactggaaagaatcaggagtgcagttaagaggctgttcaagtagtttaggggagaaataatggcgccttctactagggtggtgacattggagatggaaaaaagggtgctgatgtgatgtgatggctattttaggtaatgagacaggatttggcaaatgaagagtgaaggagatggaggtgtcaaagatgactactgtttctggcttgtgtaactggatacaaggtagtgtcattcactgaaagaaaaactggtttgaagaaaagactagaaattcagtttttagtatattaagttatgagtgcatttaagatgactaagtagcaatatcaaccagatagttggatatgaaaggctggagatagaaatttgtgagccatctacatattggtataatcaaagttattttgaaaacaaggatgccaccagcacatcagaaatacagaggaattcttaaaagcaaatgagacaagattgatgaacatatcaacagcaggaaaaaaaaccactgcagaggtaaaagtagcctggaaatactctaaacccttgatcagtaaagcaaaagactgtaatagaagagatcttgggccaggcacggtggctcacgcctataatcccagcactttgagaggccaaagcaggcggatgacttgaggtcaggagttcgagaccagcctggccaacatggtgaaaccccgtctctactaaaaatacaaaatttagccaggcgtggtgrcaggcgcctgtaatcccagctactcgggaggctgagacaagagaatcgcttgaacccgggaggcggaggttgcagtgagccaagattgtgtcattacactccagcctgggggacaacagcgagacttcgtcacaaaaaaaaaaaaaaaaaaaaaaaaaaaaaaaaggaagagatcttgaaggaattgtcaaggcgatggattaagaactacatttgaaatatctggtccctttttcataatcccctaatatattggaaactctggcagctaccagtgcctgctgccaggagaaaaccctgataattactcacaagcaaagtgaactatcgggggggctggctcttaagggtcaatgttggggctgagttgataaacagaggagagtctgaagtaactccatattgctacaaggatagcagaggaagaaaaaagtaaaagatgtagtcaattcttatgtttgttaactccataataaagttagtatggctctctgaaccgtgagacttctgatacagcagacttccagtgtggacactggccggacagttagggcagtgcccccatgtcacctacagtacctaaaaaatacaggacatccccacctagaatacaggttcccagaatgtctcatcactcttccaaaatctccagaagcaagccactatttcagaatttttacttactgccatataaacagattctcagagacacaaataaagcaaccaggaatatccaaacttttgaagaaaaccagttccatggaaaagaggcaacaaatgaaacaaacagaactaacatttgaggaaatggcacaaaactaaatatctgtagataccagaggccgctgaatccataatatagcaggctgctatgaaaaaaaatatagtccctgggaactaaaaatattatttcaaattaaaacttaaccgaggagtctaatattggaattaattcaactaaaattagtgagctagaaaatagactagaggaatatttcctagaatgcagtgcaaaagaacatgggaggtgctcaggaaatgcttttctctccttcttcctctcccttctttgccttattaactttttcaaaaataaattcagcagctatttctcctgggaagcctcttctgacttctctttttctaggtgacttgttctaccctggtagttctgtggcactctatatacttctgtcaaaagacttaaaaccacagtgtaattgttttcgtctgtctttaactcttcaaaaagaggaaaatggctctaaaaccattgagaattagcactatcttttatcttcctatctcatgcttggaatacagtttcaaagataatacaggttcaaataattgtcgaatgtctcaaatgcttttggatgggtcttgtactctatttagagaaaataccatttaatcataatcagcattttctaaaatcatagtttaaatatatgagaaatgtccttgattactaggtttatcaagttgacaygtgaaaggtataaggaaatagaaaattagttgtctctaacttacaaactgcttgtattctgagagttcatttgctgattgatatttgaaacctgaaatactttttcccataataaaatactgtgatgggctaagttttgagcagcccacagaattttagttaacatatgatttattgttttaattctaccttggaatctagtaactttataacacgttgaaaaattaattaaggattttatatttaatgtggaagattgaatacacatttacttctcttttctgaaaccctactaaaatatcaataaaggcataaaaatgttgtaaagctgtaggttcaaaaagaagagacctcagctaacaacagataattaatgaaagtttggaatgtggaaggtagattaatgaattataattgacctaacagatcttaaaaaaaaaaaaagctgaaaactaggtgtctagagtagagacaaaccaagaaacaaactgattcaggctaaaggttcaggaattagaggcattacatattcctggaggaaatctttaaaataagattttttggaatcttcaaaagtaacagttagatgctttgatcctttccctaacacactgtggccaggcaactatgcttcttcccaccctggtagtctaagacattgaagcagagggactggattcaaggatactgtactgaaaactagcagtggccggggaggaaagggaattaagtgaaagtctgtatattttgatgtgaaatccccagaccccttatgcactcaggcaaatacactccaactagaagattagaggattcctcttttggaagtttctgtccccaggagaagactggaatttgtgcgttctggtaatatggcctggtccctgtctaaatactcttcagtaaaatccacttcttcctaagcccaagttattatgccattttggtacttcattctcgaacattcaagaattagcagacattttaagtaaacatttaaaataacagctactaaataaaagaaacttgaaggacaatgacaatacaagaaaaatcttttaaaaagccacagtttcattaatatcctcaggatgatggaaaaatgttatgtccatgaaacaagtgcaggctcttgtaaaaagtgttcagaacaaaaaaatttgttaaaaaataaaaatatgaaatcagaaaacattctgtagaattggatgataaatttaaggaaatattccaaaaagttgaacaaacatgaaagagaagataaaggatagaaatagcatcagtggtgacacaactccataagtctacaaaaaaaccactgattgtacactttaaaagggtgagttttggccaggcacggtggctcacccctgtaatcctagcactttgggaggccgaggcgggtggattgcctgagcctaggagatcgagaccagcctgggcaacacggtgaaaccctgtctctactaaaatacaaaaaattagccgggcatggcggtgtgcacctctaatctcagctactcggaatttttgaggcaggagaattgcttgaacctgggaggtggaggttgtagtgagctgagatcataccatagcactctagcctaggtgagagagcgagactccatctcaaaaaaaaaaaaaaaaaaagggggtgaggggcgagttctatggcatgtgaattatatctcaataaagttgttattttaacaagaaaaataattagaagatgagtccaatgattctaacatctcaaaaacagtagttcagacattatagagtaaacagaaggaaaattattaaacacgcaaagctagaaattttcctagaattaaaaatggtcatgagtgtatttactgaaagagccattcagattctgaatagtatgaacagagatactgagagccaagtttggacggtgcaaactgtgctcaccccaataaatgaaaaaaaaaccacaccaagttacaacattatataatttttaaattctcaggatagagaaatttattagttttccagagaaaaaataatcagttgcaataagcgatcaagaatatcaatggcattggacttctgaagaacaactccagaaggtagaacatggtggagagaaaaacgtattcagaattctgaagaacactgattttgcagagtcaaaatggactcccactcaaaagttgtcctggatgtcaacactgattatgccatccacacaccaagaaggtatggaaaggtatattactcatataacgagcctttctcgggggaaaggtgactccaagcaggactgaaaatgacttgagaatgcaggggaaggagacctggcctgtagttttcatgatgttaagaggattggaccaggttgaggtttcctgtgcatggtttaaacttgctaccattgccaaaagatggaacaccaaggctctcttgtcacccagaggtgaggtgggaaggggaagagggaacagtgaggtttaaaagctgtcacacatcaaaaaattaaatcagtctcttaaatatactaacctagaattcttacccagccaaactgtcactcagttgttaggataaaggaatttttagacacatattctttgtaccttttctcagaaatgaagcagatgttcgtgaaccaggaaataaatcaataaggaagaaatcatgggatctaggaatcagagtctcttatctaatacaggaaatatgtgaatttcttaggataatggtaaagggaaataccaagaaaacaactgtgtaggatgcatagaggacaaacagtccaaatttgagcaaatggattgagatctccaatagctatacttttttaaaaaagaagaaaagacagaagaagagggagagagggaggaaaataaaaaatagataacctggtgtttttaaaagtattgagaggaaatttatactcttgggaaaagttggaacaaggccgggcgctgtggttcatgcctgtaataccagtactatgggaggccaaggtgggaggattacttgaggtcaggagttcgagaccatctctactaaaagtacgaaaaagtagccaggcgtagcagcacgcacctgtaatcccagctactcaggaggctgaggtgggaggattggttgagcttgggaggcggaggttgcagtgacccaagatcctgccactacactccagcctgggtgacagagtgagactccgtctcaaaaagaaagaaaaaaaagttggaacaaaatagtacttagtattaatacttaataagtacttagaaaacaaattttaaaattaggtaataaatagctcaaaggaaaagaaattgtagcaaaaaggtgatgaatgtggcccacagtatagggcttggctacgagtatatttgaatagtcataataatagaaacattgaatttatttaatttagaaatgtaaaggaggtgcctatcaaaagaaatcattaatagagttgaaagtagttgtctctagcgagtagaaaattatgatggggagatatgatacaagagattgcagtttttgctataagccttgtagaactatttgtcattttaacaatgaacaatttgataaaaatatkttttttaattgcatttacatttctaacttgtgacaccaggacagcctcccactgatacagcattaacatttattattttttctactcaactacccagatggtgggctttccttatttctgagcctggcttgagttctggggcttggtgttaaggatagctcagctatgaggggtattcatgaaattttgagaaatggaaggcaagacagatacaatatgtggatgggaaggatgaagacagtgtgagaaggataaaagttagcaaggacagggacaggacactctagggcagttggagaagagaaagcaaaagatgctcagagggaaagcctactactctgacagttgaggatatggagaaggatggtagattgagtcagtcaatttaagtgttscagtggcagctggagaagatggccaggtagaaaacaattctcatttttaacaagggagttggcataggagaaaaagttgtgatgaggtcttaggaggaaggacaaagagttagttgtctcaagtaggtaatggatgagcagagataggtgtaagttagttccagggcaggagataataggttttcagaacaatgctcccctttgatctcttactcaccacccccgacccccgcaaccagtttctatcagtgttgatctctatcttgtcatattggaaatgtttaataaatgtagactaaatatagcagagcacattttcccttttcttaccaaatctctggttctcctcaacttttagtactatgttctgtcaccatcatttattggacagttcttcattctagtccactcccataggaatgactttaagactgctgagtctgggaagattctctgttcaaatatttgtccattttcttattgaggatttgttttcttattattgmgttttcatagttcttcatattctggtttttctttctttcttttttttttttttttttttttgtagagacggggttccactatgttgctcaggctggtctcaaactcctgggctcaratgatcctctcaccttggcatcccaaagtgctgttattacaggcatgagccactgtgccgagccagttctttacattctggatttcagtccatttgcaaatgttttctccctatctgtagcttgtctttttttttttcttttttctttttttttggatggagtctcactctgtcaccaggctggagttcagtggccgatcttgatcttgattcactgcaacctccacctcctgggttcaagagattcccctgcctcaggttcccaggtagctgagactacaggtgcatgttgccacgcccagctaatttttgtacttttagtagagatggggtttcaccatgttggccaggatggtctctatctcttgacctcgtgatctgcctgcctcggtctcccaaagtgctgggattacaggcatgagccactgcacccagcctatagcttgtcttttaatagtctcttttgaagggacgttttaaattttgctgaagtccaaattatcagtgctattgttttatgaatcttttttagtgttatataaaaaaattctttgcataactcggtgttacagttttctccattttttaaaagaagttttagagttttaggagttacatttagatatatgatgcatttagagttaatttctttacatgatggaaggtatgagtgcaagttttttwattttgtttttttatatggatacctagttgttccagcacattttgtttaaaagactatcctttctccactgaattgcctttacatrttggtcaaaaatcagttgcttatctatgtgtgagtctatttccatgctctcttattaaattcctttaatatatttgtgtatgtgtaggctcattgttttttagatgaaataactagaatcaccctttcctcagctagttagcttacaattaatgggttacttatatataaaacttaaattttggctgggcacggtggctcacgcctataatcctagtactttgggaggccgaggcaggtggatcatgaggtcaggagttcaagaccagcctggccaacatggtaaaaccccgtctctactaaaaaaaaaaataaaaaaaaaataattagccaggatggtggcacattcctgtaatcccagctactcgggaggctgaggcaggagaattgcttgaactgggacccgggaggcggaggttgtagtgagccaaaatcgtgctactgcactccaccctgggctatagagtgagactcggtctcaaaaaaaaaaattaaaaaattaaatttttgagccaagaatcacaactgaaccaaactagagaaaaggagtaagttgtaaaactttgaaaaacaacaaaaggggattataacaaatttatcaccatcaaaaatagaatgattgtccaagatcaaattaaaatagtttaaaatattatgcctttttagttgtatgtagaagcagtyttatgttctagtaataatatataactaagcatgtacatttccatacatttcaatttttaggatttcacattgttttgtatcaaaagatttatcaatttttttttcctttattctacaggattaagtttgcaccatggtatggccagttctcttctgagctattcagtcacagactcttatgcagaatacaagagttttgaagagagytttccatcacctgaactgttcagaaaatcagattatttaggtgagaaagtaatyccaaccttaaattgctctactatagaaattattcttttgtccacaaatcctccaatgaataaacgtccctttcgagaaggcatactcctcttcctcaccaacacctcacttccctgaccattacccgttgtgtttcattcccagtcacataggactaatagagcaaaagccctcagatcaaggaaggatgaagaaatgtcatttagcatttatatgtaatacacatccaattattaatcaattttgcacctaatgaatgtatacttgttctcttgaaccatgtgttatcttttttttcctgtacttatcttacttttcagcaaataacttaaatgttagctaggccaagtccctgcttgaattttctccacaaattaagagttatttacatttattatacatataaatataacctttggttaatgatggcagatcaaatacatgccttactctacaatcttgcaatggcagaaaacagctttttctttaaagtaatacgctcataaggacaaagataattgaaaaaaagaaagtacaaagtttggaaggttaatcaggtgatctgatacagcagacctaagaaagcggagtcctaaaccaacaatgtgaataccccagaaacaagccaatttgcactatagtgtcacagaaaagctcataatttggttgtgccaaatgcttgtaaatagatgtcaaaaacatgaaagatgtggttaactgctcctttcctgctcaaagggagcctggagatgtattctttagaatattttgaaacagggactctagactggagaatactaggtccttttaatagcagggatactgtggtattttgaaatgtcagtcccaattattcgtttctctgtagtattatattcataccctcgtaatgggtggagtattcttttccactctctggctttgggattggccatgtcacttgctttctgcaacaaacacaatttaagaaaagctttcaaattgcttaaatggttgagcttgtcttcttgcacttttggcattatcatgagaatggaccctaattagcttctgcctctctcgtggaaccccagaatgagagttacagagtggagcagtctaggcaaccagctcacttcagagagctgccccagctgatctgcagatctgtaatctgagttacctgagccaactaatagacatggaaacaaaaaataaatgcttctcactttgtgccactgagattttgtggttgtttattaaacagccaaagcagactgctgcagataatgtactgaatttggaagagggaattaagtaaaagtgtacatcctaaattatgggatctgctcacccaatgcttatttccaccccaccccagcagcccatttttcttgtcagcttcccagacttgaaccttctgctgagaaaatggaagattattttctcaggaactgagtaccccagaagaaaatatctaaagatactgaccccaggagtcctcaatgaaactgaccaggtggaagaccctacagtgaagccaactatgtgacaagccccacctaggccatagggataccacttagccttttaggacccacttytaaatatgaacagagagccaaggatcaccagacttctgaggaaagcctctaacattaaaaagagatatcaaaacaaaacaaaatgtgagaatggtgtcagcaagatgttgaaacaggaagccatggatctgcctactccttatggacacaccaattcaacagcaatatatggaccagttccctttgtgaaaaattcagaaaatagtcgacaggcgcctgcatcctggcaagcatggggccagccacatcaaagccagtaggaaaatttgagacatcctcaccataattcctactcctagcacagcatcatacagttgagaggaaacccataccacagttttcagcttctccctgaggggaagagcaagataagggacttgacaatacatccagtgttctgaattctctgagggatgcctgagggaactgatttcggtcttgcctgtctcagagtgctgataggacccaacatacccaaggtgattggtgactgctgagaacaaagatgacaatttggtctaggacacaaacatttgccataggctctccacctagctcagtgcagagtgagtgggggaaaaaaaaagattccagcttctccctcgggagagaaagagttggactttgtgtccaatgttccaacttttcaagggatgttcttgggactaccttctgtcacacctgtcttacaatgttgacaagatctgacatattgtaaatgcctggaggctgataacaacaaagacggtggtttggactagcacaaagatttgagagatccctgggtaggcttattcataagggtcttctgtacaatgccagactgggagaagtggctgttattttctaatgcgtagatgctgatacaagtaaaattgtcaaggaaaattaagaagcagggaaacatggtcgaaacaaaggaacaagataaatccccagaaactgaccccaatgaaatggagatatacaaattgtctgacaactaattcaaaataatcattaaaaagatgctcaacaagttgagaacaatacatgaaccaaataagaatttcaacaaaaaggaagttttaaaaagaacaaaataggaatttttggagctgaagaatactatcactgaactgaggccaggcacagtggctcatgcctataatcccaatgctttaggaggctgaggtgggaggatcacttgagccaaggagtttgatgttacagtgagctatgattatgctactgcactccagcctggrtgacagagcaagactgctctaaaaaaaataaaaaagaataaaagaaaaattcagtagagcaatataacagcacactagctcaagaagaataaagaattagtgagcttgaggacaggtcatttttaaagactccaaaagcaattgcaagaaaaacaaaaattgacaaatgggacctaattaaactgaagagcttctgcacagcaaaataaactatcaacacagtaaacagacaacctacagaatgggagaaaatatttgcaaactatgcatccaacaaagatctaatatccagaatctataagaaatttaaatcagcaagcaaaaaaacgatcctattaaaaaatgggcagaggacatgaatataaagaagactaaagaagtatgtcttcttctcattagagaaatgcaaatcaaaaccacaatgagatagcattgcataccagtcaaggtggctattattaaaaagtcaaaaaataatgtgtttgtgagattgtagagaaaagggaaagcttatacactgctggtacacaggaggaatgggaatgtaaattagtttggccaatgtggaaagaagtttgcagatttctcaaagaacctagaactatcatttgacccaacaatcctattactggatatatttccaaaggaatcattctataaagacacatgaacacatatgtttgttgcagctattttcacaatagcagagacgtggaatcaacctaaatgcccatcagtggtagactggataaagaaagtgtagtacacgtacaccatggaatactacacagaaataaaaaagaatgaaatcatatcttttgcatcagcatggatgcagctagagaccgttatcctaagcaaattaatgcaggaacagaaaaccaaataccatatgttctcataagtgggaactaaacattgagtacacatggacacaaagaagggaacagtagacactggggcttacttgaggttggagggtgggaagagggtgaagattgaaaagctacccattggatactatgctcactatctgggtgacaaaatccatttgtacaccaagccccagtgacacacagttttcccatgtaacaaatgtgcatctgtaccccctatatctaaaataaaaattggaagaaaaataaaggtcatttagcattatgccattagtgaagaaaaaagaatgaaaagattgaagaaatcctaagagacttgtgagccactatcaagcagaccaacatttgcattatgggagtcccagagaagaagagagaaaggactagaaagtgtatttgaagaaatagtggctaaaatcatcccaaatctggggaatgaaatggacatttagatccaggaagcccaagggacccaagtagaaggaagccaagaaatccacactgagaaacagtataaatgagttgtcaaaagtcatatacaaagacagttttgaaagcagcaagtaaaaagtgacttgacatgtacaggggagcccccataaaactatgagtggatttctcagcagaaaccttacagatcagagagaatgggatgatatattcaaagtgctgaaagaaaaattatcaaccaacaacagtacacccaggaaaactgtctttcaaaaatggagagacaaggagtttcccagacaaacaaaagcagagggaatttaccatgactagacctgcctaacaagtaatgctgaaaggaattatttaagttgaaactcaaggatgctaaacagtaacatgaaagtataagactcattggtaaagataaatatatagataaatacagaatacagtaatattgtaatagtagtttactattaagctcttcagtttaattaggtcccatttgtcaatttttgtttttgttgcaattgcttttggagtctttaaaaatgacctgtcctcaagctcactaattatttatagtatactattacaatagtaatgtaatagtaattgtaatactgtacagaatacagtaatactgttatagtagtataccagaattaaatcacttttagttctggtatacgagttaaaagataaaaacgttaaaaactaactgaagatgttaataatacaacataaaatatataaattgtgacatgaataaagtgcaggagggggagaagtataagtgtagtttttgtatgcaattgaaattaagttatcagcttagactgttaacaactatagaagattttacgtaagcccgatggtcaacacaaacaaaattcctatggaagaatcacaaaagaagaaaaagaaaagcattatcgatatatacaaaaagcagtggaacacaaaggcagcactaaaggaaaaagggacaaaagaattacaagacagaaacaattagtgaaatgacaatagttaagtccttacctatcaataattactttaaataagttaaacttcccaatcaaaacacagagtgactgaatggataaaagaacaagacctaatgatgtgatgtctacaagtgaccctctttagattttttttttttttttttttgagacggagtttygctctgtcgcccaggctggagtgcagtggcgcgatctcaactcactgcaagctccgcctcccgggttcatgccattctcctgcctcagcctcccgtgtagctgggactacaggcgcgcgccaccrtgcccggctaatttttgtatttttagtagagacggggtttcaccgtgttagccaggatggtctcgatctcctgacctcgtgatccgcccgtctcggactcccaaagtgctgggattacaggcgtgagccaccgcgcccggccgatcctctttagatttaaggatacatacactaaaaatggagagatggaaaaagatattccatacaaatggtaaccaaaagagaggagggtggctatatttatgtcagacaagatagactttaaatcaaaaacagtcatgagagacaaagaagaacaaaaataataataaaagggtcaattcaccaggaagatatacagttataaatatgtatgcacccaacatcagcatctaaatatataaaacagacattgacagaactgaagggaaaaatagtaatacaataattgtgggataattcagtataacccacttttaacaatggatagaacattcagacagaaaacaggtaagcaaacagcagacttgaacagcgctatagacaacatggacctaacatgtatacaaaacattctacctgacagtggcagaatatatatttctctcatgcacagataggacattctccataatagatcacattatgtcacaaaacaagtcttaacaaatggaagactgaaaacataccaagtatcttttctgaccataatggaacaaaactagaaatcagtagcagaaggaatactggaaaattcacaaatatgtggaaatttaacatactcttgaataaccagtgagtcaaagaagaaatcaaaagggaaattagaaaatatcttcggatgaaagcacaatatattaaaacgtgggatatagcaaaagcagtactgagggaattttataacaataactaaatttaaaaagaaaaatttcaaataagctaatgttacacctcaaggaactagaaaaaaagaatgaacagccaaaaattatcagatagaaggaaataaaatttagagcagaaataaatggaacagaaaattgaaaaaaatagaaagaaatcagtgaaactgagagttggttttttgaaaagacaagtttgacaaacttttagttagattaagaaaagaagactcaataaaattcaaagtgcaagatgagacattatacctgatgccacagaaacaaaaataatcatgagactaccatgcccaattataggacaataaattgaataacctagaaggaaagaagaaattcctagaaacatataacctatgtcatgaagaaatatgaaatctggacagacctataactagtaaggagattgaaccagcaatcaaaaaccttccaacaaagaaaatccaggaccagatggcttcactggtgaattctaccaaacatttaaagagtatttaattctaattcttaaactcttctaaaaaattaaagaggagaagacactttcaaactaattctttaaggccagcattaccctcatactaaagcgaggtaaatactacaagcaaagacaactgtaagacaatatccctgatgaacatagatgtaaaaatcctcaacaaaatactagcaattgaaattcatctctatattaaaaggatcatacaccatgaccaggtggcrtttatctctggaatgcaaggatggttccaaatacaaaaatcaactaaagtgatacactacattaacagaatgaagggtaacaattacacgataatttcagtagatgcagcaaaatgatttgacaaaattcaacatcttttatgatgaaaactctcaaactaggaacagaaggcaattacctcaacataataaagactgtatatgagaagcccatagctaacatcatactcagtagtaaaaaactgaaagcttttcctctaagatcaggaagtatgctgaatacttttattcagcatagtcctagtcacagcaattaggcaacaaaaaaataaaagcgtctaaattgaaaagaagtaaaataatctgtttttgcagatgacatgatcttatatgtaaaacactctaaagacaccacaaggctgggtgtggtggctcacacctgtaccccagcactttaagaggccaaggcgggcagatcacatgagatcaggagtttgagaccagcctggccaaaatggtgaaagcccttctctactaaaaatacaaaaataagccagcatggtggcaggtgcctgtagtcccagctactcaggaggctgaggcaggagaatcactttaacctgggaggcagaggttgcagtgggccgggatcatgccactgcactccagcctgagtgacagagcaagactctgtctcaaaaaaaacaaaaaacaaaaaaaacacaaaaacttatttgaacgattaaatgaatttggtaaaattgtagattataaaatcaacatacgaaaatcagttgtgtttctatatcctagcaataaactacctgaaaaggaaataaaacaatctcatttacaatatcatcaaaaagtataaaatatttaggaataaacttaagaagtagaagatatgtatgctggaaaacaatgatgaataaaatttaaaaagatgcaagcaaatggatgcacatcccatgtttatgagttggaagacttaatattgttaaaatatccatacacccaaagcagtctacaaatttgatgcaatctctatcaaaatctcaatggcattttttaacagaaataacaaagcaaccctgaagtgtatatggaaccacaaagaagctcaaatagccaaaacaatcttgagaagaacaaagtaggaacatcatacttcctgatttcaaaatacattgcaatgctatagtaattcaaacagtatgatactgtcataagagaaatgaatctgtacatatatggccaacttatctttgacaggatggagtgccaagaatacacaatgaggaaaggatactttcttcaacaaatgctattgggaaaactgaatatccacatacaaaataatgaaattggacattgacacccatacacaaaaattaattcaaattggattaaatacttaaatataagaccttaagctgtaaaactcctagaagaaaacataggggaaaagcttcataacattagtcttagcagtgatttcgtggatatgctaccaaaagtataggcaacaagagcagtaacgagtgagacatcatcacttctgcacagcaaaagaaacaatcaacagagtaaagagataacctaccaaaatggaaggaaatatktataaatcatatatctgataaaggagtaaataattaaaatgcgtaaggaactcttataactgaatagcaaaattaagcaaaaaaaacaacctgattgaaaaaatagacaaatarcttgaatagatatttctccaaagcagcagcagcaatagccagcaagtatatgaaaaaatgctcaacatcattaatcatcaggaacatgcaaatcaaaaccacagtatcacctcacacttgttaaaagggctattaccaaaaaaacaaaaaacaaaagataacaaatgttggcaagggtgtggataaattagaacccttgtacactgttggtgggaatgtaaaatggcacagcagctatagaaacagtatggaggtgtctctaaaaattaaagacagaatgaccatgtggtccatcaatccctgtgtgaatatccaaaataattaaaatcaggatctcaaagagatattagcactcccttattcattgcagcattattcacagtagccgagaggtggaaaaaacctaaatgtttgttgatagatgaatggataaagaaaatgtgatgtataaatacaatggaatattattcagtcttaagaaagaaatcctgcaatttgtgacaacatggatgaaccttgaggacattatgttaaatgaaataagccagtcacagagggtcgaatacttgatatttccacttatatgagttatctaaaagagccaaactcatagaagcagagagtaggatgatgttcgacaggaactggcaggaaaggaaaattgggagttgctatcaatgggtattaagtttcacttacacatgtaggagtgagctctagagagctgctatagaacactgtgcctttagttaacaacactggattgtacacttaaaagtttgagtgtagatctcatgttaagtgttctaactataaaaataattttaaatattaaaatgtttaaacttttaaaattaaaaaaatcttgaaacaaggaaattaagtaggaggaaaaagaatcaaggagaaataggaacaaggagaggaaaatatttttaaaaatcttcattgagataagaaaatatgtattttatccgttaaataagaataggatgctatgaagaagaggctgttctaagaacaatgaagtgcaaaagcagaatggaaaactcagtaaaaggattaaaatattaagttgagatttaccagaaaaaaaaatcataagaaaaaaaggaggaaaaaagaggagaaaataaagaaaaaaaaagattaaaatttagaggaaaaaaatataagatagaagaacagtatatgaaatccaacatcaaataataggagttccaggaaaagataacagaaaaaagggaagaaaattattaagaaataattcaagaacatttttcgagctataaattatgagtttccaggttaaaaggaccatagtgtgcctagtacagtagatgaaaaacaccaaggcacagcattagaaattctaaaacacctgggagtggaataaatggaatggatttatgcaatttggtagcatttgagattaaatagatttaaaaatatagagggaccaggagtggtagcacacacctgtaatcacagcactttgggaggctgaggcaggcggattgcttgaggtcaggagtttgagacaagcctggccaacatggcgaaactgtctctacacaaataaaatattagccgggtgtggtggtggatgcctgtaatcccagctactcaggagtctgaggcaggagaatcacttaaacccaggaaccggaggttgcagtgagccaagatcacaccactgcattctagcctgggcgacagagcaagactcttctcaaaaaagtgtgtgtgtgtgtataaaactaaacagatgaggaaagggacttgtattgactccaggaaaaacaaaaggtggttttgatataccaccagagtaaacagcatttttataacattttatcatcatatgtctatatgaatattgatctaacttaatatatgatataacaatatgggaacgatgggagaggtaggaaaggtggggatgggcgaatatacaggkaatagccttattccatagtgggaagtcactagaaagcttaaaactgatattaagtaatagcagtttacgtacagttgtcccttggtatccatgggggttggttccaagacctcccttggataccaaaatctgtggatgctgaagtccctgatataaaatggcatggtatttgcatgtaacctatgcacatcctcctatatactttaaataatctttagattacttataatacttaatgcaatgtaaatgctatgtaaatagttgttatactgtattgtttagtgaataatgacaagaaaaaaaaaaggctgtatatgttgagtatggatgcaatttttttcctgaatattttcagtccatggttggttgaatccacaaatgtggaactcataaatacaaagggctgactgtatgttatttagtgatgcgatttttaatggcacataggtataacatatataaaatataacaggcagctcacatgtgtgctacctgtctcttagatcaataatccgcatggtagaaaagtctagagaggaaggcagggtaagagaaccagaatagactatagattatttactatattgatccatcaaggcttatttttttctgtctcatccaaaaccttcaaatataataccatcatttagtatgggctgggggcctaaggtggggtagggagtaacccatcatttgtaggctgttgttcaaagtcttacactatttcttctctgctgttttagactgggagtgtcccaacttggaagaacacatgcagtggaagaattctactcttctggataccagtaaagcagtagcgatagagaaggcaccacagttttcaaatgtctcagcaattttcagtgagttgyacacacaggggaacatttctcatctatgttggaaaarcaaagtattttttctcttgaatgatttctaagctaagtctatcagttggattgcctttggctacagataatatctaataatagcataagtatgtatgagtttacttttttatttattttgagatggagtctcactatgttgcccaggctggagtgcggtggcatgatttaggctcactgcaacctctgtctcccaggttcaagcagttctcctgcctcagcctccctagtagctggggttacaggcacgtgccaccacagctagttaatttttgtatttttatagagatggggtttcactatgttggccaggctggtcttgaactcctgacctcaggtgatctgcctgccttggcttcccaaagtgctgggattacaggtgtgagccactgctcccaggcacatcaagctaatttaaacaattttttctagagatggagtctcgctatgttgcccaggctggtctcaaactcctggcctcaagcaattcttctaccttggccttccaaagtgctgagattataggcatgagccattgcactcagtcttttataactttttattttgaactatttttagacttttcatttagtctttctttttttctgtttcatgatcctatcctggatcccatgttgcatttaattgttatttctccctagtctcctgcagtttgtaatacttcctcagtctttcagattactgatgttattttgtagaatgtcccttagttgggatttgtcttgatgtttcctcgtgataggaatgaagttatggctgggtgcagtggctgacacctgtaatcccagcactttgggagactgaggtgggaggactgcttgaggcgaggagtttgagaccagcctgggcaacatagtgagacctctatctctacaaaaaataaaaaatgagccagatgtgatggtgcacgcctgtagtcccagctactcaagaggctgaggtgggagaatgagaggatcgcttgagcccaggaggtcaaggctacagtgagccacgtttgtaccactgaacttctgcctgggtgacagaatgaggatcttctcaaaaaaaaaaaaaaatgaagttatgcagtttttggtaagaataccacagaaatgatgttgtgcctttgcagtgtatcatatcatatcaaagggttcatgatgtccccccatttttatttgaagaatattatgtcttactagtggtgatggtaaatttcatcatttagttaaggtggtatctgctgaatttctccaattaaagattatgttttctctttgtaatttttgaatatctacaaaaagatagtttgagactgtaaactctgtttctcctcaaactttatttcactaattttagcagccatcagaggagccagctgacttcaacctttattactgtggtgtttgtccaagggtgattttttattctgttctttcctgctacttttattaattggaattttactgtaaaagaagaactttctcttttctgccatttgtttgtttatttgattacttattcagtgtagactcatggatatttattctatggtttgaaatccaatattttcatcattcgttcatttatttatttatttctagtatatatgtatagagtagtttcagaagtgttaacccaggctcctgtaagaaacacatttagtaaataaattacagcatttgcatacagttctttttgtctttagcattacagcatccagtcaaaatactaattttccaaagttatgtaagttcattttctccccacctcccttagcatatgagaagttattcacttgtaatatgtatagctagactcatttgttattgattcacttttgcattcacctttcctgtttggttttgtttatgtattcgggaatatgaaatattactatggttttaagagtcatagctatataaaaagttattctcagaaaattgtcactttctccttcttccagctaccattcttctcttctttctacccctttctcacttaacccctatggataactggtctttttagtttttggcttatccttcctgtgtttcttttgtacaaatcaggagatatccatgtatttctttatatcctcttctttgttacatgaagggtaccgtgctatatagctactcttttttcactttgatttttccacctaacagtatgtactggaaatcactccacattggtttacatagagatcttccttttattttttacagctgcatagtactccactctgtggatgtacttttgttgattcaaaaatacctataaattgggtatttaggtttttccccagtattttgccaccatcaacaatactgcaatgaataaacctatgatatatattttcatgttattggcagtgtgtcttcaaggtagatttccagaggtaggatagctgggtcaaaaggtaagtgcatatatcattttattggatattgccaaattttcctccagaaggattataacagtttgcattcccaacagcagtgtgttaaagtgctggtctcactatatccttaccaacagaatgtgttgtcatatttttttttaatttttgctactctaataggtgacaaatggtatctctgtgctattttaacttgcatttccatgattatatgtgagtttaaacatttttcatatgtttaagggccatttttatttgaagaatattggccttttgtctgttgtatatattatgaatattttgtcccagtttgtcagttgtctttttgttcatggtatgttttgtcatgcaaaaattttttattcatactgggtttatgtttctcccataccagcccagagctagtgtagcagttctctaatatcatcaagatcatagggtcttatgtcaacatacaaccaagtgtgttggcttgttccccatagttgcaaggtggttgctaaactctaggtgtcacagccgtgttcctggtagaaagaatgagatagggcaggagtagccccacatgtattcttttattggaagaagaaaagctttcccagaaattcccagctgacttctactttggtctattggccagaactgggtcatgcatctatctaccaccagggaggctgagaaaccaagtattttgctttcctatcctctattgtggtagaaggcaaggaaaatgaagaagaggagtaggaatggatattgtcagcccacctattagagcctgccactaagaaagggtcatattagtcaaagaacattgagttaggggtcctttattggaaagttgatagctgtctggatggccatatttctacagtgtttgaaggccttgtcttctgtgttatgtttagtttggcaactcctttactgaaacaaaattctcaaagaagcaggctgtctctttagcaaatactttggttaggattcttgtccattgcaaatgtcaaaaaatctaacagtattaggttaaaaagggaatttgttaccacgtgtacttgaaaaattcagcaataaatcaggtgcaaatgcaacttgatccagggtttcaaatgatatcggtaggatccatttcctctctatctcttggctcaggatccctctatgtcagttatgctctcagacaagtcccttcttagagcaacttttgctggctgtgggcttacataatcacagcctcaaatacattgaaaaaagtgcttctctttcccaacaatttgaactgaagtcctggaccttacacatgggcttcattagtttatatgccttaccctgaaccagtcactttgtccagcgagatgcagggctctcacagcattgagttataggctatgcctggaccctcgggggaaaaaaaatgaggtgactgttaccagcaaaaacagagtagatgctagatgatgagggtccactgtagccttttatgttttgagaacctccctttgaggaaatgcttaaaggcatcatccactttgtctcctcttaattggtgagatttaaaaattctaatctaacataagtaccacagaaactaaaggttttaatttctttagacaactatacccatggttctttatattcctagtaatatcttaatgtacctgaggcagtcaaatgttggctggcagaaattttcttgactaatcaatctattagtatgcatttctatatatttgatactggactagtatttgactgtgagttttctaatttttttttttttttttttttgagatggagtatcactcttgcccaggctggagtgcagtggcgcaatctcggctcactgcagcctccacctcctggcttcaagcaattctcgtgccccagcctcccaagtagctgggattacaggcatatgctgccacggccggctaatttttgtgtttttagtagagatggggtttcaccatgttgcctgggctggtcttgaacgcctgacctcaggtgatccacctgcctcggtccccaaaagtgttgggattacaggcgtgaaccactgtgcccggcctagttttgtaatttgaccagttatttttttcttatatgtaaaatggggataataaattgatatatttacctgacaggattgttgtaagaatcaagtaagataatacacgtgaaaagacttcaaaaattataaagaactattcaaatacaagggagagattcctgtatctcataaaattttgcagcatttttttactttgatattttgaaaatatttttacctaatttaagtggcagacataaaaacaatatttaaaaagttataaaaatgaactgcacttgggggaaaatattcatttttacctaatttttgccttcgaattatatttctaatagattgtttttattttctctcctaggtacctcttcagaagactatcagaaatgccatagaaaaacgtaagaactaaaaattttaaaattgttgagcttctgaaaccctgtattataatagttatatagcaaatatgattgttagtccacaaactcaggtgttcatttattatttgttgaggactcactatgtgtcaggactgttgtaattgctagagatatagtagtgaacaaaattgattaaaaacgaaatctctgccctcagcaatgatagcaaaaaggaaaagtttgagaaaaattcaagagggatagtcaatagtttttagtgacagattggaagaagttgaaatccaagttggctctcagccctctgacttaggaaattggatgaaaacttgttcactaggtgagggaacacaaatgaaaacacaagagtgggttggggtaatactgaggtaccgacagcactttgaagtggagatgtccaacaacaaattggatggcccagcctggagagcaaggtaaaagtcctgggctgaaggcatagttgtctccttgggaaagaatgtagagtgagaagagagtagcgttagtatgatagcctctttataaatatgcctgtatctaaatggtgagaaatttctgaagaaaagaaaatctgttagctgtttttttgggtgaattgtccttcagtaaatgacagtgacaattgtaaatataaatgactaaggtgaccagagatgatgatggacttgcttaaaaaattccttccacaatttataatgtaatattttcttaaggaggatagaatggtatttggataataatgataccagatttgagtgcctattatctactagacatctggcattctctttatttaagtagcacattcacaaagtaaaacccctacaactttgacttagtagctaatggagacggggttttatttatattgcgataacttctttgtagatccactttaatgactgttgcctatgtattgaaatggagcaaatgtaataaaacacttgattatgtgtatctgagactatttcctgtctcacctaaatactgacctctctttgaaaaataaaacctactacttacatgtgcaaagaaaacatagcttcatttatttttttttttaaataactcatctaaacttctcttaaaccctcatcacccttctcccctatttagctgggaaataatgagttaaacttacttactgtcatccatttacttctggttagaagtcctctttgggtaaatgctgaatctcggattttctccccattccatagtcctgagaatggcatattggtaggtgatcatatccctttatctgcctgggcagtttcagtatatgcctgtttttctgacataattcttaatagagtacccttgtactctcagaaatgttccagtttggacaaatagtcaccctaaatgttaagtgtttaggaataggggcagaccttacgtagccttgtagcagtgctggggaaagggtaaggttgggatctgagggtatctggaatcccataagctgtctctggatttttactgatacatgctgcaaggcttctagactggttctatacctggtctgggctccactgaaaaaatcattgactcataaacttaaggccttatttaggacctgaggtcctccattgctgattttacctcaccttggtttttgttgttttctcaaaccctttgagtctcattgaagtcctatatccagactttgactgggtggctttccacaacctttgtagtagagtcacttcaccacagaacacctatgccaggtgttttggctgtaaatttggccactttcttcattgcccttggtgtatggaaccttgagaacttgttctcaatgcccaggaattaagagaatctcaggagagctaactgatgccccctctctgcctgaacatccccagctcttcttgttatgttgtttccaccctgtatggacatctcctagagttctaaacagggagttagtacatactccctcttcttttgactttctcttcatctcttctaatgtcatcttcccatttattacccctatctgcatatttgggccttgagggagaaaagtcagctcccattgtctgcttgttttctaagtctttgtcccccttctctttctaataatgctctagactggaaggtgtggaggagagatctatctttgttaacttccttagctttttctgtatcatatggttgtcttagtctgttttctgttgcttattacaaaatacctgaaactgggcaattatattataaagaaaaagaattcctttccttcctttccttcccttcccttcccttcccttcccttcccttcccttctcttcccccttccctcttcccccttccccttcccctcccctcccctcccttcctttttctttttcttttctttttctcctctttctctctctttctttctctctctctctccccttccttccatctgtctgtccatccttcttccttccttccttctttcctttctttctttctttttttttttttttgagacagagtcttactctgttgcccaggctggagtgcggtggcaccatcatagctcactgtaacctcgaactcctgggttcaagtgatcctccagcctcagcctcctgagtaaataggactacaggcatgtgccaccatgcctggctaggaatttatttcttacagttatggaggctaagaattctaaggccaaggctgcagttagtgagggccttcttgctgatggggactctctgcagagtcccgaggtggcacagggcatcacatagcaaagggactgaacatggtagctcaggtctctctttttcctcttgtaaagccaatcgtaccattcccatgataacatattaatccattactccattaatccatgaatggcttaatccatttatgaaggcagagccctcatgatccagtcacctcttaaagaccctgtctctcaatactaccacgttggctattaaatttcaacacgaattttggaggggacaaacattcaaaccatagcaatggctaatagtagaactctgtagttgtgttttaacttacatatgttaataggaacttgaggaatgtagcaaaatgttaaatgtggttttcatgttgtcttagagtttggacagtggccttactgatgaacacaaatcgttgacaagtacccccattccttattctgtgtagaattatctatgtggagtttgtaaaaggtgaagtcaaaacccaattctaccagcattagcttattactcatctccaaactaagaaaaggctaagaatacatggagaggatgaaaagtccaagaatgtgtgtttctttgataagagctatatattggtgtcacatggagcgaggagtcttctccctcacctcaacacaagaaaggaagctccaagagaaccatttggaaggttcaacatatgtcactgggagttagtttctgactcatacccggaaggtctaaaggcaaagagggtctgttaggtgctttggaatggcagaataaagaggaagctagatatactttcagagtttgacatgacaaagatttgtgcataatgccaataggccaaatatggattccatagaagggggctaattatgatcatcttgaaagggattatgcccaatatgacttcctgcaaaggatgaagtaacctcactcaaaagcagctggaggttccatcatcaaaggcaaaagctgaggagatgataaaaagcagcaagtgagagagctccggtgataggtagagctccagtgataggtaaacctccaacgaacccttcagaatacttcaagtttaaaagagtccacatttgattatgtgtcatatcccagagataccaatggcacataactatatcagtcaagattgagaaagactttcctgtacatttctaaaactcctttcctataattcactgccagaggaacccaaagtgtagtttccaaataggcaagggaaaagaacaagaaacagagatgaaaccaatggtggttgctcttcccacagcatattctgagtctaaatcatgcccaagctgagaaaaggaaaaaatttaaattgcataaggagagtttggatttgtaatattacactgaactttttgttacctaaaaatagctacttattacaagagaatgccagaaaggtgttagtaaaaagaaatctacctgaaagttcattcagaggcgagaaggtactattttgacaggatacgtttaaaaggaaatatgaaagaataaaattgtttctgtttactgagttcaactattcaattaatcagtgtaggaatttagaaaattcccttctcacatttggttttcaactgcattttcttgctacggactcagaaatcccatttttgtggtcagaggctgagctttgatcctttcttatttattccttttgtgatagctagtcctttcctacacatttagatagaactgggggttgtctagtttgtagaagtacaaaataaaaaaaccccaggatattaatttcaaaaaaaccttttactgcagtctagcctgggtaacagagcaagaccctctctcaataataataataataatataataataataataatcaatctgtcatgtatcttaaaattctttccacaagaatcttaggaaacatgattgctatcccttttgcataaatgaggtaaccaagactcaagacaggctaagtagctttccaaaggccacccaagtgtgagtagtggaactggagtttaaagcaaggtctgtcttattctaaacactatgccctgtcctctacgcatattgtttcacactcataaatgtataaatatattgccttttttattaaactatttgttcatataaataccataacatttttctaagcaactgtatattttcccacaggataattaatctcaaataaatatctttattttaagtattatttgagggtttttgaaagttactgaaggatttagaaaataccactaaccagtttgttcttgttatagagtgatgacagtagcagatcaaaatgtttctccaaaagcaaagtgtgcttcaaattcagaatcaggtaacaaataatgaaactaattattttatgtagtaattgtaatatttatgttaaaacacgattctgtgtttatttttgctacctgcaacatgcattaacaaagttagtagcccagtgaaccgagtactttttagcttggttgtatttaagaaatgaagatatgtgggatcagaaagtgggtcttagctatccccacagcatcaatcatttattcatttaataaacatttaatgaatatgaactccatactagatattgttatatatactagtggaagtgatacacttttcctccccttgtagatttcagttgtaggagaggacaataagtgaacatatattgtagttatgcataatgattgaaaaataaagggataagcaaagtgtcttgcaaacccttatgtagtttactattaggataaatttagcaagacatttacatccttattaacctctgctgtatctcatatttttctatatttcctgcatcaagttttatagcatccatttgagagtaaacttgaagaattgctgattttgctcttgatggttgtaaatgtttgtatgtatatatatttgcataatcttcattttaagaagttatcttaatgagcatttactaaatgccacacattaagttaggaactgtaggtataaaacaattaatatactttctgttctaagcaaaattagtctagtgataaaaactaatcttgtaaaagcacaaaatccttggaaggagcaataccttctaccctggagggttagcattggaagaaggatttgttttacagatcaaagaataagggaatgtgtgaataacagatgagcactaattaaagggaaagtggtaagtgtaccaaaatcaaccatgattttacctaggttttgccaaataaaaagtgttgctttagctgtgga

SEQ ID NO: 96905 - DNA, 14357 bp, Homo sapiens
tgcagatctcggcccaagtcatgttagtacatgacttgttaggtgtccttagataagttaggtgtccttaggtaagttactttctctgacttcagtgtcctcatctggaaagtgatgataacaatagtaatcaggtagggatgctatgaggattagtagtccttgtaagtatgtgacccagtgcctaatatacactctcccttctttcatggcctgaaacctccaccattaagtctagatgggcaacaacttgagcaagcactgttggaaaggcagcaagcatcccagctcttctgctcagaagctgagtaaatgccagacaagtcttttaacctccctgaactgagccttgtttttctcatctctgcaatgggaccttgatcctcctatggttgctgggatgatccagtgaaataacacatgagaaaggacttttggaaaatgtcaagcactctgcaaatattagttgttgctctggtctcagaaaggccatcaagccctctcctgttggtatggttccttgggtccattggtctctcatcctggaaatcacagaaagcttggcttctcgaaggtgagacagagctaaaggccatccagtggggagggggtggagagaggaatactggcaacatgccatgggtggccgggggcaggcccgaactgatggggtgctggaggaggatggaggggcacagcatggggaactgccaaagagatatctaaccttttgaactattttctgggcgagcttcagcaagcccccaaccccctgcatgtgctcttagctgacagggggatttcttttccctaggaaacattaactggcatctttctatagatgaggcatgaatgtgcttttgttggaggccgatgggggagggtagaagtgcaaaaaaaggagacaaatacatctgtaacctctggagcatgccccagtggatgatgggaaaagtttaaaagaaacctgttttcaactagctggactgtcccatctgcatctaagatccacacacaaagctgacacagagaatggcaaaggaggacagagacaaagagaaactcacacacagaaagaagcagcaagggagacagagaaacttacactgatggataattaaccattaagttaactggcagaagatagaagctcagaagccctaaggaagaaatgatgtcattctgactgcaggcagcttccaaggaacacttagctcagcctccatccacttgataatgtaacacaggaaggtattttttttcccccagtgatcagtagaggaacagaaactcacagtcctgagctgtacctgcccatagccacagctgacctgcagtttgtcttgtccccagggctggggcacagggagtgcccagcctgtgggaggaaccaaactattatagacagaagtgaagcttccatgcaaatatacaaagaatgattcaaaaattagtttcttagcctcccctctactacataccctccctctctacacacacacacacacccctattcggcattttccaatgcatttaggagacagactcaataaatttagctacatctgtaggtgacagacacatcatagtcattaagggaagctccactcttcctttgggggctgggggatgcctccacccttcctaggctgatgtcaggaaagactgtcagctatctcttatgatgtccctctggattcttgtcataggtggccttgtgggttggatggaccatggagctaggctggagagaggattttgtgccaggcagcatgatgtgtggaaagagcaccagaaagggaattaggagacatgagttctaggcctggccctgtgtgatcttgggcaagtcactttccctctctgagtctcagtttcctatctgcaagaggaggacactggatcacagaatctgtaacatctcttttatctctgaacattttctgcatctcacacctgagttgagataatcaaggtgcaaaaagtaaacccagggctcccgcctgtaatcccagcactttgggaggtcgaggcaggtggatcacctgaggtcaggagttcgagaccagcctggctaacatggtgaaaccccatctctactaaaaatataaaaattagctgggcatcatggcaggtgcctataatcccagctactcaggaggctgaggcaggagaactgcttgaacccaggaggccgaggttgcagtgagctgagatcgtgccattgcactccagcttgggcaacaagagtgaaactccctctcaaaaaaaaaaaaaaaaaaaaaagtaaacccagttgagttctgtgtgtcctggatacaaattgaaggagacatctgaaaggctcctgggggccttgggctataaccctaagtccctggcctagaagaaagagcaagactggctgcctggcattctatctccccctgtcaaactcccccaatctaggggactgaatattgccctgtagagtgaaatgcagtggtaaagggcatggtctctgaatctgggttgaaatcgtggccctgtaacaggaaaggtaggatagtgaggtggcgaagtgcttgggctcgagagtcaaaggctgaagctcagatccatgtgccactgggttatttcatctctcttagcctcagtctccttatctataaaatgggaatgataacaatactgctgatttcataaagctgctgtgaggagtaaataagataatgcatgtaaagtgcctagcctgggctctttgcttattcaatacatagttgttattattattattattattgcctactcattggaggcttttcttgatgttcatacaattgagttcatcaggactcaattgtaaatgctttgatggggtgagggtggggaacataatgattggagacagcaaatggggcttcaataccctagggatggccttgataattaattacagtgtggctctaactacaccaaatcagttgtccctagcaggggttcatgtatgtgctaccccgggacacaggcaggcagcccagaagaggccacacccttgctcttagactgagaagagctggctgagacctctctaccactctcctccaagggctggtatgttacagcccaaaagccttctattgctggccatggtctaggccagacctcggactgtcacactggacttttctctctctcgcaaaggacgaagcccttggcagtcatctccaagcatggctttggcatgtattccttgaacaacttcaggctagccagagtgcgaggccaaatcttctcttatctagatcacgtgctagccgccaggctctgccatcttcccacagacatgctggtctctcgcctgccagcatggtcctgagattgcagcagctttacaagaagcagggtcaccatctccccactcccacacgccactctgagctcctttggaatctgccctcagaggactcctccatgagcagtgtcacaaggctttgtccccttgaaaatatcatcttccccaaaaaagcctgtattaagcacttatctgcacgtggtgttgtgctgagctctgtttctagtgagtcacactgtcacaggctctgccctctgggaaaaagtctggaatctttgccagagactgtaaagtccagtttggctaagtactggggtgttagaagagaaggaatagtttaaaaattccttcaaggccactgggtggtgactcttccactcgtgttcatctgtcatccctcactttctagcttcttcctccctccttctttagattcccaaacacttcattttttccatctaaatttcagatggacttatttcccaccttttaaatccagggaactctttggctcactgtagcacttgattttaagcaaatgggagcattaggtttttgaggtttaagagcccatctgtaaagatatttctactttggattacaaagtcatgttttagaaattctagaatcttatagccttacattaaagaagctagacacactagaggaagtcttaaccaagcaaatgtcaacagccccaggaaaggacagagacagataccgcctttgactttaaaaggaaatgtagcacttcccttccaaaatgcaaggggcaaaaaagatcacgatttcaaaataatgttctatcttcctaccctggggctctcccttatcagtactgagctgtccatcttcctgacatctagtgagttggcctagtttctgaagccatttttagaacacgttcattttaataatcaaggagtcaggagtctcgcacagtttcaagtgtttcatcagtttcatcagttactcagcccttctctccacgtcactcagaggaggggccttgtggtcactttggcagtttgaccagcaagaaggaggcttactgtcacccctgactctgtctaaggtccaaccatacgctcaaggaaaggccagctgtgagcctagaggagttgtcttcagtgatcccagtgcctttatagaggcccccctctgctccccatgacacaagaagttgcccttgttatgtcctccctcccgccatcccctgcacattgacatattcctgtcatatcaggtttctaccttttctgaattaaaggtgagcacaaatggtcagacaagaatatttgcacttagcctattacataaactcatggagggggaggattgaacattcccctggccctcggttaagtcactgcatttttacaaagacctgaagacaataccaacagaatgaataaggagcagttcatgtattagatgccccagacaagtaaagaagatatcattccaggggggctgttacaaaaaaacaagttttgtctattacgaagggctggaccctgcctcaatttctttaaaagggctcatggctttctgccagaaccaccccactccaccgccatctcaactcagccctaattttttaactataaactgcaatttaaaataaagcagctttttcattctccatggatttccatcatttccttccctctaacgccttgaggcttagccaaagtggggttttgcagcctatcggcacccaagcggtagaagagacatcaggatgtgtaaagtgctttgggatccatcccagagactaggacccacagatgcctcctgcctccctctgcccacaggtgccgctgctcggggtaggggtcatggatgggaatccaacatgcttttcctggcaggacctgtcaggcaggggctaagggtaagaatgcaaccccattctcaaccgccctaaaaaactgagtgaagtggggacggggccccgctgagagaggtgaaaaggggtgaggaggagccgagggtcctcggctcagcaagaggcgaaaccgccacgcgctggacgctggacgacgacaaccgctagagctatgcctcgggcgaggtcccctcccgggtcccacccttcctggacctgaccccctggatcaccttgatcttctcgccctcgatttccacggtcttctccctgaagtccacgccgatggtggcttcagtcttgtctgggaaggtacccccgcagaagcggaaggtcaggcaggtcttgcccacgttggagtccccaatcacgattattttgaagatgcgaatctgcacgtactggtccagcgacgagtcgagctccagggacgccaggccagcggccgaggcgggctgcaggctcccatggcccaggatgggctgcgccatctcccccggaccgaaccggggccccaaccccccttgagggctccacacaaagagaacgtccacgttcgtgcgctcgaggcgagcgagctctgtgcgtgtgtgtgtgcgcgcgtgtgtgtgtgtccgcccgtgtgtgcgtgcgccggcaccgtgtgcgcgcgcgcgcgtgaagggggtgcctctcactccgggcccccctcctcctcctccagcgcaccctccttgcagctcggaggcaccaacacaaaagccagggagaggaggagagagggaggagagtggacgagccgcsagccttctgcctgtgtgcgccctcggaccggatgctctggcgaaggaccctaccgcgctgctccagccgccgccgcgcctcggcccacaccctcccctgcctgcattcccgggacggacccgagggaagaagcctcaggaggaaagagacggggtggggacagcggcacacgccaccccgggatagacttctttctccttgcccccgtttatgttataggtttcgggctccccacccccactggctcgagcgcacggggtcagcgggcagggagcacagctggggaggacaaagagctgcaccttaagacatcactggatcacttcggcctccctggagcaacgcaactctgcggggatggggtgggggcggaggcacctctttcacctcgggagcagcgggcagctgagccgcgccttcccggtccccgctaccccgtcccctctacccccaccctctacccgacccgcgccttgggatamagggatgctctgtcttaatgagtgagcaggtgcactcgcgggccccaggcagcctgggaggccgctgccaagacacgcagtgggttgtccggggcctgtacagctgagaggagggagccagcgggcacgcgtgtgcgtgtgtagggggtgtaactgtttctgttacagacttgccagatgtaggggggcgcgtaccaggcgccaacatccccttatcacaccacgcgcacccatcctctgaatgttcaggagagcggctcctattggctgccgcagtcggttgtgtttggctggccaatggggaaggcccgccgcgggagaggrccacacagaggctaggagaagggggggaagctagtggtggcagttccagcaaaaggggactttgtttacggggctagccattactggcccaggtggaggatcttgggacaatggcataagctccacagtgccttccattcccaagccctccatataaccataagtccctccagaacgctggagtttcagagggagttgggaatccctaggagggttcacctccccctgcagctgaatgtagaacaaagtggttgggtctaatttgccagaagcctagattatgcttggaagatgataaatgaacacaacctccttacagtattagggggctgctgcccaaagcttactaatcatcacacacatcttggtcaagaccagtattccttctccctaaagtcattcgcgggttcagaatttgtttgaaatcgactttactgggggtacaatttacatacgataaagtgcacccatttgtttmttttaagactttacctctccccctacatatttcataagctaaggtaacactgacacatgtcactagcactgactcgtgagttattgctaatgccatcaaggtcagggattcaaacagcacagttgagctgccatcttatttgggaggttgagctgcaggaagagacaaacatgaccaaatccatttctgctgagagaaaaacaattcagtgcatcagtgatayacctgaaagcaaattggaatgtgactactcaaggacgtccaagttactcagaatggcatcttccagttaataagtttattagctgagctagcagatatatttacagctaacccttttatcatatatgtgggtcgcccatttctaaaacccyacattatactactcagcattaaaactacccagataaggatttcctcttagttggctaatccaaaatcatccttatgaataccaattttcattgtattatgtatcaatcatcattgtacagtatttttggttttgattagtctgatgcctagtttgctggatcgttcccctctgtattggaagttaatgcccctgatgatctttatctacagaatagctttaaggtggagaggggtaactattaattaggtacatcctgtacacaaagtagaaaggggctttgccctttgccaattcacagctagaattaatgctaacttcytgagagatattaaaaaaacatatgtacataataagattatttcaatgtaagcttctagcaaaaacttgtcactgagtctacttttgtaaggaagaaactttgatttctgaaaatatgatatctcaaaatgggcttcttgccctaataaaaggtgtctgttacttctgtggggtgagactttgggggatttccacttatattttttggaattaattcaatgagtatatattgcttttgaaaaaagataaaaatataatttttaattaaaaggacaggaaaactaccttattgtacytattgtaaaaaaattaaatgtactgtacaatgccctttgtgttaattgtgcattattaaattactttcaaatacatgcagttgttttcataggtacctgattatcatgattttgacagtgttttccagtctcttttgccatcagatataattaactttgtatttaatcaatccatgattattggtttttacaaatatcaataaaaatcaatgcaaggctgttaaaatgttaagtaaatataaataatttttaccttactttggaattgatactttttttttttttttttgagatggagtctcgctctgtcacccgggctggagtgcagtgacacaatctcggctcactgcaagctccgcctcccaggttcacgccattctcctgcctcagcctcccaagtagctgggactacaggcgcccgccaccacgcctggctaatttttttgtatttttagtagagacggggtttcactgtgttagccaggctggtctcgatctccggacctcgtgatccgcccgccttggcctcccaaagtgctgagattacaggcatgagccaccgtgcccggcctggaattgatactttcaatatttatcccctggcctaaagtgatccaccctcctcggcctcccaaagtgctgggattacaggcatgagccacagagcctgaccatattttcaatatttatccaaaggagctctagataaaatgtcacccattgcctgcacttctgaacactgatctactctgcttaatgggtaagggagccctggatcatcttcaccacataatgactacttcctaggcctggcacagtggctcacacgtgtaatcccaacactttgagaggctgaggcagcaggattgcttgagcccaggagttcaagaccagcctgggcaacgtaatgagactgtctcttaaagaaaaccaaaaaacaaaactacttcctgggttaaacttcacagaagggtgtctttgtaggccgggcgaggtggctcatgcctgtaatccaagcactttgggaggccgaggcgggcgatcacctgagatcaggagttcaagaccagcctggacaacattgtggaaccccgtctctactaaaaatagaaaaattagcagggcgcggtggcatctgcctgtaatcccagctactcgggaggctgaggcaggagaattgcttgaacctgggaggcagaagttgcagtgagccgagatactgccactgcactccagcctgggtgacaaagggagactccgtctcaagaaaaaaaaaaaaaaaaaaagagtatctttgtaatttctttctttttcttttttgaaatagggtctcgctctgtcatccaggctggagtgcacgggagcaatcactgctcactgcagtctcgatctcctaggctcaagtgatcctcccatctcagcctcctgagtagctggaaccacaggcacataccaccacgcctggctaatttaaaaaaaaaatggtagagatgatgtctcattatgtgctcaggctggtctggaactcctggcctcaagcaatcttcccactcgtcctcccaaagtactggcattacaggcatgagccactgcacccggccctgtaatttcattctctatccccattccaccaaaaaaaaaaaaaaagtaacttcattacctccaaagttagggcccaactcttgccagttcaaatctggccccccaccatacttgcctgtctttatcactacttctttatttttttctttttggagacagagtcttgctccatcatccaggctggagtgcagtggcacaatcttggctcactgcagcctccacctggcaggttcaagcgagtctcctgcctcagtctccctagtagctgggattacaggcgcatgccatggcgcccggctaatttttggattttttgtagagacggggtttcaccatgttggccagactggtcttaaactcctgacctaaagtgattcacccgcctaggcctcccaaagtgctgggattacaggcatgagccacggagcctgaccacatcaatacttcttagtatgtactctctatcattgtcccccgaaaatgtgctgggttttggttttttaaaacagttccaagccttttcatttaacaaacagcatggtgcttcctctaagacactttacaaatattagctcatttagtcttccgaacaccctcctgagatttgtagatgaggaaaatgaggcacaattaagtgacttgcccaggtggcagagccaggattcaatgtgggttggtctggatccaaggtcaacatgtttaacaatgaaaaatgttatctttggtccgaaagtattcaccatctgaaatatcaatccttttcctccactgtttgaattttactactcatccttcaagacacaactcaaataacttcttacacgaagttctaccatagtgattccatcccatagtcttctctcttgctctgtccggcactacgccagatattatttcaatgaccggtatatgtcatctccccaactagacagtggccacttcctatatagatgctatgtccaaataaacccattgtaaactgaaaatatcgttaagtcgaaactgcatttaataccctgataaacccatcataaagtcaaaaaaccgtaagttgaaccatgcttaagtccagatgctcctcgactgacatggggttaggtctcattaaacccatcataaagtcgaaaaattgtaagtcgaaccattgtgaggggtaagtcggggaccatccgtacttttcatacccaacagagccccttttatagtacaatccaagaggtaagtgctcaataaatacttgttaaatgaatatgtaagctgaatctttgaaacaggcacattgtatgttctgcatgcagccaaaacattatttccaatttagcttatatctggcagagtcaaaacacttatttacactcagcccctcaccctactcccataactgaaagttctgcttagcagacttctcttcccagaaagtccgagaagcacgaacgctttttgctaacatcctgctcccaagcacagaaaccacagcaggagactgtgtgtatctgtagcacctggtatacagcatctaggacacacaactgaactaataaataaaggtgacaggcgggaagaagagcgcagaattacttgtccaggaaacgggttgggtgggaaagagccggcaactggtaaaagatggaagtacacgccggatctgggaagccaggttccgcgcctcggactcatggaaaaactggatctggatcactgcaaaagaatcaggaaggcttcggtatcaagtaactggtgtcctaaaaccaaaaaacaaagtgcgatgccggggctacgctgttgtgagatgctgttatcagttctcgtcaccaacacagcggcagcaccaggcacaaccgccaatcaaagcggccccacgagtccctccttgaacaggttccttaactcgttcagtccaacactgtgccacaaactcgcgaaaaccggctacctagagccagcgtctttgcgagcttgcggccagctagtgcatgcgcaaatcctctcgccgtgcggaccaatcgcaatgcggcagcgagtgctacgcctgcgcagtaggcctccggtcgccgttccccttccccggctctagcaggccggcttctctgtccaatgcccacccggagctgggaggaggagtctgcgtaatgtgcgtgtgaagagactgggggagctggccggggctcacggtgtttgacccgtcggtcgtgcgtgagaggaaagggaaggaggaggtcccgaatagcggtcgccgaaatgttccggtgtggaggcctggcggcgggtgctttgaagcagaagctggtgcccttggtgcggaccgtgtgcgtccgaagcccgaggcagaggaaccggctcccaggtgactgacccattccaggcaacctccaagtccgagggcctggcgccttaggctccctgtgccttgcagccctctacccccgcgtccccgcgagaaacttaacacatagtcacgtgaattccaaattggcagactccgaaccctgagtcttgcaagcggaggaattggctcagccatgccgacctgaccttcaagagatttgaacccagtagtcggcttgaggccttttcccgggagcgtttgctgttcagggatcccagaacaactggctgtcggcgcctccccggcatccccaccccccacccccctttttagagcaatgaggtcaagtagactttgtcatttaccgattgagactttaaacaggacgtttaagccctacgcctaagtttcttgtgtaaatgagggtgttatctgctcagccttccaaaccacagatgagatccatggatttgaatgcccagtgaaacagaaacggtgcagggcaagtaaggagtcggttggttgtgtaccagacacccagagaattggcccagacttaattggagatgcctgagccgtgtacttcttggtggtctttaaggcttcaaagaaacagtttgcagaacgcattgtattttgttctccattaagttgtttcatcaaattttagagctggaagggattttgtggtaaaggtcaacccactcattttatagataataaactgaggcacagagaggtgaaattacttgccaaaggtcacatagttaattaataggtagagctaaggatagtttgctagcctccaggtccttaatcccttcgctgcaactccatactgcttcctaaagttgacctcaaaaagttaagaatgaattcgggtctcttcccagtaattagcccattgtacatcagatatccgtgaatttatctgagcatggcttgagcctgcttcttttcgtactgcgttacttcatgggggcaatgaatgatccacctgtaggagttgctttgaaaaaaaaatcagtaatccttcaatgtccacccctagggcatttgcaatgtcagaagttatccttgaggcttttacaatacagaaacacctgggtgctttaaaaataaaaagtggaaaatattttccttgggttgttagggtctttgcaaatgtgcatttgaacagtttttccagttgctatgcacaatgaaaatgtttcctgataggtgtatttgagttatgtcctgggacatactgctcttggaacttaaaacctctgcttagcttttaaactaatgccttatcaatggatgtcatctttgagggttttgtgtattgaaatgatggtgctctgtgcttgttgcacagaaattgagataacctgaattttttttttttttttttgagacggagtctcgctttgtcgcccaggctggagtgcagtggcgcgatctcggctcactgcaatctccgcctcccggattcacgccattcttctgcctcagcctccagagtagctgggactacaggcacccgccaccacgcccggctaattttttttttttttttttgtatttttagtagagacaaggtttcaccatgttaaccaggatggtctcgatctcctgacctcgtgatccgcccacctcggcctcccaaagcgctgggattacaggcgtgagccaccgcgcccggcgataacctgaattttttcatccacactggcctttcaaactttgagtagttgttttgcttaagtctcacaacttttaccagcattctaaagtctgaccaaaagttctcatcaattaaatatgcatttgcaaagttaagttgatttattagacattggaaagtggttggtgttgttagaactactgaaaaatacagactcaaatggttttttccactgcatgtctttgtttgaaggcagtctactgtagaatatattcggacttcctgacatatccatccatctctttgcatacacttgttctttgtcctttggccgtgcaccaaagtatgacatcatctgcctttaaaaatgggtgagggtagtgttaaattttcaaaaagaagttctgatactctcattttaggaattaactctgttttgtggcttgattcctaactgcttttaatctgatttctt

SEQ ID NO: 96906 - DNA, 178857 bp, Homo sapiens
  misc_feature (1)...(178857): n = A,T,C or G
acaaaaggggagtgccagggaatccctgaaacaggattcaacccagaagagacatgagaaactcccagcatgatgagtagctgcttctcaaactttaagaacatgtaaatcaccaggagggcttattaaacacagcttgctggactcatccctagagattctccttcagtgagtctggggtagagcccaagaatatgcatttctatcaagctccccaagatattgatgctgctggtctggtccacactttagagagctgtctagagaataaccagctcaaactagagcttgtcagaatgtttctgggagagatatttttctcaagaagataaaatggatcaaatatctaatgcattcaaacgtcttgaacacaaacgcacatatgtgggggagagttaaatgaatgataagtacacagaatctaagcaaatgaaaaaaccgaggccagatgtggtggctcacacctgtgatcttggcactttgggaggtgaaagcaggaagactgcttgagcccaggagtttgagaccagcctgggcaacatggcaaaactctgactctacagaaaatagaaaaaaaaaaaattagccaggcatggtggtgcaagcctgtagtcccagctacttgggaggctgaggcgggaggatcacctgagcccaagaggtcaaagctactgtgaactgtgatcatgccactgaactccagcctgggcaatcaagtgagaccctatctcaaacaaaataaaaaacaaacaaaaaacaaaaaaagagaatagctattaatttcaggaaaaacaaaatgttgtgcaagaaaagaaggtattcatgaccataactgatccttaacttgcagtagataatgtttgtagaattgtaataatggaaacactgaatacaaatttaaccaaattcccctataacctccgtattgagagtgtggtggtggtgttgggaagagtggacattttatggaggaagggaggcaacagagctaagtcctcttcctttccacagtggagggtcaacggctattgcacgcagccaaaaaaaaaaaaaaaatgcaagcagcagcaatataggcacattatttagaaatgggaagtaaattcccaaaataatcagctgaaagagttaacaaggccactgttgagaagtagaaaatgggtggggctattgctccttttgaactaatactttaaattatgtgcatgaacaactttgatgtaaataaaacaggtttaatgatgaaataagttaaaataacaaaataaaacaaaaacagcaaaaggaaagcaatgcaagataaaattgtgacttggaacagaggaggagaacaaagagtgcccacaaagcagggaagtacctgatctagtgtggaaggttaaggcttccctagttaagaaggtgatctctctgggtcctgagggctgagcaggatagagtctaagaaaggaccgcgcaggcggagagaacagatgtgcagaagtgcagaggtgtacgggcaacagcgaggtgtcttgagtggctggagagcaggatgaggcaagtggctgggcacctgtgcatcagggtaggtgctcaggggaaggtaagccactgtatgcaccatgctagaaaactgggcattatctttatttatttatttattttttagatggagtttcattcttgttgcccaggctggagtgcaatggcatgatcttggctcactgcaacctccacctcctgggttcaagcgattctcttgccttagcctccccagtagctgggattacaggcatgcaccaccacacctggctaattttgtatttttagtagagatagggtttctctatgttggtcaggctggtctctaatttttttttttttttttttttttgagacggagccttgccctatcgcccaggctggagtgcaatggtgcgatctcggctcactgcaacctccgcctcccaggttccagcgattctcctgcctcagcctcctgagtagctgggattacaggctcctgccactatgccagctaatttttgtatttttagtagaggcagggtttcaccatattggccaggctggtctcgaactcctgacctcagttgaacagctcgccttggcctcccaaagtgctgggatgacaggcatgagccacagtgcccagcctgggcattatcttttgcaggcagccaggagtcactggaggtgtttaatcaggacaatcatattgtctgacatacattttataaataaaaactagagggaggagacaggaggaaaataatctcattagaaagaaggttgtcgcaaggatcacatcaaactgtaacaaaatcctattagtcctactttgagccacagacccatccatggctgccaccctggtctgagccaccatcaccctcaactgactagctgtgcaaacccagatggcttggttaatcccggtaagcctcagctgactcagctagcaaatgggatactaaccaccacctcaccaggtagcagatacttaaggctctagctttggggttcaaaccaactagggttgaaattcagtcccactgtttactcatcgtggcaccctggacaaacacccttgcagagcatccactgcctcactgtaaagtggggataatggcagttcctccacctcatgggctggaggataaagaaccagatgtctataaacactgcacaggacacccagccaagtctctgtgtgttacttccctttctctctccatgcaacaagccagcatctcttagtgtctcttaatcaccagcaggatctgacaacccccaactcacctacgagcatcttgcattatctcagtttcagccctcatcagctctttgcggtgtaatgctccccatgagtcaccaaattcccctatattctgaaagagcctgtgcctacatggaaaccgcacaagatctgtctcatcttcccacgggccagaaatgggggcagcaagaccacgccatcttgtttctgatcgcgcagactttactctcctcccaccccaaagaggcagaagttgcaaggacctaaaatagtggccataccactattcatggaatgcctgccatatgccaggtgttgccatgcacagccaattccatgagggccacttgcataggaagcatccactggtctccttcaggcagccaccccgaccctcatccatgaagaacacagtggctttggggttagacacttctgtcactttagtaagttacttaacctctctgtgcctcagtttcctcatctgcaaagcagagacaaactgttgtggagattcattgagatcatttagggagagggtctagttcagtgcctggtacacagcacttaataaacgctagcattgccagtgtcccatcgcagactccccatgcggtgtcataaccgatagtttacttgcaaacttgcaattcgtccttctccttgaggttcacagcctcaaggcagggtctctcctgctcatgaatgtcgtccctaggccagtgactggctgtagaaggtgcctgaaaacttttactgtggggtgaatgaaaaaatgaatgccaatgtggcagctgggactcaggccaggcgacgtaacccacaccgcaaggatggaagaggcagaagcaggaataggcattcaggcgtgggagccccagccgtccttctgtccaccatggcgagcagggccagcgtcctgtccaaacccttggtgctgcagatgaggagaccgaggcgtggcgcagttgggctgctgtcaaggatcacccaacggagtgggatgtaacaggcaccgcaggggaccccaggccaatgccctttagtcacgccgccacctccctcctggagcagaaggggaacccgacgcctaagcggttgcgtgcgaagttcccaaccaggctcaaggagtcgcagagccggggctccgggcccgcaggacccagaagccacgcgccccgcgctccccgccccgccgctgtctgctcggccgacccacctggtgtcgcgtgcgctggcggcccgcgcggcagccaagccaaaggccgaggccgaggccgagcgcggcgcccagcagcacggcgggggccagcagggcgggcgccggccgcagcgcgtcccgccccagcagcagccgcgcgtcgctcttgcaggccgccccgccgcgggccatccggggcgctcaggctgccgccccgccgcatcccgccgcctgctgcaccgtccccgccagggcggcgacgcgggacttggagcccgggcgggccaggggcgcggcccgctccgcagactttctggcctgtgcagtctcccgactcctgcttctctccccttccctgcttcgccgagccggagggaggagcctggatcaccgctcaaaactttcagccacccccgccccagccctgcccctgcactgagcatgcccagagacagacgcgcctcccagccccggacccttccggaggggggcccggtttccacccctttaactttactgaggcttagaaggctcctttaagttttttgaggcttagaatatgctacgcatttagcttaatgatctcattaactttctcaataaccctctgcggtgggtgctccgcccatcctcctgatgaagacgctgggatcaatgcaattccaaccccctgcccttgcccctaacctctacccatcaaccttcccgggaacacaccgccctccacgcctctgaacttgctcacgcgaagactcctgttttaatcttattttgtcccagggaaggtcgagacaatgggtggagacaccgttacactcagtctccactaggaggatgggtaaagggatccttacacccagaccccactgagacgatgggtagagagacccttacacctagtccccactaggaccaagggtagagagacccttacacccactccccactgagacaatggataaagagacccttacacccgctccccactaggaccaggacactgcaccatccttcatttactcagcacttggagagaatctgttgtgtgtgtgttgcaggctgggggataggccagccacaaaccaggcagtgtccaggctagtgagtatctcacagttgtttagagtgataaaaaattaaaggagttcatcactgtgtttgctttaaacaaacatggggtagctactagatgtttgcttttgtcctgggtgcctgggtaaagcacacatgcacgtgcacgactgcacacttgcactcaggggcacacacacacacacacctaccctgtggagcttaattccctgtgtgggccgggctaggggacaccatggggatctgcttcagcagaggagggctttgtcctttcagcctagatgtccagcttgtttctagtttgtttcatcatttcctcatggcaagatgggaactgttatccaaattcttcatctttttttaataaatgaagaaactgacagctggagaggagaggtgactcatttgcaattaaggagtggggcagaattcttgtctcatttacacctgtgtctggcttcagggcaaactctctgctatgtggagcttcttatatattaccttagaagcatctccaaggttcctggggacatgtatgggggcaataacttgacgctcttgttttacatttccatgaatgcttaggctttagtttttaaaatgtggtgtttgggccaggtgtggttgctcacgcctgtaatcccagcactttgggaggctcaagtggaggattgtctgagcccaggagtttaagaccagtcttggcaacatagtgagaccctgactccataaaaatactaagaagattttttaaatgtagggttatttgctttttactttatcataaagttgttgactgttaaattaacctttaaatgactgactgtcaaacaattccaacggtccagcaacatgcttggcatttagcttgtggtcttgtcacatgcctgacagctgccacgtaccccctggtgtggggaacttggcttataaattctcagcttctcgaaccccatggccttgtccatgttaggtcaggaaaggcctgtccttggatggtctgggttatggggagagaggctgccaggggccaggctcgctggcctgagactttatagacagcctaacagcctgccccgcaggaaggctggcgggagtggagccctcycccgtcaacaggtgtcagctgtcacccaggacctaggcagggatgaggaagcacacaaaaggctccaccagtccccctttttgtgtctttctcctcctcctcctgcgtcccttggcaaagcaaatccctgtcccctcggagagttcagggagagcttgcttagggctgcgacttcagacaccagctcccctctttctaggtccccagagaggtggcccagcggctggcctgtttcycactgggaatgcgaggggcacccgggccggcccagggctgacccamagcaggctcgggcagtgggtgctcagctggtctgcactgaacgcaaccggaagtgagggtccttttccttctctgcggccaccccctcctccccgagctttcctgaaccttctgggtgctccaggactcccggccccgcgctccaaatgcttctccgttttcyaagcggggatggggaaactctggattcacatccgtgtgtcaggaaaccgttcccaggggaagtgcgtctgagctgaggcttacagacccaggtaggcggtagcggaggggcccttggggtcctggtaacctcggggagcaggggagtgacccgctctgattcggtttgggcgcaagcraacccaggcctggccgccgggcgcctgggccgcgccaactcgctctccccctcccacgcccgtccggcacctcctggcccgccaagccccagatgcgggtgtttgttccagaaaactttcggcggcggctcgcactgagcatgctcggcggcggggcgggcctggggtccggaagctccagcgactcggcggcacccgccgctttgaggtagcgggtcccgacaggcgatggacccctcgggctcccgggggcgccccacgtgggtgctggccgggggtctcctggcagtggccctggcgctggggggccgaggctgtctcggcgccagctcacgtccccgctggcgccccctcggcgcgcagccaccccgggatccccaggtggctcctaggtctgggcccggcctgaggatccctccggggcggagcggggcggggcccgagagcagcacgcaggtaaggagggcccgaccccaggctccggtctgactgtagtggtttgactttgtctacaccggcggtggcagggaggacccttagtatttcgcaaagaatgaggaagggagggcaggatctgaatagggtgcttcgcggcccttaggtgtatcccgctcacggccagaaagcttcgagggaaactggagaccttcctcggggtgtggcagctgccggcttggacttcaccagcgaccctggttcgaatcctgctctccattttacgagcttcgacctagggcagttcactcctgtgccccagtttcctgatcgttgaaacggggccgtcgcggcgtccaccccagagggtggaagtgggttagatgagctcacatatgcagagccccttgcagaggccagcactgggaaattgcagcggtttttaaaagtgggggctcttggctggactcttaggtgactgaactctcctggctgatggatttagccacttcctacttcaccctggccctccctctgtggtcctaaactcgaaaggcatggatccctggctgtagccctagacttgacctcccccgacaaagctggtcaccagtcctagtgccttttcctccaaatcagctcggatgtctgcccctcctcactccccactgccactccctggcttcaggtcccaccacttcacttccagcccttggtgatggttttcccacgtctcccatccattttcccccagacctctggggtggtctgtcctggtagacattctgctactcctgtcccatgctggcactcttctctccaccttattgcccctgacagcacacccaggctcctattcccaggactgccctggccaatggtctggcccattgatgctgccctgaggtcctcccacctctctcctagggtggtgggtcgtgtcctgctgtgttctctaccccaggacacttgcgacactggcagaggtttagtctcttaaaagagaccctgctccctttctgtctttaggttttcactggaaaaacgccatgtcagtgtcctgagctttcaaaagtccaatgacagaacatgttccctgggtcctttcacttgcatctgccctgtgagatgggagtatctggcccgttttgcaggtgacaaaaccaaggctcagggagccgcgtccccaggcctgtcctgtactctctctctggcccccgagttcagagcctgcgtgcctggcctcacctgctttgcacaagctcttccttctgggaagccagtgtcagaaatcctggtgcacattggcctctgtcagccacagtggtgttgagggtggtccctgccagaagggagggacggtgcctactgggaagggcctgaagccatctaggaccatggtgggtgtagagtacctcaccctcaagggcaacccctgcctttgcaggaatctgggaatgagcacctgtattcaggtgcccttggcatcttgagcacgtcccctgggccctggccctgcccacgcccatcccagctgttgatgggaccagccttcttccgtctctctgggcctgtcttgcatagcccttctgcacactgtacaggaaagagctctggccatgtgtgtccctgccttggccactccctcttgtggggcctgggacaagtcacagccctcagggtctctgcttcctcttctgagcaatggtgtaagggctgttcccagagcacagttcccgaaggcacaggttagttcttcctattgtaattatatgatgccttcatgtaattacttgataccatctatccatccattcattcaatattatctatgtatgtatgtatgtatgtatgtatgtatgtatctatctatgtatctatctatctatgtatctatctatctatgtatctatctatgtatctatctatctatctatgtatctatctatgtgtctatctatctatctatgtatctatctatctatctatgtatctatgtatctatctatctatgtatctatctatctatgtatctatctatatttattgcacctttgctaagtcccatgctgtgtgcagggggctgggagaccaatgcctaattgcacacagtgattgctgtgaggaggaggatggggagccgtgagagagggtggaggaaggaggtcatttagtctggaaggtcagtcaagacttgaaggatgggcaggtttagccagggaaggagtcaggagagaacatcccaagtggaggaatcgtcatgggtgtggcccgcatgtaggaggagcttggcatattccaagtctctggccccctgatgctgggacatctcttggtgagaacatttaccacattgtttgggctgcttgtctgtttcctttgctggactgtgagttcctgtgggcagggattttaccttttttaatttcatcatttgatgcccactgggaatgcattttattccccagtggttcttaaggtggggcccagggaatccctggcgtcactgaaccattataggggtccatggagtcacagctattttcacagtaatactgaggtattacttactttttctactcattttctcacaattgtgcgatggggttttccaaggtgacaggaagtgtgatgttgcagcagatttaatgtacaagcagatttgagaatccagctccttccattaactcagacatagatgaggtttgcaaaaatgtaaaaaaatgccattcttctcactttttttattttagaaaataaaacagttttagtttatttagttttcaaaaaaaatgctatttatgttaatatgcaatggcattgttattcctatttaaaatgaattactagacactttaaaatattctcacctttaatttaaagagagtaaatgttgataaatataatcagcacaaacaaaagttttttggagtcttcaataattggaaaatgtgtaaaggagtcccaagaccaacatgtctgagaaatcagtgctcagtagcaagcctatctgatgtcccaagaattagagatgaaagaaaccacccagcccctttgaaagataagtgtctatttcagaatgggatcctttcatcattttcaccatttcattatgctaatagtatcatttcgttattttacttgaagtacyacacaacaktaatttaggttggttgtgatgccaagttcagtggattgggtgtgtcccagatttgtagaaaagaacaacaaaaaatcagccagatatgatgtaacattatctgttacactgtgtaattactatagcttcaaaactgcagccttggaattctgagttaagggaactattagtcaaataasstcacgcctgtaatcccaacactttgggaggctaagtcaggaggatcgcttgaggtcaggagttcaaaagcagcctgggaaacatagtgagacccccatctctacaaaacatatatatatatatagctgtgtgtgatagcacatgcctgtattcccaggttttcaggaggctgaggcaggaagatggcttgaaaccaggagttcgaggatgcagtgagctrtgatctcaccactgcactccaacctggatggcagaacaagaccctctctcaaacaacaacaacaacaaaacaaaacttcctgagagcttggtcaggaaagatggagatcatgagtgtatctgtgcttcacttgatctttaatggccggagcaccccaggactcagtgctgggttctcttcttccttctgtcagtactcacacccttggtgatctatcccctggcagctcccgaatttccatctccagccaagaccttctctgagctccaccrtggatctgcatgcctacctgacatggcccgtggaggctcacaggcactccacaactcatgcaccaaggcagaaccgaaatcctgccccttgcctcccttcctgtcagtggttcctttgtctttttcttgctgggcccrgaggccttggcaccctccttgcctcctccctctccccaagccccacatttagtcagcatatcgcatgggtttcattttcaaaacacacccacaatcaacacagttttcactctctttacaaacaccatcttcatctgaattgccaccttctctctgggattattgtggagccgcctgactgacctccttgcatctccccttgagtacttctctgttctcaacagagcagccagagtgtcccatttaaaatggctattatgccactcatcacggagtagctcacggtggcttcccattgtccccagagcagaaaccactcactcgccctgctcaggcaccctggcctccttgtgttccttgaacaccctgggtgtgtkcccacctcagggcccttgcacgggtctttcctctgcctgaactaatgctcctccccctgataccctgacagccactctgtcaccctgttaaagcctttcaacataaccccatttaaaatggcaacccccattactctctgttcctatttccttctttattttgctccactgttcttatcaccttctaatatactatatatggtatgttactgttttgtttgtataatatatatagtatactatgattttgcttgtaattttcctaaatagtgttctgagagtagaacttttgatgtctcgtttgtcaacgtatcctcattttcaaaatagcacatagtaggtgatcaaaagtatttgttgaatgaatgaatgcaagtgaagtaactgaggttggcaggaagtggtgaggcagtggctgagggattggaacccgggctgagagtctagaagtgtgagttctgacctcagctctactgtttactagctgtggacacttgagcatttcatgtgtcaacttataaatatttattgggtactcttgatgcttctgtgcagctcctggggatgtagcactcaacgtrcctgagtctctattctcctgaagttggtgctcagtccagctttsagattcacattcctcatctacaaagtggcgattttatagttacttcttggcattatcagagatgatgatgatggtgatgataagaacagtaacaagagcggtgataataatagttacaatgatatgcagtaagtcctcacggaacatcaataggttcttggatactttgactttaagcaaaaagaagcactgcatgctgtaggaacttagctcttgtctgtattaactagcctatggtaaaattggttttgctatacagtatgccatttggcttaaagtcacagttgccatgaacctattgatgatgttaagtaaggacttactgaatggcaatacatagtaatatgtagtaataatggcaataataacaattgtatatttgctgtgtatttactctgttggtaaatactctgttactatgctaagctttacatttattttctggtttaatctttcaaaattccttatgaagaaggtataacattcccattttacagatgaggaaactgaggccacagtgattccaggtgaggtgaagatgtccacccagacttgtctaacccaaagcacttgctgtcggtgtctaggctctacaagaaagtgcttcatgaacctgaacacaagatttctgtgcgaatttatcatcccttcttcttacaaagagagaagaggcaattacaaccatttcccagatggtctaaaagggcactgtccactacagtagccatgtatggctaaacttaaacatttcatatgctcaaatggccccatctggctagtggctaccatattggacagctcagattctagaccattttcatcaatgcagaccattctactggaagttgatcagaaggggaggaggcagtggagggttagcagagaccaggcctctgggccattctttcgcaatgtctattgagggccttctagatgccaggctctgtcctaaatgcttgaaatataacaggataaggcagaccaagacctgcccctgctcttgaggaacctgcattcttggagcaggaaaaaggcaggaatcatgttactatgtggtgtgtccactggtggttggggctgwagagatgtacacagtgggcagagtggtctgagagatgaggggcactcatgatatggacaggatgggcagggaaggtgctgwaaggaggtgacagctgagcggatccccgaatggagtgggggacgggcaaggccttgtttctggccaggactcckacagttgttccgagtaagatgggatgctgtggatgggctttcagcaagaaagtgacccactctcatgtttcctttccaggcacccccgtggcaggggtgagaatagatggcaggcggatgtgtgagcaggaaagtggcaagcaggcaggcgggaggccagggggctatggaggggagctggactggggaggtaatggtgggctactgagaggttgctggattgtggatgttttttcaaggtagagccagtggggtttactgggattggttctgggttgagagagagaaagagaagaatcaaagacaaatccaaggattttggcctgagccaataggagaaaggagatgccactggttaatgtgcagcagcctcaggttggaaatcactgctgttgagttcgacatgtctcttaggcattcaagtctggatttgaggggagaaatatgaactagagatttacatgggggaatagtcagtgtataaatgacctttaacatctgagggcctggatgagctcacctcaggaggaactctcgactggaaagagtgccctggagcaaccccaggacttttgactaggagaggaaaagatccaacagaggaggccggacaacgtgtggcctctgtaaaagggaaccaggaatgtgacccgaaggtcaagggtggagagcatttcaggaagggagaaaggggctcaccatggtcggcagaataatggctccccaagatgcccacgtccagacccctggaacctgtggatatgtcaggtttcatggccatgggaattgacattatacaaggaattcaggttgctgatcaactgatgttaaaataaggaatatattcaggtttatctgatggttccagtgtaataatcagggtccgtaaaagtggaagaagcaggcagagaagagatcagaaggagatgtttgaaggaggtcagagagatgcaacgtgagaaggactcagctactgctgcctttgacaatggaggaaggggccatgaacttaaggaacgcagcagtctctgaaagctggaaaaggagaggaaatgggttttcccctggagcctccagaaaagagcacagccctgccaatactttgactttagtccattgagacctgtgtcagacttctgacttctagaactatcagagaataaatgtgtattaagccactacatttgcagtgatgtgtacagcagccacgggaagctgcaataagcacatatcgaatggtgctggtaagtgtgtgcgatgaggaggactgatcattaagtggaacgttggagtggctgtggtgacctcgacaggagctgtgtcagcttggagagagggatgacagggaggggcaggctggccattggaaggtgctatcggctgcacctggcatggtgcctatgggagcggttgcccagagtggctggagtccccagagaggtacctccccaggctggggactttggtgaggacaagaatcagagatgcccagaaaccagcgagactgccctgggaggcctggcccagggttctcatggaggtcagcctgggtcctttgctccctgggaacctgccccttcctcctgagtggcaatgtccactggtaaggagagctttgtccctgggtgaggtcaggggccaggtctgctttgcctgacatgtgatccctagcacagtgcctaacaagcagcaggtgctggttgaaagaatggatagaaagttccaggggacagaggttgtacaaacgtacatttgtgtggagttcggtgcaccatccaatggatgctttgccatccattggcaaatgttcatatcagagaccacatggatgtatttgttaagtaatagactgtaatttttagaagagttttagatttacagaaaaatcgagcacatagcgcagaaagttcacatatacctcctctgcccacacacatacatagtgtcccctattattatttctttatttttatttttattttttttgagacggagtctcgctctgtcacccatacctgagtgcagtggcgccatctccactcactgcaacctctgcctcctgggttcaagtgattctcctgcttcagcctcccaagtagctgggattmaggcacccaccaccatgcccagctaatttgtgtatttttagtagaggcagggtttcaccatgtgggccagactggtctcgaactcctgacctcaagtgatcagcctaccttggcctcccaaagtgctgggattacaggcgtgagccactatacccagcctattatttattattaatatttattatttatttttttcagagagggtctcacttcgtcttctgggctggagtgcagtggcatgatcatagctcactgcagcctcgacytcctgggctccaagtaattccttctgcctcagcctcccaagtagctgggagtataggcatgtgccactacacctggctaattttctttttttctttttttttttttttttgtagagatggagtctccctatgttgtcctttccaaggctgcataatattccattttatggatggaccgcatttagcttatccattcatccattgatggacatttggcttgcttccacttttggctattgtgaataatgctgctgtgaacacagatgtgcaaatacctcttcaagacctggctttcagttattctgcatatatgcccagaagtggaattctgaatcatgctgctttactctttttaatagctgcctggtactccatagaatgtttgtaccataatttactattttaaatagaattctttacgctgcccataacataacataagctccgtgtgaacaaactgaagccagatgtttggctccatcaatggggaatgctggggtgggtttggtagaagcctgtctggatcgagctgcacccattttccctcttcccacacctcttgcctgtctctgccactgtctctgcaatttccatcatttcctccgtgtccctccaggagtctccatctccgtgggtgggcctcctccacacctttgggggaaaatcagcctccagcccagctggggttacatcaccccagcagaactgccccagccagggtcctggaggcctgtaaggactggggctgaaacacacagacagtggccacaacagttgtcccatcgatcctgtcccaccttatggtttccgtggtgtctggcccgcgtgagagccatgtgaacagtagccacatggactagtcattggaactggacccaaagccaggcctgagcatcccgctcaactcacatacacatcctttcttcttccattacacagaaaccagccgttgcgtgcagggtgagcacatgtgctaggccaggctgcttgcgtgccaggctctggagtgagttatctcattactgtagactgggggtagtgctgtacaatgagtataatgcttcatgcatttctatagggactacttgtacagttcactcagtgcacatagcgtaagcactggcacatggagaaggttccatctgggagagcttttactgttattcagtagagaggtctgagtctttctagagcccagtgattcataaaggtaaattggaagggtttggccaggctcagtttagacaaattttcatcaccaatgaggctgagcagactcggaggaggctttgaggtcacttttcagaagagggatctgaggctcagagaggctgagagacttagccaaggacacacagtgaataaatggttccagctagagtccagttctctccactcctcatctagtgtcttatctaccaccctggaaacttgcaggatcttgggaattcgcaggctgttggcttacccagggtccacagagttgatggagggcagggctaacgtttgaacccaggtctgtctgatgataagacatttcaatcacatggtgcggcctcccttgacagctcccagaaatgcattcatgagggcgctgattctctccctgggaaagagaagggaattctttactcagaagctgccgggaatggccgacttagaaaagtttacttcacacttctggatgaaagtgcaggtccttggccggacgcggtggctcacacgtgtaatcccagcgctttgggaggctgaggcaggcggatcacgaggtcaggagatggagaccatcctgactaatatggtgaaaccccgtctctactaaaaatacaaaacaaaaaaattagctgggcgtggtsgtgggcgcctgtagtcccagctactcgggaggctgaggcaggagaatggcgtgaacctaggaggtggagcttgtagtaagtcgagatcgcgccactgcactgcagcctgggtgacagagcaagactctgtctcagaaaaaaaaaaaaaaagtgcatgtcctctccatgtgagtcatttacaaagattatttattatcacttctcagaagtatgtgttccattaatgactttgtgtcttgaattttttaggacttgccctgtatgatttggcccaaagtggaatgctgtcactttaagactgcaggtgagtttttcttctggttgatgttcccctgttttgagcatgaaaaaccagaagcctgaagccctccttcctccagctccctcactctctgctgatccttccagcacctctctactttgggcaagtagatcattccctgaccttacagaactagggcagtgtacctccacctcaaagctggccgaagcgttagtgcacagtggaacctagggtgaggtaggcyctttttgatatcccctgaaggcatttggtgaatgaaacagaacgtgtgaattaaatgggtatatcagtttcctgtggcttccctaacaaatgttcacaaacagtggcttcgaccacacacgtttattctcttacagtactggaaagcagaagtccaacatcagtttcactgggcaaagtcaaggtgtctgtctgctccctctggaggttccagaagcgaaaccaattcctctccttttccagcatctatggccgcattgcctgcgttccttagggatggattagggatactgccctcctccattttggaagctagcagcatggcatcgtgcctcagtagttacttggccttcttctcttctgtctgtcaaatctctgtctccctcttataaggacatctgtgatgacatttagggcccaccaggataatccaggcaatctccccatctcgaagcccttaatggaatcacatttgcaaagtatctgagaccctaagataacattcacagcttcatggggttaggacctggctgtctttgcggacctttattcagcttgccacactcagtggtcgaaattcaactgacactcatttcatcaagaggaattcattggcatctgtaactgaaacgcacaggccctggcactgctggacccaggagcacaaggttctcaatgctcctacggctctgcctttctccttccctctcagccgccctgctttcctctggtgagcatctttcacaggcagttacatcctttccccatggtgggaaaaatgccgcgggcagtccctggctcctgagcctcatggctggcacctgcagcgcagacttcccagcggctgtgacagttccagtgcaggcccctgggctcagcgtgggtccccggcctgtccctgaacctatccctggggccactgggtggggttgtctgggttctgtgcctaactctggtgtcctggggaatgggatgggctgggattcgggtgggccccacttggctctgtagactgagcgggattcttgctgaatagaggaggggtcctctctgaagggagggatcactttggagtcttcattaaagctgaggaccaggagagccagagaggcataaacgggtggaccagagatggagcgcttaagggtaaggtgtggccttaagactttatgtcctggttgcttgctgcacaagcatttgtgccctggcccagggtgctgtgctggggtccggagatggatgtccggtctcacttgcacccatatgctctactcagacattcccgatgctctgaatcagccgctcacctggtggagcacccacttgtttccatggcgagggccatcagttccccgatgcttgatgcaattggagcccttatcccatcccaacctgaggaactgaatcacccccaaatacaacccaaggaaggaaaaaaatactgtaatttaatccaggacccagctccacatctttttttaatcagattttagtttttttcctgcatatattttgaaattctatagaaagtttcaaaagcacttgtagtctttaccatcaatatgctgggtaagaaagactgaaaagtacaccttattttcagtcaaattagtttgtatttgaataaaagacaaatgttgaagaaggcacaatgccaccatccaggtcatttcaaaactaaaattgctgacttgaagcattggatacatctaagcactttcatgtgcagtgtggcatttgattggctgctcagacaacagccctgtctgattggtatcttaaccacacacccaggtgaggggaactgaggcccagagaactcagctgacctgtgcaaggtcccacagttgatcagcacctgggccgcatccactgaagagggaccctgacagcccagcccggaccttttaagtgacattcctgtgctttgcacacaatgctcatgaactttccaaatgtattgacacagagaaaaatctaagggagtcatttctttcttcttttttttttcttttttttttttgagatggagtcttgctctgtcgcccagactggagtgcagtggcatgatctcggctcactgcaacctccgcctcccaggttcaagcgattcccctgcctcaccctcccgaatagctgggactacaggcgcacaccaccacaccaggctaattttttgtattttagtagagacggggtttcaccatgttggccaggatagtctcgatctcttgactttgtgatctgcccgcctcagcctcccaaagtgctaggattacaggtgtcagctgcggtgcctggcccaggagtcatttcctattggagggctcagcaggygtttgtgtctggccgtgcacacatcctctttaggatggtggttggtggtgttcactgagggcttactctgcagtaggcgggtgcccagaaggacctagtgaggtgagacctatgctgtttgccttagaattaagcaaaccgaggtatagagaggttagaggttatgcccaaggactcacagctggaggggcagagccaggactcaagcccagggctgtctaatgtcatgtgtgtaagaatcaacccaggcatcattcttgcccagcagttctgattcctaggtggggctgcacaacccaggtaaggagacgaggctttgaaaaatgctcttcttaagttctgtagcatcccagtgagcatgtctcattttcctggcagagagatgatatcattcattccttcattaacttacttacccaacaaacgtcttctaagtaccttccatgtaccctgtagtctgtctctagaggttaagttctatgtcttactgtctttccgcattatataaaacgggtgtgttgttgttttgcagtggaagcaccacttggaatgaaattggacaagaaaatggaagtcttcatcccactctcaacttctgcagcctctagtgggccatgggctcattccttatttgcttttataccctcctggcctaagaagaacttatttaaaagagagtctcctataacacaccgcctggtaagtattaagttcaatgctttaacacaaataccagaagttggaaataaaccaattatggcctgtatataaaatggcacgggtttttgttgcttaaaaaaaccctattcctcctctttcactaaatatagttatcactgggtagcaaatccatttatttttccaaggtgctatttctgctacacaacatacagtatttagatggagaggaggtttgactcagcattaggctgcctcatctggtgtttctgaagcagggattggattgtgctttaaccagaccgagtgactcccagctattaaagatgactgtgcccataatagcagtgaacatttcacaagcatttactatgggtcgggcrctgggtttagcactttctatgtataatctcacttgagcctcattatgagtttcttaaacagtaatatttttattctcattttacagacgggaaattgaggattagagagattaagaaactagttccatgtcccacaggtagaagtggcagagctccgtgctcttgctgttgttttctattctgattttatgtaacgtgggttcagtgacttaacgtagtatgagaactgttgagcttggccaatgagctacratggccaagagccsttttttgggctccctgctaagtagtgatgttaatttcctggggctgctgtcacaaatgaccacaaacagcatggctgaaaacaacaggaatgtattttctcactgctggggaggttagaagtctggaagcccggtrctggtggggccacgctccctctgcaggctctaggggagcatcctcctccctcttccagcttctggtggctccaggccatccttggctgtggctggatcacttgactctctccctccatctgctcttggcctcctctgtgtctgtgtcttctctatgtgccacttataaggacacttgtcattggatgtcaggcccacctggatagtccaggatgatctcttgagatccttagtttaattacatcttcagagacctcttttccaaataaggacacatacacaggttctggggatcagaacacagacatatcctttggggttcatctctgaacccactacagtactcattgttctttccagtcctctccagttacaggtaactcgtcacctcacagggcagcaccctccatactcagtcgtcccttctgcatttatttgctccacaagctgtatttatcagttattgtttgcaagatgctatatgaaggtcagaagagaaagccaggtccctgcttgagggctttggcaaattctcttagggtcccagcacgttaaaaaggcattagcgggggtgtagtggatggaagctcaactgaatcagaggcctgggtcaggctgatgctgttgcatattgtccgcgtgttctttggaaaatggcatttttgttaattttctttytttttttttttttttttttgagacggagtctcgctctgtcgcccaggccrgactgcggactgcagtggcgcaatctcggctcactgcaagctccgcttcccgggttcacgccattctcctgcctcagcctcccgagtagctgggactacaggygccygccaccgcgcccggctaattttttgtatttttagtagagacggggtttcaccttgttagccaggatggtctcgatctcctgacctcatgatccacccgcctcggcctcccaaagtgctgggattacaggcgtgagccaccgcgcccggcatttttgttaattttctacacaatgagagggttacactgtggagagggaatgcatgttgtggaaagatcacaggatttggagtcacacaggcctggggagagtctcgagcttcctgcctgagtaatctttggcaagagtattaacctttctgagtcttagtttcctcatctataaaatgggagtaatagaactcatgtatgtaaagtgatggctgccatgcctggccctcagccaatgacagacattttatggttattaggcccagtgtggtggctcacgtttataatcccagcaccttgggaggccaaggcaggaggatcacttgaggccaggagtccaaggccagcctgggaaacatagcaaggccccatctctacaaaaataaacaaaataaataaaaaatatacaaaacatacgattatgaatatcactgagagctgccagagtccgtgactcagaatacagcttgttccactgcaggtgacaggtgcgcaaggcagagagtgggaaagatgtggtcatcacagcaaggagagccaaggagggcttccttgatgcagtaagggtccagtcccatttaaaggaggtgtgtggatactgcagggccctggggcagggagcatggcaagagcagaaatgaacagatatttgttattagtcaaacggaaaggaaacctgcggtttcaagggcaacaggaggcttgtgtttgatggatgagccctggctttcctttggaaccttttcgtaggagccattgcagggctggaggaggccaagcattggtggggggattccttatgttgatgagggatcaagctcacagagaggctgcccccagcccccagacacactgccctttgttccagcgcaccatggtgcacaggtgtactgtcagcccacacctggtaagcacacggtacatgttaaatgatatcttcactgctctgcccacrtcccccttgctggtatgtcagtcttggttggctgagccctgtgacaacaggtgtcccacacttgcacccagaccaggaatacactgtggtgtaagctcatgtccacattcttctttccataagttttaatttctaatcctttaatgctcttttaaaaaataagacttcaagattacttaaggattagtagcagtaatctttctaccctctgtaaaaatttcattatcttgtacttttattaaatatrtatagcatgaaatatttctcattttctaataacttttacattttattgtagtatggggacatttcaagagaagttcaagggacttctgaaaatggagtaatttttcagaaatgtgcactggtaagtttccactggtggtgtatatttgaagagaaaataattggattttgcccagatcattttattagagtcatgtatttaagaactgataaatcatgggcttacctacacaagtctagacacatgagcaatgaacaaatagcaaggtctgtgatatctcatatggcaatactaggactgagattatttttgttacaattaaataattgtcagtaaaaatccacagagatcatttagaatgggaaaaaagtctgatatattttgtttcagattataatcattaatagggtacctgacagttttcaaagttgtttaatgttttttaggtctttaaccttcctaatcctacaaggtggttacaatcccacatattatccttgtgtsaggggtctccagcacctgccttagggtcagtgatttgctagaagtacttacagaactcagaaaagccattctgctcagttacagttcattacagagaaagggtatagattaaagccaggaaaggaaaaaggtgaatgtcgcagagcccaggagagaccaggcatgagcttccggctgtctctcccagtggacagagcttagttctcccagcaataatgtttgacaatccggatggaatattgccaaccagggaagctcactggagcctttgggtccagggtttttctcaggctcagtcacataggcatggagcacccatgagactgacctcagttactcgttctctagcccctccagaggtcatttcagtacagcagggtccaaggcacccatcacaactcattggcatcagctatctggtgaggtcaaaggacccaggcatattaaaaaaamaaaamaaaacaacaacccacactgtaatcaggcaaggatattctgcaggctttagaggttatctttcaggagctgctcaagggccagtcctttctcctgaatgtggagggtttggacagcccaggcctgctgagttaagcctttcctgtgccaccctcattttatcacaggccctcaactacattgtttgccttcctggatgcaatcagtgttagtagtttcttgtatatccttctagtgactttttctgccatatgcatgcagttataagtgtgtgcacatgcatgtatacatagatgtaccttctttctcccccactttttttcacacaggtggcagtatattacacacacagttctgaagctttcttttatcacttcttatattccagagctcgctcatctcagcacacacattgcttccttctcttttttctggctcctgcatgtatttcagcagagctggagagaagctggtgcaggagggctgggagacaagattagagaggaaggcagggcaagagtgcagagcccaggtgatgagcctgttgcatgggccgctggatggcttctggcagtagagccactgagacatgtgctgggcagagcctgaatgtgggagatgatccaagaggcggacgagcagctcgggtccttcctggagatcacatgaccatcagagaccctgggctgaggctgaatcttcaaaataactaagtaccaaggagccattgtttgcttggtaacactggttatcacaatttccccaacctgactggttctgcacttggagatttttcttctaagattctctgcaaggatgatttcactgcatttcagcatctcagtttctttgaaactgtctccaagcaacagcttgggaagtgtgggtcaaaacctcttgggggtctttgaaatcatactgagactgataaattcccagaccctctgcgagaccgtgctaccctccttcttcctggatgcctaatgtgcacaggctgggctcatgccccattttaggaagctggacttgtcagcaaatctgccctcatgccttctccttctgccctaggtgtctgggtcgagtgaagcacagacagcccgcatatggctgcttgttaacaacaccaagacaacctcgtcagccaacctctcggagctgctcttgctggacagcattgctggtctcaccatttgggactctgtgggaaacaggacctcggaaggattccaggcttttrgcaagaagtttctgcaaggtaacagcaaagcgttctgaagtcagggatgacaaatgagaatatgtacagatacttccaggtgaatgtgttctgggtcaggcatgttcttaaagccttacacatgttcactctcctaatcctcacagtggatcttactatcagggtatcaaaaaaagagaaaagagaccacattcaatatctgtaaccaaaaagctgaatttctcatttatcttagagagatgttggatttggggaaagagttgtgggaaatttttaaaaatacatagtctatttttattatgaaaaatttcaaacatacacaaagatagagttgacagtggaccccagtatacctgtcactcagatcaccaaaattaaccatcactcaggaagatgaagagtttgttttgggttgtgccggacagagtgggagtgggttgacatccgtctcagtagcatgttcttgagctgtccaggtgtgttcaggtgttcaagcatgttcactggggtaactccagggctgcttggttggcttgtagactctgccaccctcactggttggctttcagaggttcgtttcctgaggtgggctgttattggtcaattaagcaggtttaaraccaattctgggattcagttggtaccatggcttcagaacttagtttccctaggagggcaaagacatcttttattcttagtaggacctcatttacagatgaagagactgggactaaagtggctgagaagcttgcccgaggtcatagggctggccgctgtcaaggctgagtcaagctcaggcagtgtggctccctgtgcaccgtggtaacctttaaaccgtcatgcttctcacacgcctggaactcttaccgactccatgcctccgtactcacsgcacacatcgctcatcagtcatgctgttccttccctctgagcctagataaggcctcagaatccttcttaacacgctattattgacagaagctactagtggagcttgcccacaagtagtgacctttttgctggctctsatttaaatgatgtcataaaagttgttatgagatgtcccagctaagtgaccttcagtgctttcctgccttcaatgatataaagatgaatccgctattcttaactcgtgttcaaagcatggagcatggagccaygagcagagcatagatgcagcctcagatggacctgggtgactcccagccttgtgactgagaagctgcgtggcttctgcaaagctattgaagtgctctggttgtgcgaatatcagtccattgtggagtcgtagagatagaatcaaggagacaatgtcacccagacactctgcctggtaaagggaaggtgtccaacaccctcttcagcccgtggtcctgcacgtctctcatctcatttccccgcagacctttcatggtccatgctcctgccagacccagcttcctacccttctcctatctcctagcatctactcttgctcttgtgtgggtcaggaaagcacctctccccaactctgaatatacaaatcatctctattctttgggacctggccctggtgtcaccttttctagaaagccctacccagtcccttgccccaaagtcacccctctgcctccaaacttccacagagactacctgccccttcctgcttccctgcttggagcctagggccattctaggcactttccacacgtgaattcatggacttctgctctagcacgtgcacactgcatgtctctgaaccttggctctccatctctcctctgggcatgctagtaacacccacctaggaaggcgctgtgagggtaagggagttaaagcagtatgacgcagcccggctgtggaaagtgctcccgggctcctggtaataggaggtattttgttggtggttttttcttttcttttcttttctttttttttgagatggagtttcatgcttgtcgcccagcctagagtgcagtggcacaatctcggctcactgcaacctccacctgccgaatttaagtgattctcctgcctcagcctcccaagtagctgggtctacaggcgtgtgccaccatgcccagctaatttttgtatttttagtagagacaggattttaccatattgcccaggctggtcacgaactcctgacctcaggtgatccacctgccttggcctcccaaagtgctaggattacaggcgtgagccaccatgcccggccactgttgttgttatttttattcttattgctccmttcttgttatttatgcccatgcttakctctacctactgggctctacattccctgagggcagtgtccaaatcatatttatctgtgaactcaccgctacgccaaggaatgtgacattgattttcaccttggggcacaggtgactttttttttttttccccaaagcataagtagataactataaaatcaaatgaccagtcaggtcccagttcattgacattctgacctcatcattattatttggtgcttttcttttattagagccagtgttgtttggggaaaagatgatgggacccagagggtcaggtggctccctgtccatcagcggggtgatcctaagccagtcactgtctctcagtttcagtttcttcttctgtatgttgcagaaaatcacgtgttctccatccatctcggggcagtgtgtggagatcagctgggttaatgcaggtgcagcacgtggagagtgatgaaatcactgtatggggaaggtctgactatgacttctttccccgtcattgtcattgtcactgccattatctttatcactttacgttcattatcttagctctaggwtatataaaaataaaatgagatgagcatggtccacacctaaagtcccagctactcaggaggctgaggcaggaggatcactggagcctgggagttcgagactagtctgggcaacatagagagagcctgtctcagaaataaataaataaaaaattttaaataaaaatgaaaatgttgaggatttttaaaacaaaaatgccagtgattccttaggctaagtgagcgttcctcctcttttctttactctatatgtgtgtgtgtgtgtgtgtgtgtgtgtgtgtatgttatatatatgtgtgtgtatatatgttatatatgtgtgtatatatgtatctatatatatttttgaggtctgcatacattgagaaatgaggcatattgtggcgttttagggctataagtaaactctgttagggagaaaggcagattggaggacaagcttaggtgagaacagtgactggcagagttagacgggctccrtcacccacccggccacatcaggcgaaggcctccagtcctggtacagcctctcccgagcaggatgggctgagcacagcccacccaaacttacctatgggatgaggtgcgctgcacagtgagaaagggctaggagagccagccctgttgcgggtggtgcacccccactcgtgaatggaaacgtcaggagtgggagtccaggagtccacccagctcactctccccagcttactactcagagaattccctccccacacccagctgtgtgcaatacaaagggcttccttgctgcaggcatcactgccatggtggcctcccttggaaccactgaagccaggggccaggatgtrtctggggtgtggtggggygcagcygggggcgtggccaagccctccctgagtcacatgtgcttttctctgcgcagtgggagatgcctttgctgtcagctacgcagccacgctccaggctggagacctcgggaacggggagagcctcaagcttcctgcccaactcacctttcagagctcgtcacgggtatgacctttgttactttaatctctgtcttgccactgccaagagaggttgttttagaaatagggacacttcagacagaagacctgttagttccttccttccttcagtgatgccacctagcagataaggrcataggccctggagtctcacacgccttgccatgaactgggctyccttagtaatgcccatgtgactttgcctaagttacttaacccctctgggcctcacatgaggttatcataaggataggtaatcaatacatgtgaattctcttccctgtgtcctgcacactgtaagcaactaaccggtagttaccattactattaattttgcagggctaccataacaaagtaccacagactagacttaaaaacaacagaaatgtattgtccaggaggctggaagccagagatcagggtgtctgcggggctgattccttctgagacctgttcttggcttttggaggctgccttctccctgtgtcttcctaaggccttccctggctgcacgtctgtcctagcctcttctataaggacaccaggcatacaagaccatgacccagcctagcaacctcactttaccttactacctctgtaaagaccctgtctccaaatgcagtcaccatcctagggcactggacttcagactttaacatataaattttgggaaacacagtctggcccataacaccattactgtgagtctccccatctctcactgcccctgtggtgggttcacttacgcagtgaatgctggctggctgcctgtcctggcaggtgctgcacacccgggtacaggctggaggagatgtggtccccgacttcaaggagatcatgatgctctgcttccttttgtcattttattgtgtcttcagcctctggagaaagtcttccctattcacggacatggaagatgaggctcatagcatgactgtgactgccccaggtcacataacagaatcagattgtaccctgcagcctcctcctgaggcctccttccaccctgaggctgcgaggccagtgtggtggttctgctgcaatgaggggaaaacaaaacaaaacaaaacaaaaaaccttagataaatttagataacatgaaagaggctaaatacaagatacaagaaattgacataaaactactgggaaggacaattctctcaggaaataattcagtataagggtacaaaaatagagaacaaaggcagattttggaaaacatggataaaatggtccagaagaaatcataacaatttcagaaggcaggaaaccaagtaaattagcaagataaggtaaagtaatgataaggaaaagacaaggtaagcatcagaaagcaaatcagaaactctgaatgaaatgaaatggaagcttccatgtcctcaggcaggagcctcaggagctgaagccccgggcagctgtgtgtgttcccgggcagctgtgtgtgtgttcccgggcagctgtgtgtgttcccgtgtagctgtgtgtgttcccgggcagctgtgcgtgttcctgggcagctgtgtgtgtgtgttcctgggcagctgtgtgtgttcctggccagctgtgtgtgttcctggccagctgtgtgtgttcctgggccgggctggcttgagcagggggaggtttgtggttccacagagcctggctccctgcatgctctgggaggaccttcctcgtggcttcccctgccccaccctgaaatagtcccgcctgttactttgtttggttcctgtctgtgatattgactctaccccttaggaacccctcccccactccctcactagaatgtcagctccatgaaaccagggacctagtgtgtcctattcacaactgtgtctccagggccaaaaagagaaccctgcacgtaataggtgctcagtaacattgtgttgaatcccacttggtccatgttttctggcttcatgctaggaactaaaaaacgtaactgcatgcatgtactggagtgaggatttatgtttcacaaagagctgaagacaagctttgatagcacgctttaggctcttatctgcatatctgtgggaacacagcagaatgtactagaatgtgggctctgaacttagcctcaggctccagctcaggagaccctgagactccaaggcaccgtacgtattccaaagcagaggtaactcaagaatggaaaaggccaagggaatgaatgcctcagaggtgtctcttctttagagtcatattctaaaactgttccatttccctcctatgaaaagaggacttacggtattttgattttcgctgaagcctccatgaggttgcctgctggcccacagtggatttgggaagtcccactgcttcctagcactgctgccataacatctgtagggcatggatcggggatttgctaccttgggaggagcatagctcaggttacagaaaaatgccttagtcgcgtctgtaatgagaattacatgggttgctgagctcactgggctgcaagctctaagtcccaaggtctggttcttttttttttttttttgagacagcgtttcactcctgtcgcccaggctggagtgtaatggcgcagtctgggctcactgcaacctccgcctcccaggttcaagcgattytcctctctcagcctcctgagtagctggaattacaggcacccaccaccacacctggctaatttttgtatttttagtagagacagggtttcaccatgttggccaggctggtctcaagctcctgacctcaggtgatccacccgcctcggcctcccaaagtgctgagattacaagtgtgagccacagcgcccagccagtctggttctatataatgatactactgctactactattgctattgcttttaaaaaattttattattattattattwtttttttttgagacagcatttcactcttgtcacccaggctggagtgcaatggcatgatctcagctcactgcaacctcctcctcctgggttcaagccattctcctgcctcagcctcctgagtagctggaattacaggtgcccgccaccacacccagctaatttttgatttttagtagagatggggtttcactacattggccaggctggtcttgaactcctgacctcaggtgatccacttgccttggccttccaaagtgctgggattacaggtgtgagccaccgcccccggcctgctattgctactactgctgctgctgctgctratgttactactactacctacagccaccaatagcagtaatattttatagcattccctagtgccaggcactcttcagggttctatattacctaagttaatcttcatagcaattctgtgagttgaatatgattaccatttcacagatgagaaaacagaggcacagagaggctaataccttgcccaaggtccaactgctggtgagcagtggggccctgtatgaacttagacagcctggccctaactaccaccctatagacagcctgtcagtggcaagctattctgcctttacccccaggaagaagtatgttctcacrgtgggtcttgtcggtcaccatgcggttagacaggtggataccatgacacactttatttttctgtttcctgtatcttctcagcagaggaatattagagagcattaggaatagacccacagcgggttggggcttggagaatcaagtgcgtttgagtgagagaagaacacgtgcagtgcagtcagagcccaggattccgtctacctctgtgaaggaggcagacgctgggagagtggaggtgacctgccttggtcacaggcttggagtcagtgcccaaccccaagcgtttctccacaagggcatgctgccatgactttctctggatgttagcgaagctggtgtttggatttcacacggcctccagtagagagggagggatcctatccccaaagccccttcctcctgatggtgagaccttcacaagctctgacctgtgcagcagttagggctgattgtagctccaggcttggagggttggaaatcgcaccaaatgttatcccacgtgtcagaccccaaactgttgctgaaagtgttttcttttttccttttctagaacagaacacagctgaaagtgcttttttccataacagcagaagaaaacgtaacggtaagagacatgacatgccctgagcaccctcaggacacacctgtgctgtgtgggtcctgcctgtccttggagccatggggagcggccagctgctggccttggtcccccagttatgcgttgagactgggactctgtgcagtctctcgggtcccccgtgtgccctgaggctatctgattggtttccctggatgaccctccacctggacaaggcaggtaggccgtgggctggacaggctgaggctccacagcccgtctgtgctactgtccagtcacgctcctacctatccccagtgtttgccactaggtcaagctgctggtgacattgtgttttcccagatcttcccaaagcctgcagtctgtggggcgggtctctctgcttctgctcttcaccataatacttctccatttctgttcttcagtttaatcatttgcagctcacatgttcactcactcatgtattcaccaagtgttaattcaccaggtaacaacacttcacgtttcttaaaactgggtgccaagcattctaagcaatttacttatgtggaattatgtcatctttaccacagtcttgtgagacagattctattttaaaatctctgccatttcagatggggaaaccgaggcacattaaagtcaagtgatttgcccaatatcccatggctagaatgtcagggtccccaacacccacccccgggttcggtgattctctagggtgactcacgggacttacatatacagtcacgcgccacataatgacattttggtgaacagtggactgcatatatgaaggtggtcccrcaggattacaatgcagctgaaaaattcctgtcacctagtgataatgtggttgtgtaatatccatcgtagcatggtgcgtttactcacctgtttggtgattctggtgtgaaacctactgtgctgccaatcataacaagtctagcacataccattatgtacaaaacataatacttgataatgacactaaaagactatgttgctggtttacgtatttactatacatactttttattgttattttagagtgtatcccttccactgatcaaatccgaaataagcttacctataaatcagcctcaggcaggtccgtcaggagggattctagaataaggcattgttatcctaggagatgacaggtccatgcctgttattgcctctgaagaccttccagtgggacagagtgtcggggtggaaggcagtgatattgatgatcctgatgctgtgcaggactaggctaatgtgtgtcttagtttttaacaaaaagtttaagaagtgttttaaaaaaataccttaaaaatatagaaagcttacagagtaaggatataaagaaaggaactatttttgtatagctgtacagtgtgtttgtgttttaagctgtgttattaccaaagagtcaaaatgttaaaaaaaaaaattacaaaggtaataaagtcacagggaggggaacatcacacactgggacctgtcgggggatggggggcaagggcaattacatgtggggcttaaaacctagatgacaggttgataggtgcagcaaaccaccatgacacatgtatacctatgtaacaaacctgcacgttctgcatatgtatcccagaacttaaagtaaaataaaataaaataaaaaataaaaaattacagtaagccaagattaacttattactgaagaaacctgcacagcatatatttttaaaataaatttagtggccaggcatagtggctcatgcctgtaatctcagtactttgggaggctsaggtgggctgatcacttgaagccaggagttcaagatcagcctggccaacatggctaaaccggtctttactaaaaatacaaaaaaaattagctgagcatggtggtgcgtgtctgtgattccagctactcgggagactgagacatgcgaattgcttgaacctgggaggcggaggttgcaktgagccgagatcatgccactgcactccagcctggttaacagagtgagactctgtctcaacataaataaataaatgtagtgtagcctaagggtacagtgtttctaaagtctatagtcgtgtacagtcataccctacgccttcacattcactcaccactcactcactgactggcccagagcaacttccagacctgcaagctcgagttatgatacatttcctatacgagtgtattttttttttgtcttttgtacatatttttcttttctttctttcttttttttcttagagtcttgctttgtcgcccaggctggagtgcagtggtacgttctcagctcactgcaacctctgcctcccagattcaagcgattctcctgcctcagcctcccaagtagctgggattacaggcacccaccaccacagccagctagtttttatatttttagtagagacggggttttaccacattggccaggctggtcttgaactcctgacctcaagtgatccggccacctcggcctcccaaagtgctgggattacaggctttggtaccttttccatacttggatctgtttatatatacaaatacttagtacgtgttacagttacctacagtattcagtacagtaacatgctgtacaggtttgtagccaggagsaatagactataccgtagagcttaggtgtgtagtaggctagatcatctaggttggtgtaagtcactctgtgrtgtttgcacaattaggaatttgcctaacaatgcatttctaggaacatctcttccttgttaggtgatgcatgcctgtagttgtacccactgctatgacttactacaatgaaaagatacaaagcaaaatcagcccagggaaaagttgcatgaggagaagtttggagaaaatcacttgcaagttttaagagtcctctcccagcagtcacagaggggatgcttcatctccccagcatgagttgtgctaacacatgtgaagtattatctaccagggaggctccttagagactcagtgccagaattttcactgggggctggccacgtaggcactctctgcctggcatataccaagattccagactcccagaaggaaaggaggtgctcagcataagccacactgtttgtacagacagtttgaaaacagagagccactcttaccagaaaayagtggaaaccctcccaaaatccatgttcccagacatcagctgaggcccagccctacaggaagggctttcagaggatgccagtctctggctggagatgttaactcttttctgcatggctagtaagtggcaggaccaggatttgaacccaagcagtttggctccagagccctgctgtcaggcactggaccacaccgcctcccagagagccagagtcctgcacagaagagacgaagagaaagtacaaggctggcgttaggtgagtgttcagtttagtggggctgtcgggtgcactggtaaccagtcttctggtggtctgtgagctcctggcgggtgaggccatgtcggatttgcctgtgtcccccactgtgcggtacattgtaggtggcactcaacaggtaaatatcccgtgattgagcttattgtcgtcaatgacgatgattgctgctcaggaggaggaggtggctggttgctgtatgagtgtaataaaaggcagagaatgctcatgtaagggtatttctgagctcttccccgatgccgcaggctcacttatggatggaattgagccatgccgaggtcttccaggcttcccgtcacctgcatgttgccttcaggagaaagaggaatagttgccccctgggatgcagacctgtggatgcaagtcctggccgtggagctggggctggatttcagccacaccagcccccaggacaggcgcccccaggctgtggaccacattcagggagctccctgttgagtgggaagaggaggtgtatgcacaggatggccctatggtgttgtgtgggcccagctgactcttggaccataaggcctggctttgaatccctgtccctccactgattgcatgtgagcttgggcacgtcacttacctctgagggcctcagtttccccaactgtgaaatgagagtaataacaacgttcacttcataggatggttgttgaggtaaatggatcaagggctgtaaagtactcagcacagtgcctggcactgtgagggctccataaatgtcagctgttgtcgtcagcagtattattactattatttacacatgagaacagcacagctgtgccaagtgttctgtgatgctgacagtgaatgttttgcatcagggcctcatgccccaatgcccacgggggctrcacaggtgctataagtgtacgtcaggctcagtgcgagatgctaggaagtaatggagcgtgcggcagcatggacactcgggttgcctgtcacccaccatccccaccctcacactgaggcactacatgaaaaaaaaagaccgaagaatgcacagcgctcactgaatttgtgagtttgtgacctgaaatatagattgcttgtaccatggacactgacagcagagagagagagaactccatgggctgggtggactggcaggcttcctggaggaggaagaattcaattgggtcttgaaggtaagatttaattaaagttggggaaggggcagctgaacatctgacttctaggttaagccagtgttgactgcttgtcaggcatgaaccaaacactactcttgtatgtgacacatacataaggatgaggcaaggccgtggcagtcatagcatgtgttccagcagggctgatggcggcggggacctgcagagatagtgggattacaccagacaggtgtgatggcgatgaataggatgagtttgccaggagggtggcagcacccctgacatttgcatcaggcagtttaaaaatacaaggtaaagatgtgaggcttccattgtgtaaatagagattctgccacatttgggagctaccccattgtctccttaatttcctgttactttcctgagggtgaaactgacacatgtcagccaaggaaaatgaggccccaagaaattgtttctcattttttctcaagaagttgtcttcccctttctttctcctggatgagagtactgtctttttgagagaagataagaatcacacattgagtgcaggtctcagatggcactagatatccccttctgtgttcatcacatgtgcccatgaaagggctgggtactgtgccgggcaccaggagaacagatcacagtgttctgctgccaggatctcaggtctaatcagagagagacatttaaaccaattgttatggtaccccaattcayttagagtgcaattccaatactaattttgtttttgttgttcttaagatggagttttgctcttgttgcccaggctgaagtgcaatggcgcgatctcggctcacggcaacctctgcctcctgggttcaagcaattctcctgcctcggcctcctgagtagctgggattacaggcacccaccaccaggcccagctaattttgtattattagtagagatggagtttsaccatgttggtcaggctggtcttgaactccggacctcaggtgatccacccacctcagcctcccaaagtgctgggattacaggcatgagccacygcacccaggctccaatactaattttaatgggactttagaggggatgtgaaaaaaaatcatagtttcatctgaaaatataaattatgaacccagatgggaaggttttgaaaatgaagagtaatgtgggagggtttaccctagcagatattaaaaatattacaaagctacattaatgcagcatttgactgctacaagaaacatcagaccaatggaacaaaagataaaatctacacacacatctatcaatatgttttaaaccaacgggaggaggaggatgtatcatgcatgaatttggtaayaactgactgggtcttttgaaataaagacaaagatgaatttcctaattagattaaaatctaaatatagcaattagtaaaaagtaaatatgggctactaggatgtgatctggagaaaactggatttaggtacacatagttgcaaactttaaaaacagcactcagataagtgagaaacttggggaaatatttgtaatatacataagagacaaaagattaatgtttttaatatgtaaagagcatcttaatttataagagatggaatgccacaataggtagctatctatgatrtgagaatttcccaaagacgaggcttaggaggtgcccttgaagcacagtggcggcccgtgtcactctgtaggcaaaatcacgtggctgtgagttgcatttgtatgcctgggggcttgtacacaattgcacgttatcatttttgccttctccgtggacattcgaagcccactgaccattgccctaatctgcatttcttgttttcattactgccccagcatcctatcctttctgcctccagttttactccctacccagcccattgtccacgctggggtggtcttccctaaaatgcaaacctgaatgctttctattcttgaggggcctccattcaggatccatcaggaaagctaacccctgctaaccatctctcggggccactgggcgcctttgttttccattacgctctggttttgcacatcctgttcttagcttacctgttctttgggcaacttgtaaacctcctgctggaccctgaccagcatctgcacgctgtgatgcccgagccctcccctggccagctagttgtgcccttggctggggtcctatgcattggatcatttattaaagcctggcactgtgtgaagttgagagtattcctctggatggcacttaatacctttttgttgacatcagaatagaattgttgaactggaagagaccttaaagattatctagtcccactttctcattttaaaaacctcttgtccagggaggctctgggaactggccaggttcagaactcaacatcattgcagtcagaatcatgctgtgtgatgtgttctctactccagatgctatttgctagattgggaaattagcaaagctgcgttggtaagtgtgattgtctctgcctgtgattatcttcgagatctcactcttgccccaattgtcagctgggaggccaagggtctctttgccctcagggctgcccctcagggactgtgtgacaagggccagcaagccactcacccctctgtttcttgggtctcaagctcaaagtaaaagatttcaagtaaatgattcctagactgttccggaggaaacattcgtctcatctcccatgttcatcaagcattttctgtgtttcgaagggttgggtgggtgggatttaatataaggccactgtgggcattttgaagaaatgtcctcttcttaccaccaccctccacgtgcagaaaagttggamgaataaaatagcttcatgccgtaatcccaccagcagggagaaccattgctaacatgttcacatctcgccatccacaagactgtgaatatatttagtacataatgaagtcaaactctgtaaacaattcttcatcatgcttttgtaacttggtgttggattctgagcatttaaagcattcgttttgaaaggcctgtttatccagcatcgctcttcataaatgcagtgacagaatgcatcaaaggcatctgctcctgctaatatgtgattaaagggtggtaatygtggatgattcttttccagagacaagaaggaaagtgaggaggactctggggggtgggaagccgggataaccatctctttttctttattcttagacaatgaggtttaaggtaaagatgctctttggaatctgtacttacagtgattctcagtggaacttggctgcagcatgtttaagggaatctcagaagtatgatttacgtggggctgattctggtgctctcagccacttctggttctgaactcatcactgcagcggtgggtcccaccagcatcctgtcccccgagctggattcagggacattgttggctcctcctgtgtctggcttcttacatatacattccatcacaacactctgttgactgtgtctcctgatctgtgcccttcccaccagccaacaacagtagtagcaatagcggctcagattttctgacttctgtgtaccataaccctaaacattaggcactgtttctgtgtgtgtggtaaagtatacacagcctaacatttactgttattgacagttactacagtcaataggtgttgtgcagccatcaccactgtctgcttacagaacattttccccactccgaaaggaaacttggtacccattggtgacttcccatttccttctcccccagcccctggcaaaccactcatctgcttctgtctctggatttgccgaccctgtacatttcagataagtggaatcacacagtacgtgtccttttgtgtctggcgtctttcacttagcatcaagttttcagtgttcctccatgttgtagcatgcaccagaacttcattcctttttgtggctgaataatagtccattatatggatatacacatgttctttattcatcaggacgtttggcttattgtaaacagtgctgctgtgagcattcgagtacagatttttgttcgaatacctgttttaaattatttggggtatatgcttgggggtgaaattgctcggttgtatggtaattctatttttaacctattgcctctcagagctggggagacccagcctcccacagtgtggaaaggggtggatctaagagttgaacccccatcaaaagccaaagtccacggtccttgctggcgtgtcccgttgcctcctgcagcctcttttcatgccccctatttctcccttggcatccagatttaccttcctccaggctgaagtcatacagcggccagagttgtctttctaaaatactgatctaaccatgtttcttcatggcttaaagcctcttagttgttcccctgattcccttaggatgacacagcaaatccctaacctgctctcgaaggctctgtcaggctggggctgcttctcttgccggcttcaggccttgttcaggccagtctttctccaggctcgccctccccctggcccagctcgttctcctctgcccactggatcacctcttggaaagccttatcctgtcctttgagctaggagaggagctcccctccctcccccagttctccaggctccccagcctcagcccaggcacactgtggcatcagcatctgcctgcctgttcattcctctgtaggactgtgagctccttgagtagggcctggctctggttcctcctcgttcttccagcacctagtacagggctccagtgactcagtgaattaacatcaggaaagtgtagtgtcacatccaaacacggggtcaaacctggcagcccacttgatgtatccacttaaatagagcgtttcaggcaaacaaattatagcaaaccttggtttcttcacatgtgaaatggatgtaagaattctgcacttaaaatattgtttgaggccaggcgcagtggctgacgtctgtaatcccaacactttgggaggccgaggtgggcagagcacgaggtcaggagtttaagacaagcctggccaacatggtgaaaccccgtctctacaaaaagtacaaaaattagctgggcatggtggcaggcgcctgtaatcccagctacttgggaggctgaggcaggagaatcgcttgaacccaggaggtggaggttgcagtgagccgagattgtgccattgcactccagcctgggcaacaagagcaagactctatctcaaaaataaataaataaataaagtattgtttgaaatattaaaaagggaataaagcctggtctgtggacaaaattaaagtttgaagggattaggaaggcttttggccagagactcaggagttccaaaatcctgccctgctgctactccctcacccccaaaaggtgagctgcatactcagagtgggaatgaaagtgttaacaggggcacaaacccttgatggctcgatgcagggctcctgataaagggccagcctaggagaggcagcgggggtatgaaggccactagccccaactgctggatgtgagtcttgggtctactacttactctatctgtgaccttgggccattttaaaaacttttttctacaatgacattataatttataaagtggtggttaaaatagttcccatcacagagtattgttgtggagattaaatggattaatacatgtaaagcacttggatccatccctggtgcttagtatctgcataatacatgttctgtgaaatgacagtggtaatggtgttgctgccgctgatggtgtcatgatggtgttgatggtggtgggcgtgaagatgatggtgatggtgatattgatgatgtttatagtgattgtgatggtcatggtgaagatgatggtgatggggatattgatgatgttgataatgatnnnnnnnnnnnnnnnnnnnnnnnnnnnnnnnnnnnnnnnnnnnnnnnnnnnnnnnnnnnnnnnnnnnnnnnnnnnnnnnnnnnnnnnnnnnnnnnnnnnnnnnnnnnnnnnnnnnnnnnnnnnnnnnnnnnnnnnnnnnnnnnnnnnnnnnnnnnnnnnnnnnnnnnnnnnnnnnnnnnnnnnnnnnnnnnnnnnnnnnnnnnnnnnnnnnnnnnnnnnnnnnnnnnnnnnnnnnnnnnnnnnnnnnnnnnnnnnnnnnnnnnnnnnnnnnnnnnnnnnnnnnnnnnnnnnnnnnnnnnnnnnnnnnnnnnnnnnnnnnnnnnnnnnnnnnnnnnnnnnnnnnnnnnnnnnnnnnnnnnnnnnnnnnnnnnnnnnnnnnnnnnnnnnnnnnnnnnnnnnnnnnnnnnnnnnnnnnnnnnnnnnnnnnnnnnnnnnnnnnnnnnnnnnnnnnnnnnnnnnnnnnnnnnnnnnnnnnnnnnnnnnnnnnnnnnnnnnnnnnnnnnnnnnnnnnnnnnnnnnnnnnnntgatggtggtggtgacagtcttgtggtgatggtgatgatgaatttgatggtgatgctgctgctgatggtgatcatgatggtgttaatgaagatgttgatcatgatggtgatggtaaagatagttatgatggggatattgatgatgttgataatcatggtggtaatattaatgttggtgatgatgatagtgatggtagtgattatatggagcctccttcttctcataaaattacatattgagatcttactcttctttggtcattcttcactgaggaagaagattgaagagtagaggcattgtaggcagggcaggacctagcataatttaacaacacagataaatgaagaaaatgagggtcatgagtgggtttgccccatggaggtaggctctacctaggtttgcttgttacttggtgtcagaaagcaggaattgtaagagaagggggtgamaggtgatgggatctgcagaactggccctggtttttccctcttcctaggtccaggcttccattcccacaactgtgttgctactttaagcattgatctagaccctgctccactaaactgcccacagtacctctactcttcagtttctcttggcaatgcccttgtggcyaaaggaaagtaagatctcaagatgtggatttagaaggtggaagtggaaagaggaagagatttgaggtagcctgactcacctgtccacttccacttcatgaagcaggagggagggaggcagggagacagaaggggagaaggaacatacgagagagttcttttcctggcttttacggtagagtgatgctgcccatatgtaatgtcagtcatacaactaacttctaccatggtgtgggagattaggactaaaaacattttagaaaaacatacagccccctggacagtaagtagtgtccagctctagtgggacaaacgtagacattggagtccagcagagctaattttgttttagctgtggacatcaattaattttttaatctctttgcatctccatttgtctatcagtagaacagggatgatacgtgttccacaggattacagaagattgaatgaaataaagtatatgaagcattgtgttagtgtcctcaggctgccataacaaatctccacaagcttggtaccttaatacaacaatttaattttctcacagttctgcaggctggaagtctgaaattaaggtgtaggcaggcagggccatgctgtttataaagaccctggagaagcatcttcctttgcctcttcttagcttctggtggctcagaaatccttagcattccttgaaatccttggcttatagctgcatcactcagtatctgcctccatcttcacatggccatcttttctgtgtgtgtctacaaatctccctctcctcatgaagacacgatcattggatttaggactcactgtgacccagtatgacctcatcttaacttgwctacatctgcaaagacaatttctaaataaagtcacattcataggtattggggttaggacttcaacatgtctttttggagggcacaactcaactcaactcactacatttacctagcccagagattggcgttttgttggtgatcaaaattgttaatcccctttacctctcattccctcttctcgaagatgaaaaaacaagttgttgccttctttgaagataaaggggattaaaaatcttgaaaacagattgctgatctttagctactgtgttgttttacagacagattttttttagtttcctttccatcaatattttgacataacctccatgcaatgctatttacgtttattcagcttatcgatttttttcttgtctagtaggtacacactcagggctcagggagcagagggacatgtccagaacaaatggagtacttggatttcattttagtgttaatcaaaattcaagatttaggatcaagaggatgttagagcaagaaaacagaattggttctctgacagtctctgataacagcctttgtggacagaggctgatttatcaaagatgagttataagtggcatcacactttgattcaggtttcaataagcatttgaactgaagctcctgtttttgacctaacttagctttgacagtctagaaggtcagggtggcctcattggtctgtcagaaaaaatgtaaccttgactacaatctgcaytgtggctgcaagaatgaggaataggctagttgtcttctagctcctaaataatacattcggtatcccatggtctggagccattttgaattaaactaattgtcacaggttggcttttctggagacagatgctgatgcagagtttggggtataatatgctttccattgtgcagagaagagttagcatatcaaaccgaaggctgctatccttagaaaagcttgcttacaagattgatcctgggctggtgtctggaaacttggatttcaggattcccatcttcttaaaactgctaagagtggctccctgtgcctgaactgttttttacatgtagtatagtttatgctgattacctgctgtttttcttggagtatgaaattttggtacatgccaggcacagggtgcctatgtgatcagcctcgaataaaaaccctggacactgagtccctaatgagcttccctagtagaatacatttcacatgagttgtcacaacccctctctgggggaattaagcacatcttttgtgactccgctggagtctggaagcatgtgcctggttttccttgggctttactccattcttcccttttctgactttgctttgtgtctttttgctgtaataaaccatacctgtgagtgggattgtatgcaggtggccttggggacccttggtacaatcagtgaccccctatgaaaggaaaaagaaaggagcaggattgaaaacaggaagaagttgaattgtgatttgggttgacaaaccctcagcagtctgggtgattttcatctatcaaatttgccttactttttttataatcatcatcataatagtagtaataataataattattattatctcttattacacaaataatacctactcattgtagaaatattagaaaacaagcataaagaaggtgaaaaacctcatcaagaaattacattcaaataaaattctggaggattttctttataatttacacatgcatatgtatatatgcacattatttttattttagtgaaatggagattatactgtgtgtatttctttgcaaagttacattactatataagactttttatatattattagaaatgtattcaaatatcttctttaaaatgytaagatattcagaactrtagggaaaagggagaaatcttaaaaagcacccagaaaacaaaaacagattcttctaaaaggccatcaggcacacttctgtcagaagacagtagaatggcaccrtcaacatcttgagggaaagttattttagccatgaattatgtagccagccatactatcagtcaaactgagaactaagtgacagcattgccagatgtgagaaaagagcatcttctccaaacgaacttacttgagaataaatagatacttaggatacttcatcaaaataaaaaagaattatccaagaaaaaggaagaaatgggatccaagaaacagtttttcttcaatgagtaatgctgtgacaatatagaaggcagtggagaaaaagaaaaagctctctatgataccagaaaacctagaaagtagccaggtctgattaaatcagaaagtcagagaactctgggaatgatgactttaagaaaaagtaaatttgactctctgtaacagatagtattattaagaacatgggtgtatgctaggaagaaaaaagataggccatgaaaaacttcaggaaaaacaaaaagtcacacaaggaagtgctaattcacactgaagcaaactaaaaatgtagcctgatttggaataattgataaagtgtgagaaaagggactgaattaggaacacactcctttgaggagcagatatttagtgtcacaggattggatccaattactttactctgcagtgagcaaattttgcctaatcataataatattgtcttttaaaatttgtagttgctgggattaacctataaacaataatcaggattgaattctkgttgcagaacaaaatatatatgctataaacctaaaaaatgctagaaggcagaagcagggaaggaggggcgggggtaaatgtggcccactaatctcaccagtcagaagacaagagattttctctaaatataataccgtaaaaattggggtttaattatttaatctaaagttaatagagggtagcgggaaggtgagggtgccatgggttcttcctctggcctctgcaaaattctacctgtgattctcagaaaatgtcacggatccctagtgcttcctttggattatcatgtttttgatttggaarcttaacattcttgagtgtctgtgatgtgctaggcgtgcggctggatggtgctattgtgtgcaaatcaccatgcctcaggtctttgacaggcttgtcatgcactgaggaarttcaggctcagagaggaccagcgagggcctccaggcagccagctggtagctggcagagcgagactcaaatgcaagcgagtcccctggtccctgcttggtctgctctgacactcaatcatctgtgaggcctgggagacatgctgtctgaccacacatgaatcctgctctcctcttgtctccacaggttctgccgcaccacggcctccacgcagcagggttcttcattgccttcctcctctcccttgtgctgacctgggctgccctcttcctcatggttcgctatcagtgtctgaagggaaacatgctcaccagacatcgggtgagtcttccctgagggtggtttggaaggtggtgaatgtgaggttgaagttcatcccccagttctgtgggtctcagccctggatccccatcagcattgctgagggagctgtgcacaaaaacccatgcccagggcccacctccaaaactgctgtttgtcctgggatgcatccccatcattctttttttttcttaagagccagggtcttgctgtgctgtgcaggctgagtccagtggcgattcctaggcacaatcacagaacgttacaacttggaactcctgggcttaagcagtcctcctgcttcagccttccaggtagctgggactgcasctacacaccaacatgcctggtttagtcatttttaaaacttctaagcagcaaccaggtgggagaaccactgcagccattaccccatacaaagcccatcacccacacgcagcctgtcacccacatgcatcccattacccacgggcatcccatcacccacacgcatcccgtcacccacacgcatcccgtcaccccacatgcatcctgtcacccacacgcaccccatcacccacacacaccccatcacccacacgcagcccgtcacccacacgcaccccatcacccacacgtaccccatcacccacacgcagcccattacctgagactagaattcccattcaagtagcttatgtgggaagtgatcccaggacaaaaggggaggtggtgggaagtgaggcagaaagggaaggtgtctggtaaagggtgtgtttcatcagggacctgggccctgatgggcttagtcctgccctggggcttagtcctgcccaggggctctggaggctggaaattccaccccagcctgggtgaggagcctgttgttcattttgtccctgcttcttggaggagaggattgtcatttcaaaatgaggtcagcccacagtctccttggcgggcaaaagtgagaagaaaaacgtcccatctaatcagaccttgtactgattctcccaaagctgttatcaatcagaagaactaaacgcaccctgctgctttgatgtcggagcaggattcattttccagagattaaggcagatcataagaactgcacagaggaaagcaagagtatgaatttgatttaaggcgtgaagacccttgcagtacttttttcctggcatcacagaatgaactcttctcacatttttctttatttttttgccagcatagtggtggtcagtggtctgctctaaagcagaaggcagccttcagagttggattggggtwaaaaatcaaccgggctcttctgagctgtgtgaccttcaataacgttatttcrcttctgtgagcctcagttttcctatttgtaaaatgggggcaccaacactgcgttgttgtaacagcttcatgataacacaaagaaagcactgaaaataatacctggcacagggacaagaattgttaaaggttagctatagctatgcatttttgcagagttaatgatattggagacaacacagatatctcttatccaatcagagggttgggcttatttatctctaatgtcacttccagctcacaatcctatattctttctttctttctttatttttttgagacagagtctcactctgtcgcccaggatggagtgcagtggcgcaatctcggctcactgcagcttccgtctcctgggttcaagtggttctcctgccttagcctcctgagtagctgggattacaggtgcctgccaccacgcctggctaatttttgtatttttagtagagacagggtttcaccgtgttggccaggctggtgtcaaactcctaacctcaagtgatccatccacctcagcctcccaaagtgctgggattacaggcgtgagccaccacgccccactcaatcctatattccgattagaaactagccagatctctgatgtcaaggtccatcatacctgttttgaggtttcctctacctgataatgataaagatgatgatagtgaaatagtttataggtcttacaggctgaaaagttctttctgtccattgttccactttacccacacaacatcctcatgcagggctagtagaattatgatcccatttctttgcagagaaaacagaggctcagggacattcgcaaaagcttgtctgggtttactgtggtcacagtggtggggtgattgggtgctcagactgcagacccctggccttccctcctggctttctcagcacgtggaattcacaagaaggcccaatcaattattatttccgcaattctcctgaaggtttggcagtatgagagcaagctggaacccttgccgttcacctcagctgatggcgtgaatgaggacctttcccttaacgaccaaatgatagacattctgtcttccgaggaccctgggagcatgcttcaagccttagaagagtaagaattctaaatcccattatacttacacacatgtgatgaatgttttaacgacagtgacataaggccaaatgctgagtatatttcattcattcagttaatcatttgtcactctgtagtcataattcaacaactgctatgcactgaatgtttggcatctaggaaaagaggtgtagaagacatacttcctgctctaaggaagtctgatctagtaggaaagactgaaacataaacagaagtgaccacagaattgggtgaccaccatgcaaatgggaaggtcagggccggcagagcacagaagaggaagtaattacttctgagaaagtcacagaaatgcttcctggaggaggtggcattgaactaattatttcaataattattggataattattgaataattattattttaataattatatttaatattatatttatatttaatatcaatataaatataattaatatattatattttaatataattaatctaaatatatttaaatataattaaaataaatatgattaatataaatatatattatatttaatatatttaatattaatattatatttaatatatttaatattaatattatatttaatatatttaatattaatattatatttaatattatattaataataattattgaataattagtttattcaataaactattgaactaataacaatttttttatttatttttaacttttaagtttagggatatgcgtgtaggtttgttatataggtaaactcgtgtcacagggggtttgttgtacagattatttcatcatccaggtattaagtctagtactcattagttaagagggagagaatctgaattgattctgaaagcttatgaagaagctttccaagttgattaagcgtggaaacgattttcagacagaggaaagaaagggcagatgtaaggacgtgaaaggagcaaggtgcgtttggtgagatgtcagtagccaagtgtggctgatgtgcagattggggtattgagtatagaaaataaagaagaggcagcaggggagagaggccagaccaggtgatgtgagtgtgtactgaactgaattcagttcttcttatgtagttaatgaatattaacatcatcctccctatgtgcaatagcagatagtgccagacactgtttaagaacttcacagaactaactcgtataatcctcttaacaagcccatgaagtaggtattgctctctgtaacatcttatggatgagaactggagagaggttaagtaacttgcccaagggcatatactagtaaatgatagggtcaggttttaaactcaggtcatctgctccatggtccaggcttttaatcattgcccaagatttctcctggatggacacatgggtcacagtctaatagataaccttaactagatgaggttcatcagcatggccttgtcgttccttctttcctttcatcagatatttaagatgacttctttatgttttctttaattttccgttgttttggccaaaaatctcaatcttatttttttatttactctcaaacaaaattattttgaagtgtctgactgaagacgttattatctgtaccctcgttctgtgtctgttatctagagtaccactcagtttttgatcatattttcttgtctcatatctctgtgtatttttgattatgtgctagacattgtataggaagttgagaagacaatctgaggacgagggtgatgttatcttcttctaagtggctagcaacataattatggattatattaatccagtcagagattgagatcattcaaagctgggcttcatttctcccagatcaaattcttatttggttatatctgatgatttttattttaacattctttgctttcttggtagactgctgatgattaataatggggccaaatgtgaacccttcaaattggattccatttacaggaaactttttttattctagattaaagatgtgtggctttctgcccactcactacccactggagggtaatttgtgtgaatttggaatcatcaagatgacaataaactgtaatgccttatgttttcagataaaataccttatgtttatgtcacatttagaaatgtgcacaccccttatttaatttggtgctcatgtcacgccccttatttaatttggtactgctttttggtatggcatcttattttcagtgtttgatagttgaagcagctgaggctcagctaggctgrgaggtttacccacagtgatacatctggtgagtgaagaatgggacttgagcttcctcactatttaggctcaggcacatttatattttacagacattctctgagcctagttttctcatctctcaaatggggaacccgtaacctagagccttttgatactgtcatgtgtaatgatgtgaaagagacttgtgatggggatgcatccttatggtgatagctgcctgtgagccctggtcagattagcagaccataaagagaagtggtcagggcgagtagcccttccttgagtctttctcaagagaattgaaagcatactgaaaatgggagatctgggaagcaaaactgagcagcttcctgatcctatctccctgggtccaggaagtggtgtcctgtgacacaaagaggtagatcctaggtagaaccagaaacagctctggctcatccttttcaggagcaactacttaactggcctgagagaagagctctgctaggtctgactcatgccactttgtgagctcaatgactgttctcagaagaaagggactctcctctgttttgaatgggtgctccttcctcacagagtgcctggtgaagagccaggcttggagcctcgtaagtgcagggctgaccttgcaccaagaggggagtcagggcttgttaatccatttctgggtgccagagttgtgtggcttggttaattaagccttgtgcagccatccagatgccattcttcattttcacttaactccctaatcagaatggcaaggattacaaattaaaatttgccaccttgtctgaagtagtagggagaaatggacgagcaatgggagacgaagttattggcagaggttcataaatgtcacttattatattaagtgatgtgagcagctaattatcaaatgatttcagagctaaaagtctgttttcttacaaaacatgaaaatgaaaagtagagtgaaatgatttggatcatgcaatcagcacccggatatttaatttgcaagtatgtggtactctataaccttctgactaaagtaattagtactttaaaagaggaaagtattaatcctcctgtttttgttttttattcaaaaagtgatggggcataagaagccgagtctttctttatccctacattatatgaaattataagcagctgctgcagtttgccagtcctgatgcttgagtacaataggaatgttgaagtttataatgattttgttcttgcacctctggaattatatattcatttctcttgggagcttgtcttattttgcctgaagagtgtttagcattgattatcaagcatgcacggagagtgttcagcttgtgagctaaattcattcctctcttcctctcccccagcctcccatcctccctcccrtcccaacattcaatatttattgaactccaattcagtttcaggcattgtggttggacactagttttaagaacccagtcttttttttttttttttcaattatagcattgccaattacttttaatctttccatcttgctctgtggtcctgcttagatgctcccagaaagaaaatgtcactcagaatggcaggagcttagtatgcatggaaatctgtgatacacttcccactaaaaatagcatttttctctggcaaatcagttatcgcatttgtaattctaacatgaagcttagctgggattcgaaatatgccattacgtgacttgattgccccctcatttcargccccatgagagctgtaactttgctctatcctgccgagttatttttgacaaagagcatttccgaggtgtgcgtggtggtttatcttttacattgcttattcataggctgtctcttacagagaggatttgaggaaggaatatttcctttgatttttatcaggctccttgrctgtggttataatggaggtggactcagtctcagcacatgctgggaccaggaggagggaggaactgggcaggactggctggtcctggaagcttctaggggcatggagtgccgagcatgttttagctccagccttactctgggcctgaccactgccacacacctctcgcctgcgatcttatttaattctcacaactctctcgttttagaccaggaagctggggttcagaaagatttattggtttttccctaaggtcacacaggtagtaatggatttggcttaggcctgagtgttttcaatcttttcttctactgaccgaacagctttttaaaaagactgagcttagattttttcagagtcaaagaacgtaagacaaaaaaagaagttcagacctatgtctgttttctctattattagaatgagcttaggactctttctggatgctaccaacattrcctctaaactgtctcgaaattgtgtttgtacaaagtaagtgttccatgagtatttgtcgaattgaggtttttaaatatgtgtgtttagtagttttttatgtgccaaccatatggtatatttttacaactactactctttttattctttgtaaacactttagagaaatgattttgttcctcatctctaaaaacttgaagcccagggaagttaaacaactcatccaaggttctttgttcacttgttctttgattgggttgctggttcatgcaagcagtacttttaaaaaagtaattaatggattgatgaatccaacagattcttgctgagggctccttctgcatcaagcactgtggtagatccaagactcttgtttgccggacactagcaagtaagagtcttggtttttgtccttatagagagtatacaagcaaacacaaccctgtgcactggtaactctttgattctacactatggtcagagctatgaaggggcaaggggctctgttaaagaatcttggagaggatgcttctaatggaggcttgttaagctgagagctggcgatgagcgttttggagtgggcagcaagcacaagaggtgggaagggatgtggacatttgaggacccaaaagaggaccaggccagggtgggaggtgtagagggcacagagattgaagagtcatcagagccagtgaggggccttccctacagcagcactgcctccattctttatcctgaaattctgattttcttcacaacactcaaggctgccggaaactacctttttttttttttctttttcaaattaatgttgttgtatttcatcttacccacctgagcagtaagttatgtgagtgcagggaccttctgtcttgcttgctgattcatccccagtgcctccaacagtgcctggcacagtaggtgcctctacacaatggtgttcttggtggaaagtcgcctgcagagaaaatttgaggctataaggtacatgatagcaaagattaggatgaggtgcagcattactcaaaccagaagacaacacaacatgtttccagatgtgatgtggctcttcaggctacccagcttcctccaaggatgtcctgtggctgggacactcttgcagggagattctgtttgatggaaggactggagaggagttgggccatcatctgtcatggtaggaaggatggcagagtctgtgtagatgcagcagatacgtggcttggggagggaacatgggatgaacctgtcagatgcttctcaatgaagttcaaggtgaggacagcagaggaggaaaaggtgggaatgtaaaaagtgtgaagcagtcctgaccacggggaagtggcttactagagaaacccagacttgctgagcagcatggagtgcccgtgtgaggctggtgggcctccctgcctggacgaggtgccttcccctgcagtggtctcagtggtctggatggaggcatggaggccactggcgggcagggcatagagcccagtggttaaaacccaggcctgactgctagcgttgagtcccagttctgccacttaccgtgttggtgactccacttgccttacctatacaatgggatgcagtgctgacctcatcctggtaccggaaccagagctggcctggagagcttttccaggtgagagggagagggatagggacttagctgtattagtatcctgtggctgttgtcacaaattaccgtaaccttggtggtttcatgcaacagaaactcaccgtgtcactgttctggaggccagagtcccaaatcactttctctgggctgaaatcaaggtatcagcagggccatgctcccttcaaaggctctgggagggttgttcctgtctcttccagcttgtggggcttccaaggctgcagcacttcttggcttgtggccaacttacttccatctctgcctgcacgtgacctccccttcttctgtgtgtgtgaaatcttcctctgctctctcttaggaggccacttgggactgggtttagggctcactggataatccagcatagtctcctcgtgtcaagatccttcacttaattatatctgcaaaggcccttttcccttcgaaggtcacatttccaggttccaggaattagggctggaaatctttgggtggaagtgatcgcaacatctcaagaggatgaggaaggaagtggagacttgagggacctcgagaagaagtgaaaggagggggtcagtgagttagaggactcgatggggtgtgtcagagaatggtttatgraatgttcctgaggagctgaggggtcttcttagacactggcatgctgggaacggttacctctccatcagcaatggttggtccagggctcaaacccaggtcttctgactccaaggccaggacatcctctggtgcttcctggctgtttgtggaccatttggtggagattcttaggtcatgcaagaggagactcacaaagagggaagagcctaaggtctgagtggaagcagctcttttctgagactacagtgcagcttgcctacctcccccacttccctcaggaatagggatagacatggttccttgcacatggcagatgctcatgaaatagttctggaattgaaccatctcacttcatgacctgttgtgagatattccactggaaatccttgtggggtggtggtcagttttacgaggcccataaataatgcccctctctttcccttccaagttctaagctattttgaaactgtcctccctccctccctccctccctctcttcttccctccctcccttccttccttctcttccttccattttttttttttacatgtggattaagtatttggtccatgccaggggctgtgtgtgcgtgctctgcctctgaggctctcagcacagtctgtgatgcgcgagttgtgtctatttcccatatcaaaccctgtcccttgggtggtgcaggcctggcggtaccaggtgaacctcaaccagcatgtctgggctgggtctaaagggccattaagacttgtcagaatgtgcgtggggcatttccagcagagggaacgtgtgccagaggagagactgcaggaggctggacacaggggtggtagcggggaagaggccttagtctctgaaagagggtcctcatggacccttgaatccctcctcactccagccccatgatacagataacctgtgtctaggtccctctacctttctggaaggatcagtatcagagttcacctggagcaccagatggctggcaggagcaaaggtcagctaaggtggacagcagccctgtcctcaaacctgatccttgcttctggatttcctgagaggtggcaggttcctgcgcagcacctgacatgacggggttcttatggggtttgtaaaggggtcactggagagcagagcagagggaatgcctgctgggttcccacggcaactctcgctgtcgtcttccagcaaggtgaggatttcttgaggagttctgtgtgacaaacaccttctgttctcttggcaagtgttgactgtgctctccttcagcgctaggcacgatgtaggctgggtgccggggaggaagccaagaaaagcagggagcctctcaatacccactgtctgcaggaagagaggactcgtgccgagaagcatggtgcagggtacagcgcaagatgaaaccagcattgcagtggcagcttccacccgacctgtgacactcaacatgtttctcactctgttcccaactgcttgttctgcttagttatggccataggggccygactcaacaacagagtggtctccttcagcggcctggaagtgtgtccttacacccctggacgtggattaaccatgcatggattaaccatgcacgcccaggccaagcctatgttccataggattctcctcactccaggcacagtgtggaattcagaaaacatcagcaaaactccagccacccccacagtgatgcccctgggctgctggcctgcactgccattgcccaccaaagattggaggaaacccttggaaatgcaaagaaagggcaggtgagcagagtcgccttagggaacggagaagctgactgctaggttgaaacctcaaggatgtaaatgcaagggagaggcgtctccagtgagaggtcccctctggcactgtggattccagaacccagagaaattcatgtgtgacctccttctctaaaagaggagcttctgagagacccctcaaaaactgccatctctgccgcagggcctttcctggactccagggctgactccaggcctcactccaggcctcctcttctccstataggatatataggctgtttccaacctcttttttttttgagacggagtctcactctgtcactcagcctggagtgccgtggcacaatcttggctcactgcaacctccgcctcctaggttcaagtgattctcctgcctcagcctcctgagtagctgggattacaggcgcccgccaccacgcccagctaatttttgtatttttagtagagacggggtttcaccatgttggccaggctggtgtcgaactccttacctcaggtgatccgcctgcctcggcctcccaaagtgctgggattacaggcatgaaccaccatgcccggcctgttttcagcctctcgtttcaagttcccattgcagctccagattcttggcatctcagcgctgaagagagggtgggcctcgtttgtaacaggcacgcattaaggagtccagctctactttttgtttacgtaatagattattttttagaacagttttagatttatagaaacattgagagaagaatacagagagttcccatatctcccagacccagtttcccttagtactcatgtcttatattagcatgctacatttgttacagtgaatgatccaatattgatacattattattagctaaagttcacagtctgttcagatttccctagtttttaccaaatgccccttttctgtccagaggaaaagactttttaccgtgrccttacctttcttaggggaaagagcattgtcccagctcatgagttaagagctaacctgaagataaagcagtttacaccttcccaggaaaacagaatcttagaatctggatactgcaaaggatcttagtagtcatctggcccaaattcttggctagagcaggaatagtctctggtacgcctaatagatggccaacccatttctagttggatgttgtcatggatggagagggactgcagtcccttcagggttgctgtcatgggtggaattgtgtccctcacaaagctatgttgaagtcataactccttggacagtgagtgtaaccttatttggaagtataatctttgcagttgtaacctcactaaggtgaggctattagggtgggccttgatccaacgtgactggtatattcataagaagagggaaatctggacgtagacacaggagggaccccatgtgaagagaggcacacactgaaatgatgcagctgcaagctaaggaacaccaagggttgctggcaacaccgagctggcatggaacggatcctccctcacagcctgcaggaggaaccatccctgccaacaccttgagtttggactgttggcctccagaactgtgagggaataaatgtttgttgttctaagccatctagctgatggtacttggctacataggaaagtaccctaggaaacaaatacatctccctaagccacaccttctgaaccaggacctgagagcaggcctggggagctgcatttcatatcttcaaatcattctggtcattctgatgcttaatagtttgagaacttctgcaggacagcagagtaccccaatgatgcatcctctagttggttctgaggtgagtcacaagaatcctcatctaaggctgcagaccctccctgccatctccctcaccctggggtttttatccaccagcagctccaagcccttgccggctggaggatgctcctgaggaccttaacttcctggcacagctgcctaccgtttgcatgagctgacaccttcgtctcggccttctggtctctgagctgtgaagtgacatttctgttggttgaagccacccactttgtgttactttgttacagcagccacaggaaacacatgcagttctccatctcagtgctgggcagctgacagtccccggagggtgcgtctgtccttaaccggaaatccatttatacagtgtcacatgtggtaaacatggtgtttactacaaacaacyrgctgaattgyrttgccatcctgacgcagcctctcctcacctccacactggtccctgcgtgggacttccctctccctcctggagctctccacctcttaccacctcatcaccagcacctgagtcccagccattgctatttctttcttggcctctgccaccaacttcacgtccatccctaaccgtccagtccattcacacaccakccagaggcaccttttcagtgaactcggttgggtcacatgtgctgaaaagccttcgccagcttccccctgttccctggtaaaactcaaatccccaccatggcctgcaaggctccgtgtcagatgcctaaggctgtttagcctggattggtgatattttgtgatcgcctgattataatcatcagatatatgcaaggttgtcatggataagacagtgcaacctgggacaatgatggaaattttagggagacaaatgtcagctaattatgaagaaggcctttctacttctctaagctcagctataagggsagttagcctggaggggcagctagctccccattgtggtgggtgcacatagcagaggctggggaatgcctggcagagaagatgttcagaaagcccgggtgttggttggaaaggtgacttacttagctgacatccaaggtttattccatttctaaagctacctttacattttccatgctacagttctttcctatgattgtcatctaaccttcaggtagagcacactttgcctttccaaataagagtttcaaatgttatttctctatctacctacctatcagtcattcattcatccactaatccatccatccatctacccrcccacccattcacttgttcttccacctacccatgcacccatacacctactcattccgccatccatcatccatttactcatctgtccttccacccatctttttcacccacccattctttcattcatctattcatccatcctatctactcatccacctatctgcccatctatcaatttgcccattcacccatctgtccacctatcatccatccatctgcatatccatccacccacccatctatcatccatacttcatctacccatccaatcttccatccagccagctagccatctatcgacccatctattcgcctacccgtgcattcctccattcatacatccatcatccattcatycatctatccctccgtctgtcgtctatccattcatccattcttccatctagcccttcacccatctgtccatctgtccattcacccatgcagscatccacccatccatccacgtgtttatcatgtttcccctgcatcttcttttctgtgcygtaaaaaatgatatcaagaaagacatgacagacataacagcagcaacaacaatgagaagtcacattttccagcatctgttctgtgccagagactgggctaagtgcttcgtgtgtgccgttttgagacagtaggacagatggtacagcaaggactctggagaaacatgtcatgagttcaaatcccagttctgtcatttaatagttatatgactttgaaaaaggtattttaatttttctatgcctcagtttctttacctgtaagagagatgttaatcacctaccttataggatttttttgtgatgattaaatggcgctctctctctctctctctctctctctctctctctctctctctctcyatatatatatatatatatatatatatatatatatatatatatggcgattaaaacaaagcctgatcgtaagaggcactattgctaatcctctcagtgactttcgtttgatgtaggtgataatattctcacatagccaacagggaaactaggctcasagatacgaataaaccayctgagctcatgtggttcctgaggggtaaagctgatattagaagctaagttaatgtgacttccaagcccatgcttccaaacataatgaaatatcacccaggaaaagttgattaggatatgtgtgaaagagggttaggagggaagcgcaggaaggacagggaggatttgaggcagagagaggtagtcctacttcccctttttgcctcttccagggctgasycttctgtcatagtctggccagtgggtggagtagggagtgggcagtaatatggaaatcccaggaaggaagagttagtggcatctgtctgcatctttgccccctttaaggagtagctcgaggcctggagagggaaggcccaatcccacttctaaacatagaaatctttaagagcaaaattgtcagcgaagaaagatgcaaactgctgacctcttgtaccttgcagtctaggttttacccaactagaaatttaatggtttgtcataagtcttattggtgttttgctcatgtaggtgactatttttactctcatttaacctctcattacaatttggacagcaaatatactcaggaggtatttttctccccaaatttccattgtctatgccttcaaatggatagtttataaacatgattgatggtcccagagaggaatcttgcagtattatctgtccattggaattagcttctgatgaggaaaatttcagtttcactcgtattgaatwggttttgggggtctattgtgcttacacctgctaccttgaagatgccagatttatattgtaaaaaatggctgtggtgatttcattttccttctgaattaattatccaccatgttgattaatgagtcctccttcactttctggacaacatttgctgcatgtgtgtcaaattctatcctaattttgttctgacaccttgcttgccatttggtgagaacttgattaatttttatgtgaaataagaagaaagaaagaagaattaatgtcatcttctctctttttttatcattagtagctaatcaaaatattaatcagtttttggataatttaagcagtactgtttcccttgaaagatgttatcattggcaagttttaatagcttacatttagtaagtgcttcctgtgtgctggacgtggttctaaactccagtcacttccaagaggaatatcacttgtacagtttgcatatgtagcaaaactggccagagaaaatatgttcatctttgaagcacagtgacaagatgacatttttgtgacctcaaaaaaacaaatgttcctgggaaggcagtgggtgaatcctgctaactttgccgagctgttgaggtagtaaagatgccccagactcagagcccagcatgtgtaacccaaaatgtctctgtccgcctcatgggattgttagggactttcaggggaatggaaaaatacgtgtatttcattgttgtctgaataattaaaaatggcacaatgccatagagggcaatgaaaatttaagtcttcaccagtggacctgatcctgtatggaaatgaagaattcttagtatttgttttcctctcttgcagccctttgggaaattaaaggatgagagttggcttcattagtggcatggtattttaatcgacgtagagggacattttcttgtctttgtggctttggaacaccctgacagtttttatcatcatctcttctgacagattatctatagtgattaacattaaaactgttacaataaagagtgcctctgggactgtcttcccaggcaactgggaaggtgagctgtgggccctgactctattctgcagccaatcttctgtgagagggaagaaccaagaatgaggaaactattattatttagaaccaacaaaatgccagactgtgctgtgtgccttctgtttcttctcttctttaactctgaacaacaacctatgagggtggtcctcattgtgctggtgtggaaactaaattctttatccaggccccttagctagcaggtgctttcacagcaaaccaccggtaaagcacctggtacagcacctgccattttcccaacacaagcagccataacatttgctcatgtaacttaatgaattaatgaatgatggatggagtggtcaagtaaggtgtgttagtttcctattcagctgtaacaaattaccacaatatgaatcttagagttctggaggtcaaactccgatacaggtctgaccaggtaaaaatcaagatgtcagctctagatagatcagtggggtggctatcatttacaataatctattgcacatttcagaatagctagaagggaagaattctgatgtttctagcataaagaaaagacaaatatttaaggtgatggctatcccaattaacctgattagatctttgcacattaaatgaatgtattaaattatcacatgggcccagaaaatgtatacatctgttacttgtcaattaaaaaaaaagacgtcagctttaggggacgttcccttcctggccttttccggcttcttgaggctgctgcctacattcactgacttgggaccccttcttctatctccaaagctggtgtcatcactcctatgtcggcttccttcgccacagggcgttctccaactctgacccctcttctgcctgttttcctattttaaaaggccttgttcttgatctcaatcttaaggtcagctgatgagtagccttaattcccctttgccatgaaacctaacgtgtttgcagttctggggattaggctgtgaatgtctttgcgggggcactgtcctccctgccacataaggcttcgtttaagatgtgaaatccattctgtctgtctcagagtagagaagggattttgttttctgagcttgtacaacattgattgtttagttcatttgacatttagccatacacacactgctttgaggcagctcttgtgtttctttcttgctttgtaacctgcaaagcgctcgttgcatagacacatgttcaataagcactttttgagaaaatgaaagaagcaaatgaatgagctgttgtttaaaactaggctaagttgtgtcttaaggggacggaagctattttaatctaagatggtaaaattcgagcatcaaaaagaataaagaccgcagttgatcaaaacctaccaaatatataaaaatcttccatttcatagtgacactatgcagaggcaggggtcttcctaggttcagctacacatttggactcacaggactcttacagggcacacgtggcctcatctacccagaaggcttgaggggctgcagcaccgcttgctgtgaggacagcattattcccctgtgggtatcctcgccacaggtcacacaacagcctacaccactgtctgggggggcattttcctcccaggtgacacaggtcaggtgcagggagatgcaatccatatcaagcagttgcaggagtctttctggcttaaaatatttctaccccacaggtggcaatatctcttgtaacaactcacagacrtagcttccaaggttcccgcaaggtatatgcccagttccaagagtcattttcctcagggaggtacaaagtatggcatccctgttaggtatttaatttacttaccagtcttcccatccatttgtaatttaccaatctggcattatttttaccataagccatgttgcctggtaacctatttgatgttcatcctcttagtaggtttctgagtaagagttaactaaagctcagattctcaggaagctgagaaaagttttgtaaacctttggcctcatgctaaaacataacgaaacaagctgataaacaaacaaacccaaactcattattcaccattgaaggttactatgacaccaaccctttaattagaaaattgataaaatacaagagaaataattatacatctctatgaactttatgtcagagtaacagaattgttgatgaaagttcttttttgaagaatttcagcttaaaaaatgcagaagaaatgatagacaatgtgcattttgaaacccctaatgaaatcatggatctaggtaacagttgattgtttagttcatttgatccacctccctcggtctcccaaggaaaaaaaagccattaaaaagtggacaagggacatgaatagacacttttcataagaagacatacatgtagccaacaaacatatgaaaaaaagatcattagggaaatgcaaatcaaaaccacaatgagataccacctcacacaagtcagaatggctattactaaaaaatcaaaaaatagacctggcacggtggcttatgcctgtaatcccagcaccttgggagaccgagggaggtggatcacttgaggtcaggagttcgagaccagcctgaccaacatgatgaaacccagtctctactagaaatacaaaattagctagacgtggtggcacacgcctgtaatcccaggtactcaggaggcggaggctcaggagaatcacttgaacccgggaggtggaggttgcagtgagccaagatcacgccattgcactccatccagcctgggcaacaagagcgagattctgtctgaaaaaataaaaaaataaacaggtgttggtgaggttgtggagcaaaaagaatgcttatacactgttgatgggactgtaaactagtttaatcattgtggaaaacagtgtggcaacttctcaaagacctaaaaacagaactactattcaacccagcaatcccattactgagtatatacccaaaggactataaatcattctgtcgtaaagacacatacacatgtatatttattgcagcactattcacaatagcaaagatatggaatccacctaaatgctcatcagtggtagactggataaagcaaatgtggtacatatacaccatggaatactatgcagccgttaaaaaagagtgagatcatgtcttttacagtaacttggatggagctgaaggctattatccttagcaaactaactcagtaagagaaaaccaaacaccgcgtattctcacttataagtgggagctaaatgatgagaacacatgtacacatggaggggaacaacagacattagggcctatcagagggtggagagtgggaggaaggagaggatcaggaagaataactaatgggtattaggcttaatacctgcatgacaaaataatatgcacaacaaacccccatgacacaagtttacctgtataaaaaacctacacrtatacccctgaacttaaaagttaagaaaaaaaaaaaaaaagaggtggatgttaaaatcattagatgcacggttgatgggaaatatattgcagggatcatgttggcaccacttgaacctrtggattcacgctagccttaccttatagtatggccgtaaaggaagcacacagtatgaatatagtaccattatgggggaatcctcaaaaactaaaaatagaaccaacatgtgatccagccattccactactgggtatatgtccaaaagaaaggaaatcaatatatcgaagagatatctgcattctcatgtttatcacagcactatttacagtagccaaaatgtgaaatcaacctaagtgcccatcaacagatgaataaagaaaatatggtataaatacacaatggaatgtttttcaaccataaaaaagatcaaattcctattatttgaagcaacatggatggacctagggtcattatgtcaggtgaaataagccagtcacagaaagacaaatatgacatgttctcactcatatgtgagagctaaaaaagtggaccttgtgaagatacagaatagaatagtggttactggagcccaggtatgggaaggggtaggtttagacgaaggaaaacaagaatataaataaaagatatttattaccactgaactgcacgcttaaagaaaagatggtggccagacacggtggctcacacctgtaatcccagcactttgagaggccgaggcgggcagatcatgaggtcaagagattgagaccatcctggccaacatggtgaaaccccgtctctactaaaaatgcaaaaattagttgggcatggtggcgggtgcctgtagtcccagctactcgggaggctgaggcaggagaatcacttgaacctgggaggcggaggttgcagtgagccgagatcacaccactgcactctagcctggcaacagagtgaaactccgtctaaaagaataaataaataaaataaaagatggtamattatatatgtatattttgtctcaatttttaaaggtcactcaaaaaaagaaggaaaacaaattgaatgaagatcttagatctgttagtttacaggaaatacagaggatagagagaggtacggtgacacccatggaagccactggccaaatccagaacatgggacattctgcaggatggtggcctgacttccctaacacatcaatgctgtagaaggaaagatagaaggccagaatgttctagaataaaggaaacttaactggcattatgggattttgtttggttcttgaattaaatgttcaattgtaaaaagacattttgagacacttgaggtagtctgaataatgacaggtaactagacatttcctaattattgggattgttttaatttttttttattttgagacagtctcgccctattgcccaggctggagtgccgtggtgcaatcttggccaactgcaacctccgcctcagccacccgagtagctggggttacaggcgcctgccaccacacctggctaatttttgtagttttagtggagatggcatttcaccatgttggccaggctggtctcgaactcctggcctcaagtgatccacccaccttggcctcccaaagtgctgggattacaggtgtgagccactgcacccagcctgttttaaatattttatatgtaataatgacagtgtaggtagtcgcactctacctctgccctcttaggggccccagctgggcccaagaattaaattgacatgagatagattaacaggaaaacaacatgcaaatttaatataagtttgacatgacactggagcccacgtaaggaaatgaagacccaaagatgcggttagaggtgaatggtaatatgctgagttggacaaagaacagcacgttgtgaaaaaaacaattacatggtgaggctaaagaaggataagaattattttaaccaggtctatttttatagaattatcttggtctcaacttttcatgcttgatgataagaatgttgctttccttccagtacagggatgccatccttcacgtgggaatttcatccctctgcttttaagaaacaggttgaagctcagagtgatctgatacttgctagtttgtcttttgaggtgtctttaactgaaaatagtcagtatgccagaacaccacattttggggtagtatattttaccaccctttagcaacaaggttaagtaaagtagatatgcatgtacatattcatgtagacaagttaactcgttagatagacatacacacatctgtctgtctgttgatcggtctgtctgcgtatgactccttgacagttaaagatgctcagtgaggtgttcatgggtaaaatgacagatctgatatttgctttaaattgctcaaacattaaaggcagtagagaaaacaagattggtcaatattgacaagttttgaacctggttaatgtggaagtcatatacttaagcccttgcaaattttataatagttttcttaaaacccttgtatttttacaatcatacaccaaatcaaattatcaaagatgtttgacatggtggagggtggggctaaatgtgaggatcctggtgtatggctgggggtctcttctggaaagcagtttgtctggatgtgccaggagacttaaggatgtcgctgacatctgacccagcagttcctctcatgggaatctgtactgaggaaattattgtgagtatctagatctctgtaaaaagtgatttacttcaggattgttttagattttgtaatttgcaagtaatccaaatgtgcaacaatagaagaatagtcattgaatggtggtctatcacatgataaaatattttgcaacccttataaagaagcatttagttgttaaataccactggaagatacctataaccatgttaattggggaaaaaaagaggataaaattgtacttgcatgcatctgtgtaaatagtggacatttatgaaaaaaatatgcatagaaaaaaggctggaagaaaatatgacaaaatgtcttcattaattctaattgaatgatgaccttctactataaagacgtgcagcactatttacaatagcaaggacttggaaccaacccaaatgcccatcgatgatagactggataaagaaaatgtggcattggtacactatggaatactgtgcagccataaaaaataatgagttcatatgctttgcagggacatggatgaagctggaaactcttagcaaactaacacaggaacagaaaaccaaacactgcatgttctcactcataagtgggagttgaacaatgagaacatatggacacagggaggggaacatcacacaccagggcctgtcagggggtaagaggcaaggggaggaagagcattaagacaaatagttaatgcctgaggagcttaaaacctagatatcgggttgataggtgcagcaaccaccatggcacatgtaaacctgtgtaacaaacctgcacgttcagcacatgtatcccagaacttaaggtaaaataaaaaataataataaaataactaaatgcyttcattagttctgattgaatgrtggattcacagtgaatgaatcctttttytatttgtctttgttttcagatgtatttttaccataacataaattaatttttttctatgtagctttccttcgctttatagaggtatgattaacatatcataaaattcacacagtttaagrgtacagtctgatgtgttactggaagtayatacagttttacaactaccgccagtcaggtttcagaacaccgtgactctgcgaactacctcgcattttcaagtagactttatttttagagcagtttcggatttacaaaaaaattgagaagataatacagataattcccatgtatcctgaacccaggttcccctattattaacattttctgttagtatgttacatttgttaaaattaacaaatcaacgttgatacagtgtgattatgtatcagttgttatcaaagtccatgctttattcagattttcatagtttttaatctaatgtccttttttttgctctgggattccgtccaggatatgacattacatgtactagtcatgtccataaattgatttttaatgggaagaaaagtaaaataaactttatttttaaatcctycaaatatattagctatccatttttcccttggtttccttgttgttgctgacttgttacttgttgacagaaacatgtcttatattgattatattcttttttgtacatcacatggtaccttacaratttactaagtaagagtcagctaatggccttcaataactggatgaagcagaagtgagcggggaaaggaagaaaaggaagacgaagaaagcccttgcctacacataaatgaaaacctcagagctttgaaagacctttggtttctgttgcaatttcatgtaatggaattcttttgatttttgtgtttcctaggttggagattgcaaccctgaatcgggcagatgcagatctggaggcttgtcgaacacaaatcagcaaggatatcattgcccttctgctgaaaaatctcaccagcagtggccacctctcaccccaagtagagagaaaaatgagtgctgttttcaaaaagcagtttctattgctggaaaatgaaatacaagaggagtacgatcggaagatggtggcattgacagctgaatgtgacctggaaacaagaaagaagatggaaaaccagtaccagagagagatgatggcaatggaggargcagaagagttgctgaaacgtgctggtgagagggtaagacaggtctgaaaggaaggcgttcacttccctttctctcagggatttgtcatttatccatctacccactcatctgyccatttgcctcctccatccrtctacccatcatccatccaaccacccactcattcatctattcatccttccattcattcatccaaccattcccaccgtccatccatcatcatctgtccatccacccatctacccattcacccactcatccatccacccactcatccaatcatctgtgcacctatccattcatccacccactcattcacccatctgtccatctacacatccatctgtctgttcatccacctactcatttatccaccctcccatccatgccacccatcacccatccaacaatttacccatccacttattccccatctagccttctacccatccactcatccatttacccattcacccatgcttcccctccatctacccgtccacccatctgcccattatcmctcatccacccatccatccatscagaattcatttagcaaaaatgtgttgattacttactgtctctcaggcactgggctaggcagtgaaggtatagggaacaatgagacatggttcttccattcaagaagttcataatcttataaaaaaatcagttcacgtaaaaaaatgagacattattcagtcatgttataatagaggtatgttcacaatgctgtagaattcatgggtagagaagaaaggcttcaytcatagcagagcacgtctgtagagggcatggttcacagaaagttgtgatgtcagagtccacgtgtccccctctggactatatagcctgttaggttacagttctctccagcacaggctctagagtcagaaaaacctgaactcacagtctagtacattccatctctgctcctgaaggccttaattaggcactgcaagtctaatggcaagccacctctcagggtgggtgggagaagcaatgtaggaaaagcagctgcctggcgcccatgggctgcagaaggctctcagctcacagtgctcagttggagttctcataggtcagccttgccagggctggcctagattgctcagaaatcagctcttgtttttccaaaagttgtgtcagttgctgccttgaaagaactagagtttttcctgaatataccaaatcaaacctgatttctgttttcctatgtgaaagaaatggcttattcatttcatgtgacctgagtctgcatatcytcttctgaacatctactcccctagggagggcttccaactacttaagaacaagcttctgaactcggcttcccttccgcagactgtggccatctatggatgcccctgggagcaaataagcagctctcttgttaacaactcgtgactcacagatggtcatctgtggtcagacaggggatgagcagtaaagaaaaggggcaaggtcctcgctgtcctgcctgcacctgctcccttgctcctggggcctcccttgccttcagaaccatctcattttaggttctcctgtcctagtttcctgtggctgccataataaatcaccacaaatttagtggcttaaaacaacagaaattttttctgttatataatagttctggaggccagacrtccaaaatctagttgtcagtaggatccttccatgtttggttcagcttctggtggctccgggtgttcctggggttgtaactgcgtcacttaaatctttgctctgtcttcctgtggccttttccctggtaaccctctcatctcctgtctcttataaggacatttgtcattgaatttaggtcccacctaaataatccaggatgatctcataagatcttaaattaatttcatgtggaaagacccttattctaaataaggtcctgaggttaggatctaggcataycttttttggggggtgggagtgtcaccattcagtccactgcagcctccctcaccgacactgccctgtaatgcccagtctwtgactgtgctgctcaacatcccacatccttgagccgagcccttaggaagaatgtattgaatgcactgttcggtgattcagctcctaaatgatcccattatctctcttttgattctttcctaaatctgttacaattttttttttttttgttttttgagatagagtctcactctgtcacccagatcgcagtgcagtggtgcagtcttggctcactgcaacctccacctcctgggctcaagtgattctcttgcctcagcctcccgagtagctgggattacaggcgcttgccaccacgcccggctaattttgatatttttagtagagacagggttttgccatgttggccacactgatctcgaactcctgacctcaggtgatccgcccaccttggcctcccaaagtgctgggattacaggcatgagccaccacgcatggccaatttttttttacctttaaacgtaatacatgctcaataagggaggcttcgacagtaccttaaggcagtggtcagcaaacaaggacccatgagcccaatcttacccagcttgtttttatgtggcctgcaagttgagaatgtttttttacatttttaaagagttttaaaaatcaaatacacaaacaagaatacataacagagacctcaggtgacaaactctaaaatatggccccttacagaaaggctgtctgatttcagaaccaaagctgaaaaagaaaaagccctgaaaaaaaaaaaaaagagagaagcccatcccacaactcagtggcagaggatcattcattctgcccattgttgagtttctattgtatacctaaccctggagatacagggatggctcaggcagccttcacacytgccctcagttgccagcatacattttagccttttgctttatccatttatttttataaagtaaggattatgcagtttgtatagttgtatatatgtcttattttcactttacatcacagtatacacatttgctgattttattaaatactcttaaaaaatacgatgtgtaacaataacagctcatccttccttagcatgcatggtgtgtctggcattgttccaagcacatcccattgactctctttagcgttcacaacaactcagtgaggtagggactgagaggatctcactttgacaggtgaggaaactgagctggggaaggttcacctgcccgaggacagtcagcctcatgtccagcagcatgcccccaaccactgcgcacactgccccctcctgcagtggaggttacgtccccctgctgtgcgccccatgtgaacccgtcctgtggggcacctagaatgtttctagtgsctttgctatcaaaagactgcctggggcaatgcttttttatgcggagagcatgaggataggatgctgggtcggtgccctactcccatctgtcacgcagtccctctcctcctcagggcttcctgaccctgctctctccagggcttttctgcagcctgtctctcccacccacaccaccttgcaagccagcgtgtattgggcaggcaccatcactccggatgtcctaggtcactctgttcaaagacaagcagccgccttatttgaaccaatctgtttccagaaatagtatctgagctgcagmatttaatagaactagtttccttccagtccatgcaagtgattccatctcacaaaaccacagactgctttataattatccatcatgkgktatagtcatctttaaataaaatacataaaaatattttggatgtattatwccaccaagaattagttttaaaaaagaaaagcaaaaggagcagtatcagctttcctgagtaaagtttagtacagtacagtcatccctcccttgatacccaggaagcattggttccaggaccctccccaccatcccacccccatggataccaaaatccacaaattctcaagtctctgttataaaatggtgtcgtatttgcacataacctacacaaatgctcctgtatactttaaatcacctctgttacttgtaatacctaatacaatgtaaatgttatgtagttataaatagtttgtataaatgcataaaaaatagtttagggaatgttgtttagggaataacaacaagaaaaaaatagtctgtatgtgttcaatacacacagaaatttttgacctgcaggtggttatatttatggatgcagaacccacagatacagagagctgactgtaattaatgtagagctgaaatttgttcatactataatatttaaatgcgtatataatgccttatagttctcaaagcatttctccattgagaaaccttggggagagtattgggggatataggcacagaaggcaggttgctggggtttatttcctccctcttttcctccagtaggcacgttacccagtcaccctgggtctcctttccccatccttaagacagggataatcatgatgcctgaggtcttagagggctgttgtgagtataagtaagttaattctcgtatagtacttcagccattgctcggcgctgagtcaaccttggacaagggtttattatgattcataactgaatgtaatttttaaagatgcctgtggtgtagaacacagaatgtgaactctttctacttgaaggtgggcaaaccgaagcccggaggggaagtgactggcaatccagcttcctgcatccagttcagagctgggtccttcctctggggttcgtcttctatacccaggctctccccgctgcttttctgccactgaaagaggaggcccagcagatgtcttgccctgggctgcctgaggctttctaacccctgtgtgagtctttgtcctcagcacaagaattctgacattttcaccgtttctgatggatttgtttttataaaacattttcacaatttgcctgtctttctgagtatggggagtatgacagcacagtcgtcactttcgagcgtgatttcactttgtgatgctgtagagtcaacatgcacagcagctgctgcagccagcctgatgcaggcctgtgcttctcacactggaacttctgtatcctcccttaaggtttatgccccctactccctccatgggacactccctccaggggacacttgcttttctaggtgttggaagccataggatgcatgtgccttatctccctgaagtctttttcattgagaagttcartagtgggttgggggtgagtaatcattactttcacattcctttataatgcacatttgtggccaggtgtggtaatcccaacactttgggatgccgagacaggtggatcacctgaggtcaggtgtttgagaccagcctggccaacatggtgaaatcccgcctctactaaaaatacaaaaattagctgggcatggtggtggacacctgtaatcccagccgcttgggaggctgagccaggagaatcacttgaacccagagggcggagtttgcagtgaaccaagatagcagcacttcactccagcctgggcgaaagagtgagactctgtctcaaaaaaaaaaaaaaaaaaaaaaaaagcacatttgttgacagtatttaaaatataaacttttatttaagaaaacccagatttccagctaaaggatgggaagactgagctgtgttgagtccgtattcctgcagagccctttggtggacggggtggaggctgcccctacaggcagggcgtgctctttgcactttgccccattccccagtagttcctagtgcctgtcacaccaggcagcctcactcatttggaaacatgacctcccctgtttggcaggcccaggggtgtgcctcccctgctttagggcttagttttctcatctctgccataggaggttgaactaggtcaggggtggaactcacatctgcaaggctctgaactcccttttgaagtgggcatgggagtcctgtccacatgtattttagagagtgtttcactatggcacaaatacatcattgcctcatactttattcttcggcagagatatgattctaaaaaaggcccaaatattttattttaggatttgtgtgtgtgtctgctttttatcttgcctgtgagaagctaaatggaaaytaccccgtatttcatttctattaattaaaataaattgaagtttgggacttgtcaaattctatactgtcaaaaaaagaaggtcgctttgatggatgaaccgacataactgggcaccagctagtcattcgtagcggaatgcccctgcggtgcccagactcagggtcctgacaccctcctggttgttggtgaattgcatcctttgatttagatcaagtcagctgtgaataccatttctctgtaatagagtgactcattatgtcgaatctaatcctttgttataaaatcagctttttaaaaagactgaattgttatttggtgggcaaggcaagctattagtatgggcaagggtcctgacagagttgccaagaggatgcacataaaagcctttgacttgtagcctcatggcccctgctgtcatccactaggctttgctgtgagcacctgcaaggcaggggatgccatgtgttggcccttggacctctttagaaggctctaaataatgcttgtctttctggcccagattctgaacaaatcaaacaataagtaaaagggactggagagacggagaaagctagagatcagcatgtcacctttgagagcttctgtgagttattggaagtggaggtgagcaggtctgtgacttgggaaattggggagcaagtgatgctatttactgaaaccagagaattctggtgggtgatagagcattccaaccttgtttagcctgaaggagctctggccyttgccctgtgcaccggagccccttctgccttcctcgggcttctactcagcccagccatggcatgatgccacacctgcctgcttcccaaggccaggcctttattggccatttgggatggctgtacccacgcatcctgcacgcgtaagcctttccctgccttcgcttcaccaacaagctccactgtcacwgccttgagtggtttcagagcttggagcctgaacacttgctttcaacacgcttcctcccctagctgagcatgggtgagaatttgggaaagctcttaccttctctaagcttgtgtttcttctcttataaaacggagggtgtcagttttctattcctgcctaagcaaccacacacattagtgacattgtctcagtgtccatggtcaggagtctgggcacagcttcactgtgacctatgctcaggatgttgcaggctggcaatcagggtcttggctgagctgcattctcctctggagcttggggtcctggtccaagctcattcaagctgtttgcagaactcacttctttgtgggtacaagactgaggccctcagctcctagaagtttcccttctgcggagacagtttacagcctggctgtttggttcttcaaagccagcaggagagggtctctctctttaggaaggctccaatgcttcttttaaggagtcaggcccacccaggagagtcttccttttgattaattcaaagtcaactgattagtgaccttaattacatcatcaagacaccctcagctttgccatatgatgtaaaccaatcacaggagtgacttaatcagattcattcccatgctcaaggggagggaatttatgtggcatatatactggggcctggggatcaggggccattccagaatcccgcctacccatgtggagtgaagaacagctccctctgagataatatctcagctccttactgagataattggggggaggccgtatgcaaatggatcaggagctcagtagaggtgagcttcctttcattcctcacacaagacctcatactatgcaggcatccaagcagccatttctaaagacctcttttgcttctctttacccaaaggatctccacttgggcctgattgctggtatttttctcttcagtgaagttgagaatgaaagataggagaaataatcttgtgagcctgacagcatgacccactgatagtgaagagatttccattttttgcaggctattttctagcagtttgatttgcagatttccacccctgtaaatattctgctttgagattattctagaaaacatttagataacaggggaggacaggttggaacagcatattccagggcttagtaacctcattattgtcagcttgggactgtgtgtgtgtctatgtgtgtgccttgtttttgctgtgtgtgtatatgctgtgtgcgcacatgtacttgtgccttgtgtgtgtgcaagttctgtgtgtgcccatgtgtgcrtgtacatattgcatgtgtgtacattgccttacacattgtgtatgtgcctgtgcacacatgtgcatgcacacactgcatgcgcatgtgtgtatatattgtaatgcatatgtgcatgcatctgtgtgttcatgtacacattgtgtgtgcacatgtgcctgtacacattgcattgcatgcacatgtaggtgcatgttcagtgtgtcagtttctcacgctctccctttcctctctccagtctgctgtagagtgcagcaaccttctgcggaccctccatggcctggaacaggagcacttgaggaagtctctcgctttgcaacaagaagaagactttgccaaagctcacagacagctggctgttttccagagaaatgaactgcacagtatcttttttacccagataaaaagtgctattttcaaaggggaattgaaaccagaggcagctaaaatgctgctgcaaaattattctaaaatacaggtaatacatcagcctcgctgtgatggaaaagtaatttttctgaattgtttcagtaaatgtctcctctctcagagttcagtcctgcctctcctttgtactgtgcactagtgagctttctcttctatctcttggtgtgtgagtttccagtaagcagggaaaatggtggcttggagtacaggccttgaactcgggctgacctggattggaatttcagttcccccccccagtctactgcgtgaacttgagcaagttacctcacttctttgagccttagtttcgtcacytataagatgagtgtgatagaatgcccacacycacgagggtgtgatggaaatttgatgagctgactcgtggaaagttagtgcttggcataacrtatgtttaatgtatatagcagtggaaaggaaatacaggccaggcttggtggctcccagcactttaggaggccaagatgggaggattgcttgagcccaggaggttgaggctacagtgagccatgatagcaccactgcgctccagcctgggtgacaaagccagaccctgtctcaaataaaatatacatatatgcatgtatgtgtgcatgtattgatgtatatgtagggtttagtatctgtgcctggatatacttggatggatttgtgtatttttgcatgtcagcttgagtgtgaatgttgttagtccaacaaaataatttcttaggcggtagtgaaaacagtctatctgaaactgtcagcatcactgtggaaattcttaggaggcctgtgtgagggattttacatgcacaagtgcatgcacacacaggcacacacagtgacatcactgctttacaagaatgcactttgttgtttggctccagcgctgtcactggtgctgatagcttgctctagctgatggtaagggtaattgtgagcaaactcttattttattttatggaattttctattccgactgtcaataagatgtttgagaaatgcaaatgtcattctttagacaggctgcctcatccaggttatgagccaacctctgtttctcaagcagcaagggtacctttggatggtgctggaggccttggagcagcatctggcagagtcaggtccataggggttgatttgttcctcagtgcagtaatgtgttcacggtcatgagtgcatcactgtgcttcttgagcagtgctttttctgatgtagtggacactgctatttcatttttatctttataaatgaaaatcattccagaaagtggcttgctggttaattttcccaccttgaaattccctacttgtgctagaaggacagattccacccatagcagaatgagccacatccatctagggtgaatcagggcttatgaycagcctctgttactccattgctaagacagtggcgaaagatgaagtccagaggaggtgcgggcacaggcggccttccctgcgtctgtgagcaggtcctcagcattcacccaaccactgacaagacaaaggctggccctgcccatcctctggggacctgcagctagtaccaggccgagcgcatgagggctgagacatcagggccatcccaggaggagaccgagtaatcgtcacaagcctcccattcccagaaggcacccaggacagagaacgagctcccccctccatttaatctaggtttttcccactaaatcctcagtgagcatacataaagcacaaattctgtcatattcatagcttggtattcagacgccatggcgttacttagatattcacagattcgttrtcattttactctcatgatgagcagtggctgactctcaatgccagagcactcaagttaaaaagaatgcatgctattgtgaatgatattatgccrgaaagtaactccacaggtgataacagtactgccctacaagctttcttgaccagagctatgagagtatttaaggataccaattctgaatttccttacaacatgggctcccatcaatcagcatgcatggatcccgctaggtggagagcaggaacattgctgtaaccttcctgttacacggattctggtgccagtggcccttagggagatgctagtgtgtgtgaagccacacctgactggccatgcagcttttcactgactggatgatgctaattcccaagtgttgagatgtggagatgttacagctcttatgtgggaaggggaacgtccatgctgtcctatgttccctgttgaacaaagcgttgacacttttggttatccattgtatgggtgatatttccacagatagaaaaaggacaacgaagccagtccatagagtagttctactgatgttcctggtctaattactatgcctctgsttaaagtgggatttttggaagcaggctattatgatgttagagcacaggtcctggaattagactgctgagttcaaatccctgctcagccatttgtctgatgtggactcagtttcctcatctgtgaaatgggaataatagtactgtctccctaggttgagttagatgagacatgaaacactcttggcccagtgttaggtccagagaacacacctcacattatctaggttattactctcctgtgtttggttacgttttgttcattttgtaggctgaggaaaaaccttcttgctttctttgtgcccatcctggttttgtctcctctgtggtggtgggagctccttggggttgggctgatggctgacttctcccagaacttcagcacctcatcctggtgttcagcacttgtaggaactccacaggtggaaagggagcgtgcatggatgaaggataaatggctgaattagtgaaatttatgttccgtagggcagtgaagttgttctgataactctttaccatctgggtctagaatgcacttttcaaagccctcatttcttatttgtatgtaattttctcataagcctttgttacaggcagggaggttaaaggtgttaattctcatgtttcttttcttgtgtattttcttataaaaggaaaaataatattttaaatgtctagaaagattatgctctaaattttaattaggcatattttcttgtttttttttttaattgacaggagaatgtagaagagttaatggactttttccaggctagtaagaggtatcatctaagtaaaagatttggccacagggaatatctggtccagaacctccagtcatcagagacccgtgtgcagggccttctgagcaccgctgcagcccagctgactcacctcattcagaagcacgagaggtaccactcaacactgtcccaacagtgcgaactgtcttagtctgttttctgctgctatgacagaataccacagactgggtaatttataaatagaagagatatatttggttcatagttctagaggctgggaagttcaagatcgagtgagggccttcttacttcatcataacatggtggaagggcatcatgtgggaagaagtgcatgtgtgagacagaaaaagggagtcaaacccgtgataactaacacagaaatggcattaatccattcatgagggtggatccctcatgacctaatcatctcgtaaaggtcccgtctcttaatactgtcacaatggcaattaaatttcaagttttgaaggtgacattcacaccacggcacaaatgaactgcctgacacaaaccttcctcactggagacccactactgtttattcagcgtatgtgctgactgctcctcacttattatttctgaagaagaattatcttgtaaaaatcctttgtgttacagaattttaaaagcatatgcaatagtctagacatagactgttgcatatagttgcaatagtctgtataatgagccccactcatggccagttttgatgtagctacacatctccaccccagattattttcaagcagaattccaacaacatattctggagaaatcagtgatgaggctcacatggaccatgtgatggaagagcccacttctctttaagatctagcacactgccggctctcgcattcacctttgacactaagtataaatacagrgatggttgtcttggattccaratggtttttctgagcagcacctgggatcctgtggtcaagtgtatggtggtgtcacagagttctaagtgccatcctttgcctctctgcagcattccttctcagctattctttgaggtgacttaattgtaaagaacaaaatttattcttttaggttacaaaaagctctgaaatgaatagggacatgactataaagyggctttcttatgacaatctgttgttttactgtggttccgctactaggtaaccttgttgggactttgaccctctcctgctctgtttaatgaggaytccgtaaggtgcaaattatgcaaacactccccacctaaatatgctaatgaatttatcactgcaatttacttcgcattcctgattttaatttgcactcaagtgaaagaaacagttctttgccttgaattgaagggcccaccagctggttgtgagcagtcaccagggaaagatgcttcatctcttcttttcaaattctattttaaaagacataattatatttctaaaacatgtatctactactgattccttcacctgttccttccttcaaggaacctcccttgagagtcttccctgggccaagctggggactcagcccagggatgcaggcagtctaggaatgatagtggtaatgctggtagcagagtgtactcgtcagggtactccagggaaacagaaacaacaggatatgtaaacatatagacagcatcgtttgctgtttccagcttgcaatacaaatagcttcctatataaataggaactagctcaagtgattatggaggttgagaaatcccattgtctgctgcctgcaagctggagacccaggaaagccaatggtataattcagtccaaatctgaaggcctgagaaccagagggagctgatggtgtaagtcccagtccaagggcaggaaaagatgagatgagaggtcccactgttagctgtaaggcagaaaaaaaagggacaaattcctctttcctctgcctctgtgttctattcaggacctcagcatattggatgatgcccgctcatgctggggagggccgtctgctttactgagtccactgattaaaatgctgatctccactggaaacaccctcacaggcacacccaaaaagaatgtttcggccaggcgcagtagctcacgcctgtaatcccagcactttggaaggccgaggcgggtggatcacgaggtcaggagtttaagaccagcctggccaagatggtgaaaccccgtctctactaaaaatacaaaaaaaatyagctggcgtggtggcacgcgcctgtaatcccaactactccggaggctgaggcagagaattgcttaaagttggaggggcggaggttgcagtgagccaagatggtgccactgcactccagcctgggcaacagagccagactccatctcaaaaaaaaaaaaaaaaaaaacaagaagaacgtttcatctgggccagtcaagttggtccataaaattaaccatcacacagagtattccctgcctttgcctctttgactttgtttgtgctgttcttgacaccaggatttttaatctaccatctcaccttggaaacttctgtctgcaccagagtggtcctctcgaatgttactttcttccagaactcttgccaacttccaccctaatgatgtctctcttgtgctgagctttctctgcccttactctgctagtactttagtaatatcttagctgcccattcttgtaattcttctggagggtaaagattttctgattcaaaccaaactaatatggagatgaatgttcaggcacaatagcagttaagctacaggtgagtttggagaccacattcctaactttacatcctttccatctagagcagggtacctggatgaagaccaaatggaaatgctattggagcgggctcagacagaagtcttttcaatcaagcagaagttggacaatgacttaaagcaggaaaagaaaaagctccaccaaaaattaataactaagagaagacgagagttgctacaaaaggtatataaggcatgatgctatttattctttgcataggcactttctgatacccatcaagtgccaggtactgtgccagacattgccattggtgaactaggatcagaagggcagctgggcaggcaccatgatgtgccatctactgttgattggtagcgactttttggaatgctgtgttcagcaggatgctacaattcttatccagcccaagcacagcagagggtcacaatagactagtaatgtctgcatgggcaagggaattaggagtgctggtttgagtgactaatgatgatggtaggtgctaacatttattggctgcttacttagcactgtgctaagtgtgttatataagatatcttgtttaatctgtatattaaccctatgagggagataccactgggtttgtgtgtgtgtgtgtgtgtgtgtgtgtgtgtgtgtgtgtgtatggtcaaggtcaaatatctagtaagtggcacgcatggcatgtatttggggactctaagaatatgatgaggctggagtgtgcagagggacgagggtagggcctggaagggaatgcagcagcaagtcaatgggggcatggtgtgccgtgctaaggggttaccttccatccaaggatagtggggaatgttgaagggycttccggaggtgagagagacatcagatctgtgatttaggaagctgaggtgagcaccatgtcagatggagttgaggaacctgggaatacaaaccccatgggaggctctggtacttggccgggtgcgagcggatgcaggcctaaactgacacagagccctgagtacaggggataaggacagattcagggaatgtatgggacatgcagagtgacacgcaagtagttggttgacaccatttgcagggaggggatgaagaataactttcaaatttgatcaatagaaactctgctctttactaccaagtttgggacccaacagaaagccatgattctggccttgatcactgatgcataccccatctttgccacctttgagcatcaccccattcatctctgagccactggttaagggatggaaacagtggggcccagggctccatttccttactgtcttgcctgatccaaggtaagtgtctagaaagaaggatagactccacatcctataggagattctggcagtcttctgtgaatattatttcttgcagctacttttgataaacattacaagtggcccagaattaggatgtaggtccacgaaggcaaaaacttacgttgcatccccactgttgagaacactgcctgacacctggtaggtgctcaatacatatttgtagaatgaatgaattgattctctctggttaccaggacccatgaacatgggttatggtagactagtaatgtctgcctgggcaagggaataggagtgctggtttgagtgactaatgataatggttggtgctaatatttattgagttcttaatttggaagagcatcttatgttctctccaaatagaaccgagactatctgtggacccactgttataaagaacaccataatggacatctttatgcatctcaatttttttcccaccacggggcctttgcaccaactgctttttctcccaggcaggttctttccccatttcttaacctgattcagatgagacctccttccttaggtctcacttagatcttcttccttgaaagctttgctgaccccctcatttaagttgtctctcaatgatcttagctttttgattccccctttataatattacaacttgcagatcctgtgtgcctagcacatagtaataacactaacagatgttcattggcgtaaactactctatgtcaggcacttttctaagagatgtatgtgtattaagtaactcgcataatcttcacaactcttctgaaagggaggtcctattattatccccattttacagatagggaaatggaggcgcagagagggtaaaatacctgctttgggtcactcagcttgtgagtagaggagccaggactggaacccaggcggtctgtctcctgggctttacctactcggcaaatacatgttcagtgaatggtgaacacatagggattctaccgtattttttttaaacagtaactttctagacctggcacaatggttcacagctgtactaccagcagtttaggaggccgaggtgggtagatcacttgaggtcaggagttcaagaggagctcagccaacatggkgaaaccccaactctataaaaaatacaaaaattatctgggtgtggtggtacacacctgtaatcccagctactggggaggcagaggcagcagaatcacttgaacctgggaggtggaggttgcaatgagccaagatagtgccactgcactccagcctgggcgacagaaggagaccctgtctcaaaaaaaaaataaaaaaaataaataaataaaataaattagttttttaaaaagttagcctggcatcatggcgcacgtgcccgtaattgcagctacttgggtgtcttgaggcacaagaatcgcttgaacccaggaggtggagattgcagtgagccgagatcgcaccattgcactccagcctgggcarcagagcaagattcaatctcaaaaaacaaacaagcaaacaaaaaaccagaataacttccaaatgtgagattgttggggaaaaggctataaacattctgtgcttcctgcaacaaagtgtttcagccaaaggactgtacccgccaagccccacccccacttaattttcttttctgaaactccagcacagggagcagcgtagggagcaggcgtccgtcggcgaggccttccgarcggttgaggatgccggccagtacctgcaccagaagaggagcctgatggaggagcacggtgccaccctggaggagctgcaggagcgtctggaccaggccgccctggacgatctcaggaccctgaccctttcgctgtttgaaaaggccaccgacgagctgcggcgcctgcagaactcagccatgacccaggagctgctcaagcgtggggtgccctggctcttcctgcagcagatcctggaggagcacggcaaggagatggctgcacgggccgagcagctggagggggaggagagggacagggaccaggagggtgtccagagcgtgaggcagagactgaaggatgacgctcctgaggccgtgacagaggagcaggcagagctgcgacgctgggagcacctgatcttcatgtgagtgcctttgcgggtcgtaatcacccctccccatcccgttgatgccagggagattcctgccctgtggttgtggggatggccaagcatgagacacctggccccagacagatgagattaccagcgttaattagtcatataaactcaacgccccggggggaggacctcgaatgtcacgcaggaccctacaaggattgagcagagtgcagaaccagggccatagggtttgtagtaacaagaggatgggtggcccctggcttccaggggaaaatgtgattgccttgtctgaataattccctggggttaataactccagggagctactcagggataaatgggaatgtgctggttcccctaataagaaatgtcccctggggaggggacatgatccacaggagcagagggggaaggggagcttgcggttaggccattccaggccctgctagtttcaccaggcatcaaggctgctcatgatcttgaccttcgtgttagttcttccaccacactgcatcatcttttcacctggccctttcatccctggtccatttctcgggctatgtatctttattattaattcaagagccatgtaatgacttccacttctgagtaggatgcagtggaccacacctaacactcctgctgcagtaactagaaaataatggatatgtttatttttaatatttattttttgtagagacggggtctcaccctgttgcccaggctggtctcgaactcctgggcttaggcaatcctcccgcctcagcctcccaagataaatttcacaagtaagtttttaaagacatgggagagtggtggaaacaatgaagacaagtcggagtcatattccagaggggccagtgcccacagttctttacttccctgaaacatttgccagctctttgtgcctgctgggatttggcctagcccaggaagggagccttttgtgctgtaatagagaccaacagagcttttggtggttgtttggggctggcaacagattggaaactggaggggcctctaacctagccaatgtagaatgagacatgggcaatgtagaccaaaagacccaggaccaccacttaagtttgtgcaacttgtttaacctctctgggcctcagctttcccacttgtaaaatgaagaccacaaaaactaaatcaaatcatttaggtgattttggcagtacatggcactatcaagtagtttaaatgtgaagacaatgtttatgtaagagcctgggctcatcttggatgctttaatggacataggatctgtctgcaatttccctcctcccttgtagaagttatctcctagaatcttgctggcctccatgatttaatgtcctttcctttcctacacagttttcatccccaggatccgaccttgctaccaggaaaataggtccccaggtgtttgcaaagattgatactatcttggtttgcgttaagtgacctttggccctttcccatctctctcttctgtgattctggcctcatttattttttaatccttgttagcttttgctttcttgacaaggaaaacaagattctgtcttctcttagtccataaaaatcagatccttaaatgtcatttcttattcccatgatttgccctcaacagtatttattcagcttagcctacattccagaaaattctcttctcatgttcaaactggctttggactcttcgtagcaagtgaattaactttggcattcctattaccagctggtcattttcttcaacttcgtttggattcgttttgcagggagtgttactaaagcaactgctgatttagccatttaatgggaaaaagagaactctcacttggctatcagagaagtgtatgatttttccaagggttaaagaggatcgactcacagtgtacgcaatgtgagtctgctcatatactttgcttatttaagattctaaaaggttgcagcctttatttccgaggcattatgcaaaaatggttttgcacaatagatttgaaacacatttttagaagctttccaatttcaaccaagatagggttactataaaactggttggctaaagtaggaattaatgaggaatatctttgcaagagaaagtgtgtctttgagccttctttcggaagttcctgtcttgatttcaaactccttcagggcaaagatctcgcctcctgtatttctgtattctcttggcacttacgtaacagaggattaagacaagagtgctcagggcygatgtggtttgaaagtggcaggaataatgactgagagtcatctcagagttgctttcactttggattcggcgtaatcagcaaacagcggggcaaaggccttgcacaagggaaggtgcaagggggctgctgcagtttccaaaggttgctttaaaaatcgttgggccccatgaagtgaggaacccaagacgggtgtcacatgacctgggggtcaggcctcagagygttgtcagcagagggcccccgtggtctctgaaggtctcattctctttccacgaaagacctttctagcagatccacagccccacattcccacactgagatctgggtatggtaaacctgactctggccaaccacgttgggtgttctgcygataactctgaattttaaagcatcggtcaatgctggctgcattgacagaacattaccagaacattcaaacacatctacagctaatctttgttcaacgaataattctgtccagactttctgagcagatttcctcttacatcttgtgggccagaaccagcccccttgaggatgagaaagcaattgtatggccattctctccattagagtgggctgtgggccttgctggaaaggaagagggactgttcatccatttccttgtctgtaatttggtgtaaggaacagcaatgatgtatgtcattgcatttgttttttaacactaccataacaaagtaccacaaactggtggcttaaaacaacagaaatatattctcccactgttctgaaggtaggaagtccaagatcaaggcattggcagaaccatgctccctctgaaggcaccaggggagaatctgttccataccttttcttagctgctggtgttgctggcaatccttggcattcattggcttgtagacgtctcaccccaatctctgcctccatgtcagatggcctctctgtgtgtttgtctcttttcttataaggacaccagttatattgcattaagggcccactgtgctccaatatggcctcatcttagctcacttcttaattacatttgtaaataccctatttccaaataaaccaacattcacaggtcccaggttaggacttgaatatatctttttgggagccacaattcaacccataacactaagtcactcagcatggttcccagcatggaatcgattttcactgaatgacagctgtcagtcattaccctttggaaccagtcataagggactctcatttccctgacctccctgagctgagttttgtgtgtctctcctctgtccattggtcctacatagagaatgctgctggccaggctccacagacagtgctttgtttacacgtctgtttctgaagtgagaccaggttaattgcaaggtcgtgggcactggaaggcctgttgcctcctcaaaggcaccctcacagcctggcctcattcagctctcattcctagctccaatacaatgtcctatgcagcacgacatgcattaggtgctcaaggaatgcctgtggcaggaatgcatgattaaggagccagtgctttttctgcagacatggatatgaggaatgagctttgcatctctggcttcttcaccccagcccagcccccaggctttctctgtgttaagagtgtgtctctgttcttcctcccaggaagctctgctcctcagtcttctccctgtctgaagaggagctgctcaggatgaggcaggaggtccatggctgctttgctcagatggacaggagcttggccctccccaagatccgggcccgagttctgctgcagcaatttcagactgcgtggcgagaagcagagttcgtgaagctggaccaggccgtggctgcccctgagctgcaggtaggatggacctgtcagtggccgattacagaagcagggccgtctcccagctgctggccctacagggtctggcctcttccccagcctgagcccatctcacctcatgctcccctatcctctcctctctggctgcattggtgtccagctattccaggaatctccagggctgtcccaactttaaagtctatagtggacactgctggtgctgtgccctgatcctgttgcctgggctgttgcaccatccaccagcagctgtgtcagccttgcgcagccacaatctcctgagggaagctgcctggcctgagatattactctgtctctcctgccccctcctccagccacagctaatgactgactctgggtacaaaaggcctttctatatggcatagaggagggatgctcatctcaactcaggtgggtcagggaaagaggggctcttgcacagggtcttaaaggatgatgactggtagctgccttttaatgagcagctattatgtgcccgagggcagacaactctttggtacagtttttgctccaaagcccccagggaccagtttaggctcaactttacctgagaccacagccttgcttggctcttccctttcctgtcctgttcccttgttccccaacaggttgatcctaragagacctccttcaggaaaccacctgcacctaatccctgcctcargctccgcttctggggctcccaacataagataaggccttcgaacttctgttttctctgccacatatatgctttgcaggccattgaggtctcagctcaaatgccacctccactaggaagccttccctgagcacctgtctaaaattaccctctccctaggcattctttatcacatgctgggtttcatkattttctttatcattatctgaaatgtgctggttccttgacttcccctttgtctgggcttccactaaaaataagctccccggcccattcaccactcaagggtgctaagtgcrtagtaggtgcacagtaaattttgttggcttaaacatcccaccagccaagcaccagatgtgtgcaaaacatcggggcttctcttaaagtaataatagttgagactgaaaacatattaaaatyactgaagcttacatgatctcacctgaagttcacagcagtgctaagaggtaatawggtgtcccattttacagatgagaaaacagcccagcagaggaaaagtgagtggccctataggaggtagagaactgggctgggagctggtgtttcctgactttaaactcacttcttttcctttagagaaagaaaaaaactcagacatatcctttctgaatgtaaaccagtggatgcagaaacaacttggaatctttgacattcttttaattttttttttaagtactgttgtttttttccctacttctgttcttacaaggatgtgggagatacagaataagagtaaggagtaaattatcaaaaattttaaatatttttgaacaatgggggaaaataattttcacttcaccgaagcgaggggagggagtccataagccgctggttcccctgccttgaagctggtgagtcccggcaggagtgaagtttctgccttcagagtcacccaaggtgcttggttttcagatggaaatggctgtggccactgcctcagaggaggcagatgtcatcttccttttcrcgaaggtgctcgctccacattctccagagggaaggctgggccagcacggtcaggcttttgcacggatggagccgcagctccctycgcttgctcagtcccgagatagcggcagagaaggtggtgggagagcctgctytcagtttcctaagcaccaaggcctggggataaaattgttgttttaatcttcatgttttcatctgtaaaatgggtgtaatgagggtatayggggccaggtggagcaatgttagtggatgcttagtgcattccccatctcttggccgttctcacccaccgttgtgtcaccaccagggaacccctgcatttcttcaccacatacttctctttgatctaggcccacaaaacaggtagtgtctacgtttgacctcatctgctggtggcccccagggctcccagaccattcacggacatgagtttcaaaggcacttgcaaactctaaagagatgtgcaagtcagattcaccaccctcttccttcagccctttctgtggccctctgagctgggatccaagttccaacatgacctcaaggctccctgtggcctgggccctgaccagacctgtgctgggaaagttctcaggggagagggaaggtggggaggggaatcctgacttgtaggatttgcccatttccatggtgtaaatcctcccaaggccagtttcaggctaccggcttgacatcactgcctgggagttgggcagagatgtgcctgrtgggctccctgcctggccctctctagggctatcccctcccagccccagcctataccccgggcttccaggtcctgtccgccaacgtggctctgctcctagtgtccttatttagtttccatgttttcagactgttttctccgctgtcatggaagcattgcaagaacagaacagggacctcattcatagcrtccccttctcagagaggctgacaggtctgaggtcccgtggctagttaggaggtggacacgccttgggtctgctctctgactgcagagctgaggttctgcccagcaggctccctctgctccctttggtgggaggagcccaccagattgtgtgaagatcaaaggctctgaaactgagctccttccagaagaacatacctctctcctcccctctctggcctaaggcagagttttgcagttctgggagmtgcagaaacttctcttgacctgcaaagccctcgggggagctgcatggacttgctggtgattgccttcttacccrcgtcttccccaacccctctccagcaacagtccaaggtgagaaagtcacggtccaagagtaaaagcaagggagagcttctgaagaagtgcatcgaagacaaaattcacctctgtgaggaacaggcctctgaagacctggtggaaaaggtcagtacatctgcttcacccagctgtttctctctgcacatggcggggctgctctgatagctgacacatttgcaggcacacagagcccttggggctgtgccatccatctccacccaaccgctcactcactcaggtgctaaggtaagaaagagttggaagaccctccccctgggcctttcccctgtgcattctgtttggaaccstctccctccacttctcagtctggggatctcaccggatccttcaggcttcacctcgggtgctgcctccactggctgagtcacttgctgtatttgtgcctggctctatcctggggcgtgtgcacctgccatttcacctccatcacattctttttctctctcacactctcctccatgttcccacaaactcaccaggctctcccttcagccccatttttttttgtttgtttgkttttggtttttttgaaatggagtcttactctgtcacccaggctggagtgcagtggtgtgatctcggctcactgcaacctccgcctcctgggttcaagtgattcttctgcctcasccttccgagtagctgggattacaggcacccaccatcacaccygctaatttttgtatttttagtagacatgtggtttcaccatgttggccagattggtctcaaactcctgacttcaggtgatccgcccacctcagcttcccaaagtgctgggattacaggcgtgaggcactgtgcctggcccagccccatttcatacgtgatgttctagcacacaccacacagtctcctaggatgctttaatctgtattcttctgtctttgtggaattacttttccacctctatttacctggataaataacttgtgtccttgctgtcctgaggtgttccctcagctcttggatgtctcsccttccaagaagccttacccgaacaccgtagattctcccactcattccaccccacttccaactcttccttaccatagcacctatcacatggttaatttgttccacaagtattttggggaggcaacagtgtcccaggcgctgtgtcagttaactctggggttgcagcagtgactgaggcagccctggtccctgctctccagtagaggcgagcccgttctagttgggggaaatggatcataaacacttaaaatgatagactgtcatcagtgctattaaggaaagaaattagataatgtgaccttacaggtgaagtaggctggcagcagggtggactgtaggtaggagaggaggcagggtctcctctgcaaaggtgctgcttaagagtagacgctgtgtgaccgcagcctgagtgtctgtctgccttccccagcaccctgcaaagggtggattcccaacaggagtatgttcagtgaatgaatgtatgaagccatgctttagagctgctgtttttgttcttaccttccacctgtctcctttttctagcttttttgcttgtttttattttagtgccggtgtatttctcagaacacgaatgcacgatctcgccaagagccatagaaactgctctgggctcagtgtctcccatcaggtgtgtccaggttgttgatgtcttaagggatccaggaagtggcaaccctattctcacccaggttctatatgaaattgaacagcaagacaaagattaggcagatagaggcaaaatgtcatcttacctattgttaaaggctaattcaagagatatacatcaatgtgagagccactgggcttcctaaactacctgagtattaaacaaactccatcaagcaatcacagtgtcactagggggttccttgtggggggcagcctacccctagggaagcagagcagaagttggggtcccaaagagaagcgagagaggtaagccaagctgtcccagtttattcccagtttacagcaagaagaggagagagctggagagaggtcgggtcctgtgcacattgagctcctggcacagggaggaagtagccatactcgggggtagagggagcatttccctgagtaccggctgctttgtgatcctctgtaagaggtgaaacccgccagagtgaaggtgactgttgtcggagaagagctgcttgtgaagggaaagctggggtttggtttggcagagggaatgggtatcctggactgtgctggaggccacagtgcacagagggaacccagagggttgaagccctgtgacaaggctgccttactggagtgctgggtcatggccagtggatgggggagcagccccgtggaggaacctgctcaaaggccaggctgagaaagctaagggccatctcaccagcacccttggagcagagtcacaggatgaatgtctgagtgagaaggtgatgcagagatggtaacccatggggacatcaggtgcagaccgcaccgctcccacccagtggctcaaggctggacctcaacaccctccataacccctccctggcccctacctcgtctcctcctgctctgtctcataattatttctttttttttttttttttttttttttttggagacagagtctcgctctgtcacccaggctggagtgcagtggcacaatcctggctcactgcaagctctgcctccygggttcacgccattctcctgcctcagcctcccaagtagctgggactacaggcgcccgctactactcccggctaattttttgtatttttagtagagacagggtttcaccgcattagccaggatggtctggatctcctgacctcgtgatccgcccgcctcggcctcccaaagtgctgggattataggcgtgagccaccatgcccggcctctcataattatttctaatccatctcctctgtttccagccttgcctagcaccatttttgcatagatacatgcagcaggctccctactctttcctgtttgttccctcttccttccaattaattctccttgcagcagggagcaacctcttcctaaagcccagctccaatcccttacggatcctgaaccagcagacccatctcctttttggccaaaactagtcattttaatagaaggaactaagcacattccttcctgtagttttttctttttctttttttaaaaccatgtcatcctgaaataattgaaagaatcagaacccagttttcaagagtttatccaagagaaaaactgggaattgccgtttgggaaatacagaccgcagagaaatggggtcagcacgctaaagctaaaagttaaggtcttgcttgtataagaataaaataaagagatttaacaggattacaacattttctacacaaggctagtttataagttacaacagtttaattagttacggtttgttttcttttctgtatggcttgttttcgtttcctttccaatttaaaagagtatatttaacattccgtcttggcaaatgtgatagccatgaagtctgtgtgtgagagaagagggaagttaatctgtaaggaagatcaacagtgcagagggaaggggtcttttctggcgccctctagtcatttacagcattttacaaaataatgtagtctgggaagaaggctaatctgtaatcagagaaacaaaagttcagccgcttaggttacagctgcctgtcacatgactcaggccctataatcatattcctttaaggcacctaataatttaaagtttctgtaacttaagtttcagattacttatcttcacaaccatttacattttctcttggtggcaagtacagaatattgttttctttgccttttagtttttttctctttgtttttgccctgttcaggatttttgttttatttagacattttcagtgctttatatctcacattaccacttttctttcttagtttctttcaattattctttagtttttaattccagtactcagcattattactgaaaatatcttaacctcattcattttctttgtcacccatggtcctttagaagtttattactctcccaggcctctgctttcatcatagtgtataaaagagggctctttgtataattaaataggcttagtacactgtactaatatgacacagtgatactaaaagaaaaactgtgtctagtctctatcaaattcctgtcagataccagtcttacagctgatgctcttcatgagcgtgaatctccatactcatcacattgctgcaagaatggcatcttgaagtccattctaagctcaaaaaggttagtgcccagcccagggtccaccaccaggcatgtgatgggacctggtctgcctcagccctctgtgcagtgtctcctagttcacactggcatcctggtcccatgtaacatactagttatcacttcttccataacatgaacaagggatccaaggcagatggggaagagacatctgaggatctccatgatgcagagggcacacacaatgacagcctgccttgggaatccttgtgtactgggccaccttatccagttgacacatgagggacagcatcactgggggctgtgtgacttgttcaggaccatccaactaatgggttgtgactcttgcaactcaaagccacgtccatttggataggaaacctgggtctttccagctyacccatcctagtctacttgccacacattcatagatacttaaggaagttccacaggaggcatttggcaaaaaaaaaaaaaaaaagaaaaggaaaaaggagcaagacataagacactgaccaagaagaacacgctgcaagagtaaagaccagctgaaccaggcaggtgagcccggcaggtgagcctgggaggtgagcagaggccttcaagggatggggaggtgaagggagctggaggtctgcaatgccctgagcctgtcttggcaccctcccctgccctgagctcatgtctatggtttacatttggggcagacctttgtcctacctcccagcccacatgcacaagctagacccttcacctggtcctgggctgaagacacagccatctgctccagcactggaggaagaactggccagttgttgctctccaaggtgtttccaagggtgatttagatttcgtttttgtcttatgcactgattgaagaacttacctcccttcctaaaatgtgatggcattttaataagaatggtgcctacttcctttgtttgcgttttagtgccaggcaccttggtagacactgtatgtatatatattaatatatgcatacgatagaggtatatgtatgtatgtgtgtgtgtacatatgagccatccacatgtgagttctacatatgagtacctatatgtatgtccatagtccatatatatgctagtgaggtgtactgagagctaagtgctttccatctatccactctaatcctcacacagcctgtaacagaagtgccactgtcattgctctatgagagataagggctttgaggtacagggaggtgaagtgactccagggtcacgactggtcttcagactctgcattcttgctgctatactgacctgtgccttgttcattacatgctttacccttcccaacttccaccacaagtaagaaccatcaacgtccctgttttatggatgtggaaactgagtctcagagatgttagtgacttcgcccaggttcctttatgtagccaggcagtggcagacccagcacgggaagcagaagctctctgttctgtgtcactgtcacaccacctcctgaccacatgccctgatcagaactgtcaaagaatgttttcaccaaacaatggcggttatttcccatggtttcacaatgcagggtgagcgtgccttggctcctgcatctgtgaaatgtggcttgtgacagtgatagcccactagttacagggcttttgtgaggtgccttttaactttggagtgggctgtagtgctcgtcttctttcccactaatggagcagctccacatgctacgtgatccaggcctcacaaagaaaggcagacacgaggcatttgtcatctgtgaccttttcatgacagtccatcttcacagtcggccatttcattgtggcaggtgccaagagaatagacactcttgagttgacagctttaatgttcctcctgaatttgatcgattacatctcttagcacttgcatggcggttgttcagatgttttatttgcaggataattgcagagggaaaaatgacagctctcgttctgtgaatgcccacaactaagagttgcttgatcatgatattaatcatggttttccagagaaacagaacccatagcagatagatacatagatagggaggtaagagggtagatagataggaggagattttttcagatttattcagggaattggaacatgcarttatagaggctgagaaggtccactgtctgccatctggaggctacagaacccgcaaacctggtggtataattcagtctcaaggcctcagaactaggggagctgctggtgtaagtctgagagacccaaggccagagaaccaggagcactttagatgtccaagggcaaggagaagatggatatcccagctccggaagagaaagagaattcacccttttcccaactttctgttctattcaggccctggggattcgatgacagccaccaacattggggagggtaatctctactatctgctgatwcagatactcatctcttccaggctggcaccgtggctcatgcctgtaatcccagcactttgggatgccgaggcgggtgaatcacttgaggtcaaattcaagatcagctggccaacatgttaaaacccagtctctactaaaaatacaaaaaaattagctgggtgtggtggtgcacacttgtaatcccagctacttgggagactgaggcaggagaattgcttgaagctgggaggcagaggtttcaatgagccaaaattgcgccattgcactccagcctggacgaccgaccgagactctgtctcattaaaataaaataataaaataacaagatgctaatctctttcagaaacatccacacagacacaccccaaaataatgttttaccagccacctgggcacctcttagyccagttcagtgacacataaaattaaccatcacaatcatgtcttgagagtgggaggtcccttggagttcatgaagctggaaagatggagctgcatcttgctgacactgcccaagaggcccactgtggagcccaagtctggcaggccatgtggtgtccccagagggactttgaattcaccgttgggctgcagagtatgctgggactgggagyacctgctgggtgaccccttcctttactgaaatcttctgcagatatccatgccaaccctcagtcccaaattgatatggcccttgtctggactcttccatccaacagaaggggaaagagaggccaggaggcattgggaaaattgtcygcagccacaccagcatcgagtggtggagttggtgtgtctgcctccatagcccgggactgtggctgggactgcagggagctgttaggatgagaaggccttcacctcccaagatgactctttgtgttcttcccactgcctcccctgtctcctcccctttctctcattttctgtcttctccttgcccttctctgttctcccccatccctgttccttctgcttccttctttagggaatgttttgtgtggtgattcctctgtgtgacgcagttttaagtttctgcttttgagatgttcacagtttcaggtaagcagccagttcttccatcaagcatttggaagtttgcattctgctttcagatagaaaatccacctgactactctgtaactctacctcgaatgagtggctgtgcaactaattcagaaagacttgtatgactgattcttggaggaaaggagagaccgacaaatatgagcctctggctgccactttttctgtacagctggtggattaagggaggaaggtgtcagctctggtcacaggtagctatcctgtggggccaaagtgaccagatgagaaatgggaaagtcagctacagatgtctggtccttctgatggactgattacaaatgcacagacacagaatttgcagcctggaagacattggagggcatatatattttagaataagttaatcaagtttctgaataaatttctattatgattgcattaaacttacagattcatttagtagttgcctatcctatcaaaaaatgtagaatatttcttatttggagcttcttttaggagctctagtgaaattttacaattgttttcatgagtagagagatcgtacatctcaatttgcttgagacggtcccagtttccttatcatcctcatgtcccttcccatgagccctccctttctctctcagcttaggagagaaatcatatggtgaccttatacataaggtcttgtgtattctttatggtgattcccagacacaatataggtttggctgtaattgtgaatgatttgattatatgttttagattattcaatgctggcataaaacatgtaactaatttttataagcctttccggacttctgtatgctatcctgggagccagactgctggctccagagtctgagctctgccatgttctagctgtgtgaccttgagcaagttatttaacctttctccaccttaacgtactcatcattcaagtgtggataatagaagcgcctacctcctaggatttatctgttgattccattaatgttttatgcagtcataatgtcaacaaatgattacaactttgtagcctcccaattcttacacctcgtttctttttctaattgctgtttcaatgtccttatctgcttgttccaccgtctctctcayttctattgattgggttttctctggtttatggatcttatattcctgcttttttgcatgcttggtaattttagattggatgctgggcattgtaaatttcatgtgttgggtactggatttcattgtgttctctttaatagggttagagctctgacaagtagttgaattacctggaatcagttttatcctttgaagacttgcttttaagctctgttggcttgggttaacagctgcgtttaatcaagactaatttactcccactaccaaggtgatgcccttctgtggattccgccaaaagtgttattgatttattattgatttctaatttcattgcatcttagagatcaaagtatgtatgaagattctttggaatgtattgaggcttaccttgtggctttacagtaggtctgctttaaaagatttgttctcaaaaaggctgggtgttttccgctgagtatggaaaagggagtattaagaggtgggtgggagccgggtcatgaggtctgcaaggctgcacttagcagctcagatgttttgaagtaaaatcaacaagatttaggcattttgtagagaatatttggtggggagtaccagtgaggaggtctctattggtccgtcctcctctcctaacctctgctgtggttggcttagggggtttgggcctcatcttagtttgacctagtcctttccttctgcatgtcagcctgtgctgaaagttacagcagtcccgtcaggaaggggattggcttctgtgaacctacaggtccccgtggcacaggaaggtctcatgccacagcaaggatacggttgacctgagggggagatgtcaaagttgctgtaagtgatgctcagttgggtcagtcccgccaccctccccagtgcagtgtccactcggtgcagggacattctggccacctgcactggcctcaagccagtctcctcagcttggggcaagtttgtcagatctgttggactgtaaggctgtcactcaaaatgcctcctggccaagcccttctttgctgagttcctgggcaggacagataatgtgccttctttctcttgcttcaacatctgagcgattccacaaagtagattggagacacagcacaaattatgtggttcatgttttacttaccaatgattggaaatagatctgtctgtccacatctatctatctatcttatctatccatccatccatccatctatctatctgtcatctgtctatctgacccttgaacaacatgggggttggggtgctgacccctcacacatcacgggtggagcccagcaggctcaccacattaaacaaacaaaaatcaagatttcagaggctactgtgtctatgatttgtagagcagagttcccaaagacaaggtagctccaacagaaagagacagagcacactccagagatctgcagggcatcctcaagtcttcggctaagtcctgcgcgtgatgtgcatgagtagaactcgtgtgtaacatctgactccccccaaatatgccattatcctaatagcctactgttgacagaagccttacaaataacataaacagttgagtaatattttgtatgttattaaatatgtgtaagaaagtaagctagggaaaagaaaatgtttttaagaaaatcatgaggaagagaaagtatatttactgttcattaagtggaagtggatcatcataaaggtcttcatcctcatcatcttcacattgaataggctgaggaggaggaggagtaagaggaaggattggtcttgctgtctcgggggtggcagaggtggaagagttgaaggaggtggaaggggaggcaggaaacgcaggcaccctcagtgtaacttaaaatattttaactgatacaatattggtacatatttatgggatgcatggtaatattttgttacatacataggatgtataatggtcaagtcagggtatttaggatatctatcactccatgtatttatcatttctgtgtgttgggaacatttaagtcctcccttcttgttattttgaaatagaaaatactttgttattaactatagtcaccctaatctgctgttgaacactatgtcttatttcttctatctaactgtatgtttgtcctcattaaccagcctcttttgtctcccccacaaccttccccacctgtggtaactatccttccaccctctacctccatgagatccgttctttttgctcacgtatatgagtatgaacatgtgatgtttgtctttctgtggctgccttatttcacttaacactgacgtaactttaattgaaagcaaatccacgtgtgagtggaaacaggcaattcaaacccgtgttattcaagagtcaactgcttatctacttatctatttctgctttttgctttatctgaaacttgaagatttttgatatcaatatatgagagttcccttgttacttttcacagcggcatagcatttcactgtatatgtgagccttaagtgatttcatccgccctcaactactggatatttaggttgttttcaaccccttgatattttaaacaatcctagaccctctgcatgtatcctacacccctctgtagtgaagcaggcagagcaactattactatctccatttcacagatgagaatactgagtctcagaaagagtgagaggcttatccaaggtcacaaagctggtacatggtagaacagagcctaaagcacaggcctctccatgtccatccctgcattcggctagcagatccatttgatggatgcagaaatgaaaggacatttcagttcctctttggtgtgattcttgtgctgtttttgaacagcgtatacacaaatttctcacaaatagtctttaggaacacttaattataaatgaaaatgacataaccatatttcctcttcacccgttatttctggtcttattataatgatcttgctctctgtctgcatggcacatctaccatgtatctcttcacccatccactattcattcactgtttccagatttcatgatgtgtcgtgcatgcaccattcactagaaatgccttcattcagaagtggaactcctgattgccagcgacggtgcatcctattctgtttctgcagctgccttggcaattatgcaggggtagttggttcttgtcaggaatggtccttcactctctctgacttcagaagggactagagtttaagcatcagaataatgtgctgcttttcagtgacctgacaagagagaaccctgatagtccttaaagagctcagaaaagaaggcatgttgaaagggaatccatttaggaagggaagagaaaaatccatccatccataaagattgggaaagtctgcagacagttatcctcacatctccccttgccccgtcttatcccttgaggcagcctctgtcaaattcatctccctgaagcaccattttgagagacattccatagcttcccactgaccccaataaaattcagattcctgagcttggcattcaaggcctcatggtcagacttcatcttacctttctaatctatccagtttggacctttcacatgccaaaaggttaccctggctatctttggatggttttaatttagtaacttttctcccacttttctagattgtctatttttaaattttacttttcatttttatcaaacatacgcatgccttcttttaaacagtcaaataattctacaaggcttctgctgaaagaagagcagcttcccccagccatgcacacacacacacattttcagctccccagagttaacagcttctaactgtttagcttggtcttttggtgcttacctccataactctaaatagcatgcttgctttgctacttcttgatttctgtaatttgggattatctatttccttttcctatctatttcctttataaaagatgaggatttactctattttactctcttcactcaacctgtaccacaaatcagccctttcattatcccccaccatatttaggtcagtatttatggcttctatgattataagcatgtaaatgttacctacagttgaatcttgtgggaaactagaatcctttttctttactgtataactttttgtttttcctggagttaatattgttctttagtttccttaggaaactattttactctctttcttctctaaacctggaccacttatcagctctttcctcatcccccaccatagttagatcagtatttatggtttctatgattataagcacttaattattattcacagttgaatcttgtagaaaactggaatcctttttctctactttataactttttggttttcctggagttaatattgttctttagtttcctttttagttacttttctatgtatttatcatcaatttaatccacttctttttaccttttttttttttttttttttttaagaggcaatgtcttgctctgtagctcagggttgagtgcagtggcacagtcatagctcactgtaaccttgaactccagggtggtacaagtgattcttctgcgtcagcctccaaggtagctgggattacaggcatgcactaccctactaatttttaaaattttttattttaaaattttttatagggacaggtttctcactacattgcccaggctggtcttgaactcttggcctcaagcatttcttctgccttgccctcccaaagtgcagggattataggcatgagccaccatgcccagctttattaatcctcttcttgatggtagaccaaatacactatcaggaccatcacacatgtcacatcttctgttaatcccatctttcagggtacatctcactctctgcctctgatgtgctccagttggaaactgacctctgtgcctcatgcacagctgccatcttggggtcacactgtgaattcccttcactcctctctttcctggttttatcgttgttgttagtgaaacacatcttttattagtttcctgggaaagggcacataggaaactgaatattttggaatttttcagatttttctaagactgaaaatgtttctattctgccctcatactcaactgatagtttgaccaatctagaagtctgggaaattttcctgaattttattaatgattacatctcctattctctaatttgtctttctagaactctcgggattccagtgttgacctctcgtccattgtttttttttttttccttttttttactatttgtctttttgcttcacttgctgggagatagcctaagttttatcttataagcctttaattgagtttttcatttatgttttcaatcaatttctaattcttcaagagcatcttcctccaccatcccaatgctgtcttcctaaagaaaaaacattctcttattgttttgaggctgctataacttgttatatctttctaagaatattaaagattttttttttaaattcctgcatgttcactcttacctccatgttcattacaggctttcccaggtatgtggtcatctttggtggtctgatgatatttaagagtgggataataaggctctgagcctatagccagggcccgtagactgtggccttcagtctggtggctgggctgcgcactctgtaggggaatccccagtgtgagtatctttagatctttcatcaaggctagttgaatcccccaaaaaagaccgctccaagtcttttgtctagatggtaaaggcatggctgcccaacatttgggaagccaaatgcaggaagagagctggggttttagtagtcagtatgtaaactttcactaggaccctgtgttttcagatgtgcctgagtttccttccctaaattcagagacttttcctgagactaaatctccagtcatctgctggttgtagggaagagagtggcctgctgagcaaaggatgggtggggggaattctgggagcctgtttcctaatgagatgtttatccttttcttctgttttagctccatcttttacctcccacttctagatgtgtctgatgactacattttctgtgacttgggaaggtagatctgcagtttaaattatgttgcttcttgcttactccatggcttacttaggattcagttttttgggatctatatagttctttcccaatcagtcatccagtttctaactttcaaaattgtatcactgttgtttcctctctcatttcccccatatttacccactgccttaaagaaagcactggctgcatcttaaaaattcactattcttcactaggcatctccactgtaaagattttttttatattgtgcatgtactttatcattagaaatgaagaaacctctttaaaatagggggaaacgctcaatatggcaaaccattatttttatctgttttgtgcaacttgaaagaaatcctatgtaataatgatgtgaaataggatttaatcctatttaataatgatgtgaaatagtgaaaataataaagtggtaatgatgatgacagctactgttcagtaggtactccgtaggcaccaggtactatttccttttcactggaaaaactgagactcagacaggttaagcaacttgccttggtcacacagctagttaagtggtaagtttgtatgtaagagataatagatcaaccttaaaatacaacaaagcaaaactatgccaagtgatgtgaagggatgcccctcatttctttggggaatttgcactttgataatgtagatgataggggtggtagaagtatctttctaggcatataaattaatttgtctgtgtctaaaatttaagcactaatgaagcttatttagcaaaatagtatttcatttgacaaatattaacccaatggaccatcagtgaatctactttcctcctgatacaatatgccacagggagttttaaacatttcccatctttttacctgctctgggtatcttgaacccattcagcagaacatggattagactaacctgatttttaacaggaccagccgctagaatgggaatcttcttttattttattttattatgctttaagttttagggtacatgtgcacaatgtgcaggttagttacatatgtatacatgtgccatgctggtgtgctgcacccattaactcgtcatttmgcattaggtatatctcctaaagctatccctcccccctctgcccaccccacatcagtccccagagtgtgatgttccccttcctgtgtccatgtgttctcattgttcaattcccacctgtgagtgagaatatacggtgtttggttttttgttcttgcgatagtttactgagaatgatgatttccaatttcatccatgtccctacaaatgacatgaactcatcattttttatggctgcatagtattccatggtgtatatgtgccacattttcttaatccagtctatcattgttggccatttgggttggttccaagtctttgctattgtgaatagtgccgcaatcaacatacgtgtgcatgtgtctttatagcagcatgatttatagtcctttgggtatatacccagtaatgggatggccgggtcaaatggtatttctagttctagatccctgaggaatcgccacactgacttgcacaatggttgaactagtttacagtcccaccaacagtgtaaaagtgttcctatttctccacatcctctccagcacctattgtttcctgactttttaatgattgccattctaactggtgtgagatggtatctcattttggttttgatttgcatttctctgatggccagtgatggtgagcattttttcatgtgtcttttggctgcataaatgtcttcttttgagaaatgtctgttcatgtccttcgcccactttttgatggggttgtttgttttttttcttgtaaatttgtttgagttcattgtagattctggatattagccttttgtctgatgagtaggttgcaaaaattttctcccattttgtaggttgcctgttcactctggtggtagtttcttttgttgtgcagaagctctttagtttaatgagatcccatttgtcaattttggcttttgttgccattgcttttggtgttttagacatgaagtccttgcccatgcctatgtcctgaatggtaatgcctaggttttcttctagggtttttatgattttaggtctaacgtttaagtctttaatccatcttgaattgatttttgtataaggtgtaagaaagggatccagtttcagctttttccatatgactagccagttttcccagcaccatttattaaatagggaatcctttccccattgcttgtttttctcaggtttgtcaaagatcagatagttgtagatatgcggcattatttctgagggctctgttctgttccattgatctatatctctgttttggtaccagtaccatgctgttttggttactgtagccttgtagtatagtttgaagtcaggtagcatgatgcctccagctttgttcttttggcttaggattgacttggcgatgcgggctcttttttggttccatatgaactttaaattagttttttccaattctgtgaagaaagtcattggtagctggatggggatggcattgaatctataaattaccttgggcagtatggccattttcatgatattgattcttcctacccatgagcatggaatgttcttccatttctttgtatcctcttttatttccttgagcagtggtttgtagttctccttgaagaggtccttcacatcccttgtaagttggattcctaggtattttattctctttgaagcaattgtgaatgggagttcactcatgatttggctctctgtttgtctgttgttggtgtataagaatgcttgtgatttttgtacattgattttgtatcctgagactttgctgaagttgcttatcagcttaaggagattttgggctgagacartggggttttctagatatacaatcatgttgtctgcaaacagggacaatttgacttcctcttttcctaattgaataccctttatttccttctcctgcctaattgccctggccagaacttccaacagtatgttgaataggagtggtgagagacggcatccctgtcttgtgccagttttcaaagggaatgtttccagtttttgcccattcagtgtgatattggctgtgggtttgtcatagatagctcttattattttgagatatgtcccatcaatacctaatttcttgagagtttttagcatgaagggttgttgaattttgtcaaaggccttttctgcatctattgagataatcatgtggtttttgtctttggttctgtttatatgctggattacatttattgatttgcatatattgaaccagccttccatcccagggatgaagcccacttgatcatggtggataagctttttgatgtgctgctggctttggtttgcctgtattttactgaggatttttgcatcaatgttcatcaaggatattggtctaaaattctcttttttggttgtgtctctgcccggctttggtatcaggatgatgctggcctcataaaatgagttagggaggattccctctttttctattgattggaatagtttcagaaaggaatggtaccagttcctccttctacctctggtagaattcggctgtgaatccgtctggtcctggactctttttggttggtaagctattgattattgccacagtttcagagcctgttattagtctattccgagatttcagcttcttcctggtttagtcttgggagggtgaatgtgttgaggaatttatccatttcttctagattttctagtttatttgcgtagaggtgtttgtagtattctctgatggtagtttgtatttctatgggatcggtggtgatatcccctttatcattttttattgcgtgtatttgattcttctctcttttcttctttattagtcttgctagcggtctatcagttttgttgatcctttcagaaaaccttggattcattgattttttgaagggttttttgtgtctctatttccttcagttctgctctgattttagttacttcttgccttctgctagcttttgaatgtgtttgctcttacttctgtagttcttttaattgtgatgttagggtgtcaattttggatctttcctgctttctcttgtgggcgtttagtgctataagtttccctctacacactgctttgaatgcatcccagagattctggtatgttgtgtctttgttctcgttggtttcaaagaacatctttatttctgccttcattttgttacgtacccagtagtcattcaggagcaggttgttcagtttccctgtagttgagcggttttgagtgaatttcttaatcctgagttctagtttgattgcaccgtggtctcagagacagtttgttataatgtctgatcttttatatttgctgaggagagctttacttccaactatgtggtcaattttggaacaggtgtggtgtggtgctgagaaaaatgtatattctgttgatttggggtggagagttctgtagatgtctattaggtccgcttggtgcagagctgagttcagttcctgggtatccttgttaactttctgtcttgttgatctgtctaatgttgacagtggggtgttaaagtctcccattgttattgtgtgggagtctaagtctctttgtaggtcactgaggacttgctttatgaatctgggtgctccagtattgggtgcatatatatttaggatagttagctcttcttgtcgagttgatccctttaccattatgtgatggccttctttgtctcttttgatctttgttgttttaaattctgttttatcagagactaggattgcaacccctgcctttttttgttttccatttgcttggtagatctttctccatccttttattttgagcctatgtgtgtctctgcatgtgagatgggtttcctgaatacagcacacagatgggtcttgactctttatccaatttgccagtctgtgtcttttaattggagtatttagtccatttacatttaaagttaatattgttatgtgtgaatttgatcctgtcatgatgatgttagctcgttattttgctcattagttgatgcagtttcttcctagcctcaatggtctttacaatttggcatgattttgcrgtggctggtaccagttgttcctttccatgtttagcgcttccttcaggagctcttttagggcaggcctggtsgtgacaaaatctctcagcatttgcttgtctgtaaagtattttatttgtccttcacttatgaagcttagtttggcgggatatgaaattctgggttgaaaattcttttctttaagaatgttgaatattggcccccactctcttctggcttgtagagtttctgcctagcgatcagctgttagtctgatgggcttccctttgagggtaacccgacctttctctctggctgcccttaacattttttccttcatttcaactttggtgaatctgacaattatgtgtcttggagttgctcttctcgaggagtatctttgtggcattctctrtatttcctgaatctgaatgttggcctgccttgctagattggggaagttctcctggataatatccttcagagtgttttccaacttgtttccattctccccgtcatgttcacgtacaccaatcagacgtacatttggtcttttcacatagtcccatatttcttggaggctttgttcgtttctttttattcttttttctctaaacttcccttcttgctttatttcattcatttcatcttccgtcactgatagcctttcttccagttgatygcatcggctccggaggcttctgcattcttctcgtagttctctagccttggttttcagctccatcagctcctttgagcacttctctattggttattctagttatacattcgcctaaatttttttcaaagttttcaacttctttgccttcagtttgaatttcctcccgtagcttggagtagtttgatcgtctgaagccttcttctctcaactcgtccaagtcattctccctccagctttgttccgttgctggtgaggagctgcgttcctttggaggaggagaggcgctctgcttttagagtttcgtttttctgctctgttttttccccatctttgtggttttatctacttttggtctttgatgatggtgatgtacagatgggtttttggtgtgggtgtcctttctgtttgttagttttccttctaacagacaagaccctcagctgcaggtctgttggagtttgctagaggtccactccagacgctgtttacctgggtaccagcagcagtggctgcagaacagcggattttcatgaaccgcgaatgctgctgtctgatcgttcctctggaagttttgtctcagaggagtacccggccgtgtgaggtgtcagtctgcccctactgggaggtgcctcccagttaggctgctcgggggtcaggggtcaggcacccacttgaggaagcagtctgcccgttctcagatctccagctgcgtgctgggagaaccactggtctcttcaaagctgtcagacagggacatttaagtctgcagaggttactgctgtctttttgtttgtctgtgccctgcccccagaggtggagcctacagaggcaggcaggcctscttgagctgtggtggkctccacccagtttgagcttccgggctgctttgtttacctaagcaagcctgggcaatggcgggcrcccctcccccagcctcgctgccgccttgcagttcaatgtcagactgccgtgctagcaatcagcgagactccatgggtgtaggaccctccaagccaggtgggggatataatctcctggtgcgtygttttttaagcccttcggaaaagcgcagtgttagggtgggagtgacccaattttccaggtgccatctgtcacccctttctttgactaggaaagggaactccctgaccccttgtgcttcccgagtgaggcaatgcctctccctgctttggctcacgcacggtgcactgtacccactgtcctgcgcccagtgtctggcactccctagtgagatgatcccggtacctcagatggaaatgcagaaatcacccatcttstgcgtcgctcacgctgggagctgtagaccggagctgttcctattcggccatctttgctccaccccctagaatgggaatcttcaaatgcacatttatatttcagcagcgtttctttagccttattctcccaatgtttgggtgcaagtttcttgataatgttaccagcagcaaatctgtacgaatctgtggcacctttaattctcacctcctaagaagaaagaatttaaccaaggagcataagacaaagaaactgaggcaagttttcaaacaggagtaaatgtttattgaaaagctttagagcaggaagaaaaggaagtaacgcacacttgaaagaagggcaggcaggtgactggagagaccaactgcacagcttaacttttgacttgagcttttatacagtggcrtacttctggaaggttgcatcctgtattagtccattctcacactactataaggacatacccgagactgggtgatttataatggaaagaggtttaattgattcacggttctgcagggctggggagacctcaagaaacttacaatcatggcagaagtgggaagcaaacatatacttcttcacatggcagcagcaaggagaaktgcagagcaaagagggagaaaaatcccttaaaaaaccatcagatctcatgagaactcactctcaggagaacagcatggaggtaatcacccccatgattcagttacctcctatgacaggtggggattatgagaactacaattcaagatgtgatttgggtggggacacagccaaaccatatcacatcccttctcccgtgtttcttcccttggggcrggctgttcacatgcacagtgacctgccagcacttgggaggagccacatatgcagtgtttttacagaagttgtgcacatgctcacttgaggctttcttccttaccagtagaatgttcctagaagatgatatactagttatactctgccattttgcctcttaatgcacatgtgcgagcccacttgcccaactcctgagttcttatcgggaagctgctgatcaccaatttcaagtctttactatctgttgggagactgctgttccctggcaccagctgcaaccaattattattttaaagaggcagttaacaaccacttgaccatcacctgatggccacctgacattcctggtatttgkcggggctctctcctgccctgctcacatctgactagttacctactgtaacaataagacctctctcaatgcctcttttgccactggaggttgttgctagtggcaccgctagattctccatcccttggcccacttttctccaaggagggcatttgtgattaaagaaggaatgggacaggttcagctcagcccccttctctctgggagccagcattcctgtaggaagcccctcttatctsttttttaagtgatgaatttggtaaggaggcctgctcttgggggattgtgaatttgtttggatacagatgtgagccacattctccagtctagttttcatcaatatgaaagctgacattaggcacctagctagctcacccttgcatctagttgtatttgtttccaaacttgggcaaggagaggtgtgatttattaaaccctttagaatcccaataactctctgctggttgacacaggtagactttattatatgtttaaaggacattataatgcatagaaaaaactttttgtttgaaatccacatgttgtcagggaaaagtagtaagaagttgtttgaacttctcgtttaaagagtatttagcagcatatcattttgcaaatgaatttgtattattctcagtggcttgaatatttaatgaagcctgtcattaatacctcatagaaatgcaaatctgtgttgtttcccaggatttcttctagacaaaggattaaaaccctctctagagacacattctcatggtgctggaactaacaaactaagctttccaaagaagaaaaaagaattttggagaaggtttttttttctttttaatttcactgtccatgttgttcatacagtatatacaaaaggctttacacttcacccacatttattcatgcatttacataaataaatctttagcttttccttacggccttctcattctgccctctgctctgcacctctgcaggggtctgggtcttatgggacacttggaccaccacccacccacccaagaggggaagatggagaccacacaaggataacgtgaaaaccctagcgcatggcaggcatgtaataaggaagacttctgtcagctgaagcatgatgatgttcataaatttgggaaggagacctttatttctcataatgggttgtagcctgcagggtggcccttctgacgggctaggaagcatagcctctggttagaagctgaaaacaggcacttagagaaaggggcaaaggaaacaggaatttatgctaaatagggtggcttaatatatatatttaataagctataggaggagtcatgaatatttatgaaacgagaaacatgcacaagtgtcattgagcttcatgccccttcatgggtcctgtgtctccacccaatctcatcttgaattgtagtttacataatccccatgtgtgtcattggaaggacctagtgagaggtaacttaatcatgggggcagttaccctcatgctgttctcgtgatagtgagtgagttctcatgagatctgatggttttgtaaggggcttttcccccttttgcttggcacttctkgctgctgccatgtgaagaaggatgtgtttgcttccccttctgccatgactataagtttcctgagggctggggaggcaattaaatttcttttctttataaattactcactcttaggcagttctttatagcagcataaatatggactaatacaggtctcatgtacaaaaaaatggtggtgctagcatgatctaagggtggtgttttctaccttctgacatcagaatgtgaagaagaggacactaaaaccctcactgagcatcctccatagactgtcctgaaccactctgtggtcmgtgtgtattatccggaaggaatgctggttggttgctttgtcaaaacagcaaaaaggaggggcagtgtcaggcagttggttgatattggggtggagtcttttggaagagctggtttctgtttagcgctcagggaagaaaacctaatgatggttagtgagggagggagtgtagcaaggtgtgtctaacctcccatcccattatggctgggaactcaacttccaaggtttttctggggtctccttggccaacaggaggcccattcagtcagttaggggcttagaattttatttttattgatcacctcttaccaattcttgccatgccttgcccatcactcaactttttcctsttcagggacatccagctctcttgcccttctcattgtctgaggggaagctctgccttcttgtccctgacagttcagggcctctgcagtatgggttcttctcccccacacctttacggcttcatctcccactttccctcttagcttttatctaattcagcctcacaagtctctgtagggccccctgcctcagtgcctctggtcatgctgttcctcttcctgaatgcctggatccttcagtatctgcttcaaatgccaatattgtcatgactttccctgacccctccaccttctcttttctctaaaccacatagcaccatatacagacctcccttatggaacccaccatattccaccttaggtaataagagtattaacaacggcaacatttgttaaacactccaatgtgtcaggcactgttctgagcacttaacagtattagattattaataatcagaataaccctatgagggacttctgcttgtgaccaagacagaataaaaagtatcagaattactccttacctaaaacaaaacaaacaaaatctatggaayagtgattttcaggacactggacagcagacaaaactgatccctaagaaataaaaaataaaggaattcaccccgtcattgtcccaggttactgccctaaaagggtttccaggctgaggcacagcaagaaggaacccagcaggtctactagggtagaccctttgagtaaaagagacaaagctaagaatttggggaagccaagtcagatagatttcacaggacagaatcccagaaaagaaagagctgcacagagaaaactccagaggtgtctactgggtcctcttgagtattctgctgagacctgcgcagcacttccatggaagaaaattgctcaaagctaggggaaagaccacccaaaatacttagaagaatactcagcatttacaccaggttggggatagtgacagttccttccacccaaactagaaagcctcaattcagaggacatcaaatatagtactcaaaaaggtcttgcctcggcaatggaaataatgagccctatgctagtcccacataaaagagcttaaaaacataacccaaaaggttagcctgtttccaagtagcttaactgcatctcagaacaaagctcaataattatagaaacacaaaaatatctaggacccaacaaggtagaatttacattgtctgtagttcagttaaaaagtaccaggcatgagacaaataggaaaatataactcctcatgaggagaaaaatcaatcaattgaaaccaatccagaactgacacagatgttagaattgacagagaatggcatttatgcctagtgttccattattggaatgctaagcttgtgggagttatttatattgtactgctcaagggcatcaccaagttctgatttttcacacacaaaaaatggcaacctccagcataaatggggtaaaacagtcattataattttgtttaatatgttcaaaaaaggttaagtatagatatggaagatgtaaaaagatatatctatatgtctatatttacatctataccacacatatttttgttctctagaagtttgatttgaatatacacacacacacatacacatgtgtgtgagaattaacagcagattagacattgcagaaaaaaattagttagcttgaagatatagcaatagaaactatctaaaatgaaaacagagaaaagtgagccatgagacaacttcaggcggcctaatgtgtgggtaattggaattcctggagaagaggagagagaaaaagaaggatgaaaacatattggaagaattaacggctaaaattttgcctaatttgatgacaactataaactcacagatttaagaagctcagtgtatcccaagcataagaaacttgaggaaaatttttcyaaggtgcatcataatcaaattgctccaaaccattgataaagagaaaatcttcaaagcaactgaaggaagaagatacattatgtaccctacaaagcaaagagcaggttgacagccgatttctcatttcaaataatgcaagtgagaagaacatggagcaatgtcttcaaaacaatgaggaaaactgccacctaaaattctttattcagaaagtatatctttcaagaatgaaggtgaaataaatttttttagacttacaatgctgaaagttttccttactaggagattcatactccaagaaatgttataggaaatcaggcagaaggattttcataacagatagaaatctagaactcagggaggagaccacccctcatattgtcttatgcccaatttctgcctccaaagaaagaagaagtaaaaactaaaaggcagaaatgaaatccacaagcagacagcccggcgccacaccctgggcctggtagttaaagattgacccctgatctaattggttatttgcataaaaaaggcactgtgaagatccctgtcctgttcggttcctttctaattaccagtgtatgcagcccccagtcacgtacccctgcttgctcaatcacgaccctctcacatggacccccttagagttgtgagcccttaaaagggacaggaattgctcactcggggagctcagctcttgagacaggagtcttgtctatgctcctggccaaataaaccccttccttctttaactcggtgtctgaggggttttgtctgcggctcttcccgctacagaaccacacaaaaaaatgagcaatgggaatggtaactacatgggtacttacgttagattctcttttaattttaaaaatcttccaaaaattgactgattgtccatccaatggaatatgatgcagccataaaaaggaaatgaagttttgatacaacaagtagatgaactttgaaaacattatgcgaagtaaaagaagccagacacaaaaggttgttcttctgtagttccatttgtatgaaatatccggaataaggaaaatcatagaaacagaagattggtagttgccaaggacttgggggtgggaggactggggaataattgcttaagaggtgtggggtttgcttttgctttaggggtggtgaaaatgttctcagactaaatagaggtgggggctactgaatcctaaatgtcacttaattgttgactttagtgaattttatgttatgtgcatttcacttcaatagaaaattttaaagattgacttatttcaatgaaaatagtaacaaaggagtgtgacgtttttaacgtatgtacaattaaatgtgtgacagaaaaagcacaaagaccaggaagcaagaaatgggagtaaattagcataatgtgtgtaagccaaaagtatctgagacagatctcaatcagtttagaaaatttattttgccaaggttaaggacacacccatgacacagcctgaggaggtcttgatgacatgtgcccaaggtggttggggcacagcttgattttatacattttcgggaggcatgagacatcaatcaatacatgtaagatgtacattggtttggtccagaaaagtgggacaacttgaagtgggggcttccagatcataattcgatgaaaagaktttctgattggcagttggttgaaagagttattgtcaatagaaaggaacatctgggttacactaagggggttgtggagaccaaggttttatgatgcagatgaagcctccaggtagcaggcttcagagagaatcgattgtaaatgtttcttatgagacttaaagagtctgttctatctgaaattccaaaaggaaggagggtataaggaggcatgttcagctcccccttcccttcatggcctgaactggtttttcaggttgactttggaatccccttgctgagaggagtggtccattcagatggttgagggggggcttagaattttatttttggttcttgtactccatgtgaagtgatataatatcaattgaaggtaccctgggataagtcaaagatgtgtactataaaccctaaagcagccactaaaataacaaaacagagctatagctaataaagcaacaaagggagggaagggggaagcataagagatcctcaacccagaagaagatggtaaaaggtaaatctcaaaataagtattttcagtcaaaacagctagacaggtcgggcatggtggttcacgcctgtaatcccagcactttgggaggctgaggtgggtagatcacttgaggccaggcgttcgagaccagcctgggcaacatggtgaaaccccatctctactaaaattacaaaaattagctgggtgtggtggtgcatgcctgtaatcccagctactcagaaggctgaggcaggaaaatcacttgaacccaggaggtggaggttgcagtgagccaagattgcaccactgcactccagcttgggtgacagagcgagactgtgtctaaaaataaaataaaataaaatacaacagctagataaaaaaatatgtaccgtatgactccacttataaaaaaaaactctagaaaatgcagacttgtcaattgtagctgaaagcacatcagtggttgctaagtggggggcagggggtgggattaccaagaacatggatgtgttcactaccctggttgtggcgatggtttcataggggtagaaacatgtcaaagtttatcacattgtgtactgtaaatatgtgcaggttattataaagaagttatacctcaattaagctgttttgytaaaaaaacaaactaaactctgtgtgttggatggaattattttctccactttatagatgaagaagcgtaggcatgcagagcttaatgatttgcctgaggtcaagtaaaccctgggcacctggtttgaagcctacatggaacaaaacaaacatagagaagtgagaccgcttccgtggaaactatagacccaaaagacaaatagtagaatttcaggaagggagaatgggaggacatttcaatcactgcaaagagcacaaaccacagacacaaagcgcatggtgtgtagagcacagcgcacagctgggaagggcattcccagttgtgcatgtgtgagtggggtaggggcagaagaacagaccagacctgtccaggggaaccttggctgggattggggtggggagctccttggatcccatgctcaggagttgaacttccatcctctaggacatggagagacttagaagtgttttcagaaggagagcaatgggctcaggtgactcttgaggatgatacatatggaatgaaggatggctgggctccccaagcccctggcgtcttcatacgcagggacagccttttctgatgttgctccctgcaggttcccagtgcgtctccattgtaaacttttggtggtcctcagaatcccaggtctgtgaactctgaaaggctgtttgttctcctccaccctcctctactcactgctctctgggtttgggtccatccctgtcccctcccaggttcgaggtgaattgctgcgggagagagtgcagcggatggaggcacaggagggaggctttgcacagtcgcttgttgctctgcagttccagaaggcgtcccgggtgaccgagactctgtcggcctacaccgccctcctcagcatccaggacttgctcctggaagagctgagtgcatctgagatgctgaccaagtcggcctgcacacagatcctggagtcgcacagccgggtgagtgcaggcgctgggaaggagagggggacagagctgggtctttctggtacctacctctgcatcttcctctatgaaacaggctgcaacccccgtcctgtctgtgctgtggggttgtggtgaggattaaacgaagtgacatattggagagtacttggcactctctcaaccaaagatggctctatttcattgctctgagaagcaacccttttggattttaacatctctgaaacttggcaggtgccatgggttcattggcagtattgtttytttcattgtgctagggaggacaacagtgtatcttcctattagcagcatcctaaatgcaacagtgtactgggttatttattatttwaaaaattctaattattagcattatcgcaacatgctacattctttccaaaatgtgagaggtatatccgtaaaacaaaagctatggtaataactgttttggtgactaattttaggtcttttatgtgtagattttmgaatttcatttgttatctattattatcataattacttataataaggaaaaaacccctcacatttattgaaaccctagtatggggagggaagcgctactaagttgtaaatagacatgctctcacttcagtgttaataattctttacttagttatacttattaaggcaggagaatcgcttgaacccaggagatggaggctgcagggagctgagatcatgccactacactccagcctgggtgagacagagcaagactccgtctcaaaaaaaaaaaaactgtgtttcttctgaagtacagcataaacaaaataaaaaacaaaactaccatagaattgataaagtgaagagatttttttttgaaaaaagtctaataaaatatacaaacccttggcaagagcaaccattaaaaaatataaaagacaataatattaagagtataaaaagcaacaygactatagatgcagtagagttttttaaaataagagaatgttatgaacaactttatacagatgaattcaaaaactgaaatgaattcaaaaactagaaaaatgcaaatcaccaaaattggctcaagtagaaaaaaaaagtctgataaccctcttgccatgaaagaaattgattcagtactttaaaatcttccaaaccacacaaaagacacccaactccagtagtttcgtagatgagcattgccaaagtttaaggtattttgccagtctcatatatgaattattccttgtattagaaaaataggcaatattcctcaactcattttatcatgctagataactttaacaccaaaaccagacatgaacagtaccagaaagaacaattatacttcaatcttgcatgtgaacatagatgtaccatttgaaaacaaaatagcagaatacagccatctataaaaaattaatacattatggacaggttgggtttattctagaaatataaggttggtttaacattaaaacatccatttacaaaattcacctgattaacaaattaaaggggagtgactcgtgatcattttagtatatagagaatatgtctttatattagtctgttcttgcattgctataagaaataccctgagactgggtaatttataaaggaaagaggtttaattggctcatggttccacaggctatacaggaagcctgatgcatctgcccagcttctggggaggactcaggaaacttacaatcatggtagaaggtgaaggggaagcaggcatgtcttacatagccagagcaggaggaagagaagtagggggaggtgccacacacttttaaacaaccagatctcataataactccatcacgagaacagcaccgaagggatcgtgctgaacaattcatgaaggacccccgtgatccagtcacctcccaccaagctccacctgcaacattggggattacaattcaacatgagatgtagtcccacccaaataccatgttcttctcacatttcaaaatataatcatgccttcccaacagtcccctagagtcttaactcattccagcattaactcaaaagtccaaagtccaaagtctcatctgagacaattataagtccattccacctatgagcctataaattaaaaaacaagttagttacttccagtgatgcaatggagttataggcactgggtaaatattcctgttccaaaaaggagaaattggccaaaagaaaggggctataggccccaggcaagtctgaaatgcaggatggtagtcatcaaatcttaaagctccaaaacaatctcctttgactccatgtctcatattcagaacatgctggtccaagggatgggctcccaaagccttgggcagctcagcccctgtgactttggaggatttagccccaacagctgctctcaagggctggtgttgagtgcctgcaatatttctaggcacaggatacaagctgtcagtggatctatcattccagaatctagaggatagcagcccccttatcacagctccactaggcagtgtctcaatggggactctgtgtgggggctccaaccccacatttcccctccacactgccctagcagaggttctccatgagggctctgccccagcagaaggcttctgcctggacattgtgacttttccatatatcctctgaaatctaggcggaggctcccaagacccaactctttcattctgtgcacctgcaggcttaacaccacatggaagctgccaaggcttacagtttgcatcttctgagcagtggtccaagctgcacctggggtcctttgagctgaggctggatgcagggagcagggtcccaaggctgcacagggcagtggggcactgggcctggcccaggaaaccattcttccctcctaggcctctgggactgtgattaaagggctgccgtgaagttctctgaaaasccttctgtttcccattctcttggctatggtgggctgcaaattttccacacttttacactcagcttcccttttaaatataaggtccagtttcaggtcatttctttgctcacacatatgaacataggttgttagaagcagccaggttacatcttgaatgctttgctgcttagatatttcttccagcagataccctaaatcatcactctcaaattaaaaattccacagatctctagagtaggggcacaatgccaccagtctgtttgctaaagcatggcaaaagtgacctttactgcagttcccaatgagttcctcatctccatctgagacctcctcagcctagaattcattgtccatatcacaatcagcattttggtcacaacaatgtaacaagtctctaggaagttccaaactttccctcatctttgtgtcttcttctgagccctccacactcttccaatctcctttggttaccgaattccaaggctgctttcacattttcaagtattgttgtagaaatgtccactcctcagtaccaattttctgtattagtctgttctcacattgctataaagaaatacctgagactagctaatttgtaaggaaaggaggtttaattggctcatgattctgcaggctgtacaggaagcatgatgcatctgctcagcttctgtggaaacctcaggaaacttacaattatggcagaaggcagagggaaaagaggcacatcttacttggctggagcaaaaggaagagagaatggaggaggtgctacacagttttaaacaaccagatctcactacaactcactcactatcataagatcaacaccaaagggatggcactaaaccattcatgaaggatccacccccatgatccagtcaccttccagcaggcctcacctccaacactggggattacaattcaacatgagatttaagcggggacacaaatccaaaccatatcagtctttaattgaatttaacacccattcaagataaaactccgtagcaaattaataacaggaggaaacctccacagagtacttagccaaagcccacagcaagtgttacactggaggtgattagcgtggaggcggatcactgccctaatagagcctgcagagggaagagcaggtccaaggtcatttagtgagttaggggcagagtgagacaccaggaacatttagcctccagtgcatgattcatctgctcatcctaagtgcccaagaaacaccctcagtacagccctaaaacacatagttgtgctgtttacttgagaccacactgatttctattagtataataattggagagtacaacacttacattttcgattttatcctaaaactcttttgagtaactcctacctctagtttgtttagaacagagagttaatgtgtcctgagtggggaacagctgataaatcagatgatgccgtattcttaaatgagtgttaaggcaatgcatatgatacactcttatttgagtttgcatttgaaatgaagacaagcctgttgttttgttccagatattagacttgcattctgcaatttgctcattctgtgtaaaccactttcctattgggaatgggcttttaggctgttaaacattcaggagaattaaaaaagcatgaaatagaatgctttggaagaaattactcctaagaaaactatatcaagtgcacctcatctgatgaaagatttagactcattttgcaaaattggaacatatgcaaggctcagttggatcagaaggccaagtgacaatgataggcaaatttaaatggggtggacttactcctaacagataatgtgaccccaaacaaatggtacccactgtatttgcatttcagtttaaattgctgtgtgtttactttcccaagcctcacctggcatcttcctcttcttcttctttgtttattgttttgagacagtcactgtcacccaggctggtgtgcagtggtgtgatcttagctgactgcaacctccacctcctgggttcaattgattgtcctcccccagcctcccgagtagctgggactataggcatgcactatcatgcccagctaattttgtatttttagtagagacaaggcttcaccatgttggccaggctggtctcgaactcctgacctcaagtgatcctcccaccttggcctcccaaagtgctgggattacaggtgtgagctaccacgcccagcctcggcatcttctgatcttccctctgcctttctccctatggaccactggccaccatctgttgattctacctgagctttctgctttccacctttcgctgcccagcttcactagtctgatgtatctagaccggaagaacagaaataaccttgatattaaccagcatcaatggagctctcattatgtccaaagcagtgggctaagtgtttaaacctcatgtccatcccatgacattttcatacccattctacagatgaaagagctgaggcttaggaaggttaaatcatttcaccaaggtcccacagctgaaaagcagactttaaacctgcctccaaagcccatgttcctgtcctaaactcaatttctgcctacctccctttctccctactctagttacccccctgcacggtggccaaggggatgtttctgaaaaataaaagtgatgattcacagccccatccccagctctacatttaaaaatcccacctttcaccactccctctctcagatcctgcmttttagcccctggaccttcttgctgccccctgagcattggagacacattcaggcatgggtccctttgaaggatctctgcctagaatgcttctgctctacctccttgcaaactcctatctatattctaagacaaacccaaatgttacttcctctgtgaagccatccatgattccctctggcagaggtggtctcttccagctcccgtaaccctccatcccgaagcagatgatggcatttcccatctctgcaactgttgacatgagtctctccctcactagacagtgagttttcatgtctcattcacccctgaatcccccaatctattatctctctctctctccccgtttctgtgtgtgtctttcttcccctccttcccttttccctccctccatccacacttccatccatccatcatcaacatctatgtatstattcattcattcagcagatacctgtggagtgattactaggggcgttagagctgagtgatgggacccagagtcagagacacctgaaatcacccctgactctgcctcttgcccagctctgtgatttcaggagatttcgttatactctcttgcctcagttaccttatacataaaattagatgatgaaaaattcctatcttgtgttattttgtgaagattaaaccaactaattcatgtaacttttataatctgctgatacaatctggcaccatattggcattcagtaaatgccagctgctgtcatccccatcatcatcatcattgttgttattgttgctgtttcttctttgatgagctatgcactgtgctgactgctgggagaaaggagaacatgtcaacgatgctcctgagtccctgacctcagcatttaaaatctggtgaggaaatcagctattagggaagacaattccagaaccaagttttggattcaagttgttccaggtggcaggcaggtgtaagggtgcaggggtttggggacaccatcagcagattataaacgtgggacacatttccacctctattccattcctaaccagggctctcctggtgcttgaaaagctctgtgtgttccaccgttcctctgatgacacagacaggctcaggtgtgaccctcccttcttgaggtgggctggggctggcatctgggtagacgtggggtctctgtctccagctcctggccatgctgacagcatgacagcatacactgctggaactccactgggctgtgtttccttgtgggatgctgcagcgagagggatggtcatagttccacatctcagcatgctaggagccctgctcaggagttctcgaaggcccagcacccaaatgcttgggggggatagaaggttctccgtgcgatggtgtccatgctatagagagatgcagtctatctctggcggattttcttctgtcatgkttcttgaatagtgtttcagagtctttagggggctttgagacccttttgagtgtttgatgcaagctttggcctttctgcagaaaattagaccattttgtacctatttaggaggatcaaggaccaccctctcatggtgaagtccaaccaaggcctcttaggatttaacaccctgtccaccttccagtcctaattatagtactgaccaatctggtaaatactgggttaaatgtgcctgcattctccaaggcctggggccctcctgcctccgcccacaacccacctaagcaggctgtggacagtttcttgtgtgagattatctaatcctggtggcctaagaatgcagattacttctgtttggccaaggagagacaatgtagcttagtggttaagactgcaatttcagagccagctagcctggcttgaaattcaggatctgccactcaatagttacatcatctgacaaattaatttaactctgtctgcctcagttcctttacctataaagcaagagaacttagagtatgtattctgaaggattgttgtaagtgttcagtgagattcacgtatggaaagtacacagagcagtgctcggcaccctgatggtactggtggtgttagccatagttgctgtgttccagcctggctttcgtccatgccgggtgcatgcagataccccaccatatgcagtgacaggtgccagccaccaggcactttgcaggcagggagaaggagacacagccctgccctcaaagagctcacactgtagcagaaaggcacaggacagtgatttcaggtgacaggaaacagagtgcatgcaaggggtagtgagtgggcacatgaggagagggcatctgtgtctcccaaggaactcagggatcctttcgctgaggagcccttcaccaaggagtttcttcttaagcggaggggtgaaagaagactggggattggtcaggcagacagagaaaggcactgcaggtggagggaacggcctatgtggaggcatggaggtgacacaggggtgagagatcgtggtgcactcacattgcaccatgtggcacagctggatggggaaccaggcaagacagagtcatgccagacttgtagcaagacacccaggaggtcagattttgtcctccaccccacccgccttgtgcagtggtgcttaccctctgccccttccttgtgtaggagctccaggagttggagaggaagctggaggaccagctggtgcagcaggaggcagcccagcagcagcaggccctggcgagctggcagcagtgggtggccgatgggcccgggattctgaacgaacctggggaggtggattctgaaaggcaggtctctactgtcctgcaccaagccctgagcaagagccagacattactggagcaacatcagcagtggtatgccgtgtgccccgtagcactcaaagatattagtccccagcagtcctggagaacctggcatctccaactcagcccacccgtacccacctgggctctcaccctcttgcctaaggtgtcatcccattgctccaacacgagctgctggctttgtagcatactctttcttccctgatgcccttcttttttaaatttaatatcattgaagttttaccaaacgtaatatttttaaactttttattttgaaatatagactcacaagaagttgcaaaggtagtagggagagtgccatgtacccttcccccagctttccttcttggaaacatctgacataatcatggtatgtgaattgacattgtcacaagacagtgaactagactacaggccttattgcaatttcaccataagcatagtattttatatcctgcttttgtaaaattataaaacagacagacccccagtctttttgttgttgttgttctttgcgttgtttttcaattcacattaggcacttagccttggctgtggcattaagaatccttggaaaaacacaatttttaacagcttcatacttttccactgtgaataaaaaatggacatggaaaggactggaggcaaagtctatacacagygtggttaatttttgcaaacacacgcacacgctaattggaaggaaatagaccaaatttcagtggatgtgatttctgggcagtgaaattacagatgattttcattcatcctatcacgctcttctgtgtaaatgcatcaaagtgcagttctgtcccatygaaataattgtgagggggccccatctgcgtggttggagggaaatgctcaaaggcattggcttgatttagcctgggattttagggcatatagtattcatatgctcctggaggagatggcttgtgwtcaaacttttgatttgagttgcacttgcagaaggtctggggtgtattagccaggaagagcacgaggcagatccacaaagctgacttgcattagctaaggcatgtgttaagcagaccccctcgtgtgggcgtcaggaagcctcatgtgaaaaggtgtcatccttttgttctgggtctgcatcaatccaagggcacatggtgggtgtagaccccagatcttggtcttcttggtcatcaccatgaggactgatgcagagttttcaaagcagcatcacagagatcaccctgtaaagccataggaaagtctccttatagctcccatgaaacttttcacttcgaggagcctccttctgaggaaaccctccttgacatgttatgtgcaaagtagcctaggcaagaaaaggaaggcagtctttctggccatctctttctatggacatatttttaaaatcatatggctgagatgtgtgcttctttgttatttaaataactagatgatctcatagtatcactttataacaaaactgaacttacgtatattttattttcactccagtttgagagaggaacaacagaacagtgtcgtgctagaagacttgttggaaaacatggaggcagacacctttgcaaccctgtgcagccaggtgagaaggtactggcagggtctgaggccaccccttgccagcacgtcacttcatctttttctcagaatccacatttcctcacctccaggatggtgatgaaaagccagccttggaacctgcagagcagatgtgtgcgaagctctagcatgggcccagcacacagagggtgctcaatcagtgctaatggcagcaaccgcaaccataatcacatgtgccccagtcgatgtcttttctgtgatttggcaggcacccaaatattgtccttcttctcaatctttaactaagtttaatatacaaaaagtaggttctaccgggaagaaagtgggtaagagaaaactgggccagagccatcaatcagtgatactgcaccccacactacacctctctgagtggagatcagccaacctttctcatccttggccagagttgcagactcacctcccttcctgatacagagccctgaggctgtgcacggagccttatgcagtcatgtacctgactgtctgctaccgatcgggttttatacgcatcctgcgatgggcttcctgtgcttctggtgtctgtaagtagcaggaaatacaacttcagacagtggtgaatgcgagccacacgactccagagaggtgytcgctgatgcagtgacatcagggtcatgttctgygattctttccacagttccttctcacagttccagctgcaataactttcagagcaaggagggaagaggtcaaagaactgccaccatgcccgttctttctcatcaaggaagcaaatgcctccaagtccctgcagcaggtttccctcgcaacctgagagctgacccgtgggccytgctagctgcaggggaggtgcgagtcactttgccccccagcctctaagaagggagtcagcaggaaggaggggttagggcgcttttaggcgtccagctggctgcatccacaggcacaccgagcttcctgaatgaattcgtttcctatcactgctgtcacaaatgaccacaaacagcagcttatcacagctacaaacttaccttaaagttctggaggtcagaaatccaacatcggtttctccaggcaaaaatcaaggtgttggcrgatttgcctgcctttcggaagctttagggggagaatctgtttcctgctcacttaagtaattggcagggttcagcccattgtggttgtaggactgaggtccttgtttctttgctggcttccagtggcacctacattccttggctcatggcctcctttcttcatcttcaaagccagcaaaattgcatctctctggcccttcttccatcctcctcacatctctctctgacctaacacagcaggaaaggtctctacttttaaggacccacatggtaattatattggaaccacctggataatctaagataaccactttcccaccctatctcaaggcccctgaccttactcccacttgcaaagtacccttcgccttataaggtgacatcttcgcaggtcccaggatgggacattttggggagggatcattattctgttgactgtgccaaacaaggtgccagtgttagcactggagtgacagtgtccaaacagggcaggggaggagctggtrcttcctgaacacctgccatgcctgttattcatttaatccttgcagaaagatgggaaacaggcagtattatcctgttttatgaataaagggactgaggcaaagagaggtggtgagggcatgagggcccgccactgctcgtggggggcttgggattcagcccagcttggtgatgcacatactctgctcttcctgaccgactgtaaaggatctgaagcagatgaccaccccggcctatgtctctgcgtaactgagccatctcccactctcaactttgattcccccacctttatctttgtcactttgagacttcacagaaagccagtgtcaccagcagaatttcaccaggttcatttctagattctgggcccttttaaattgtgaactctgtatgcatctcagtctgtttctgctactacacaaaattcctagactggataatttataaagaatagaaattctttatcaattttctcataattctggaggctgggaagtccgaaatcaaggtacctgcagatgcagtgtctggtgagaactgctctctgcttccaagatggtgcattgttgctgcatcctttggaggacaggaaagccgggtccttatgtggcagaggggatgggaaggcaaaaagggctaagctagttccctggagcccttttataagacactaatcccattcttgaaggcagagcccttatgacctcatcaccttcagmaggcccccctycctaatagtggcatttgtggttaagtttcaacatgagttttggaagagacacaaatgttcaaacaatagcactctgctgaagaattggctctatgcagaataaatactgccagaccggaagctctgggcagcaggcaccaggtaggattgttttttttctctgtccccaacttggtgctttgtatagtctgcccaataatatctactcagctgaatttctttcttcccaactcctgtgtattaataagagtcctccagagaaacagaactgataggatgcatctctgtagagaaagagatttattgaaggaattggctgccgtgattgtggaggccgatgagtccaaattctgcagggttggcctgcaggctggagactcaggaaggagttgcagttcgaatcccaaggccatctgctgaaaggattatcttctgctcaggactggtcagccttcttgttctctccaggccttcagctgatggctgaggccagccacattatggcaggccatcgacttccctcagagtccaccaatttacatgttaatctcatcccaaaacacccccacagaaacaacaagaggaatgctcaactgaacatctgggcacagtggcccagccaaatggacacataaaatgaaccagcacatccagactggaggaagccccatattttgccgttttctttttgtactagagaaaagaatcatcagggaagctcagtcctccatttctctctttgtccttactcctcttgctgctccttcatcctgtggagaggagcagggaggaagtggggagagaggctgtccactggccactctgggcctctctgtcactctcctttgcctagagagctgtgtccctgtgttgctttatgttccatttctttaattttttttttatattttaattggggacaggtggtttttggttacatggataagttcttcattggtgatttctgagattttggtgcacccaccacctgaacagtgtacattgtatcaatgtatagtctttttttttttttttttttttgagatggagtctcactctgtcacccaggctggagtgcagtggcgcgatcttggctcactgcaacctccacctccctggttcaagcgattcccctgcctcggcctcctgagtagctgggattacaggcacacgccaccacgcccggctaatttttttgtattttcagtagagacggggtttcaccacgttggccagactggtctcaaactcctgacctcaggcagtccacccgcctcagcctcccaaagtgctgggattacaggtgtgagccacgacgcccggcccaatgtgtagtcttttatccttcatccccctcattcttccccctgagtccccaaagtccattttatcattcttatgcctttgcatcctcatagctcagctcctcctcataagtgagaacatacaatatatggttttccattcctgagtttcttcacttagaataatggcctccagctccatccaagttgctgcaaaggccattatttcattccatattatggctgagtagtattctatggtgtatatataccacattttctttattcacttgttggttgatgggcactttggttggttccatatttttgyagttgtgaatcgtgctgctataaacatgcatgtccatgtgtctttttcatataataacttattttccttgcatatatacccagcagtgggactgctggatcgaatggtaattctacttttagttctttaaggaacctccatactgttttccatagtggttgaactagtttacattcctgccagcagtgtaaaagtgttcccttttcacactttgtggtccatttctgtctgtagatgtggcatcagattcaaagctcttgacccatgtgaatgctttttgtgtcaccaattttagtaagacttgacctggtgaattgacttgtctggaggattactgatcagggaccactggagctggaagggctgtgataatgagctggcctgtccccatattgactggtgggatcccagctataaaggtttagaccctgcctcaggaagaggtgaatctgcagggtgtttatgaagtcactgtttatccaacaaatgtctgttggtcaccctctctgttccaggaatggggttaagtgctggggacagagaagcgtgtgtcactgacttcatcctaagagcctagttccagaggcacactagaaatgggacagttacagcagagttggttaaaaccaatgtgagatcagaggagggacacctgacccagaagatggggtcagggaagactcatgtagagtccaaaagaatgcgctggagagagacagagagtagcttaggagaaatgtactctaggctgaaggaagctcatgggtaagggctcagtggcctgggcgagcaggacggtcagggaagaacaagtatttcagtgtgacagtggagggaggccatggatggggagcgtcaggacgtggaaggagctttggtatttggaacagcacctttcctcgtgccttcactgaaagcacttaccaaggtcacagcgaccccatgtttccaaggggtcgagtccctgtgtttgtgtctcctgacctctctgtggtctctgaacccccagcccacccttctgaacacgttctctccttggcttccggcacctggacttgttccctcccacccctgcctgcccctgcacaggcccctggctggacactgctccttctcatggcctttgggcacccaatagctctgtcctggggcctcttttcctctccagctgtccaaagtgctgggattacagatgtgagcccccatgcctggccaaaatttttaattttgaagttattttagattcacaagaagttacaaagctagtatagagtttcagagagtttcactcaattttccccaatggttcctgtcagacagcatcagaaccaggaagttgacatcgatataaaatgtacgtatagttctctgtcattttatcctatgcacattcatgtaaccagcagcaccatcaagacacagagctgtcaaccaccacaaaggccaccctgggctgcccctttaaggccacacccacctcccctgccccacacctggcatccactgccgctctccagttccaagtctcatcacgcccaggtggttacatgcatggaatcacgcagcacgtgacctttggagactggctgtttccactcggcataatgcccctgggatccttccagttctttcttctgactgcagagtggtatcctgtggcatgggtatagcacagtgtcttcaattgtccactggtttagggacacttctgttgtttccagagcctgcactgctcgcctggtgcctaatggcctcacagaatgtgaggaggaggagaaagtacattcattttgaatcaccctgctgcagggcttttgctgtggggatttgggtactgccccagtgacttgagagcagttggacgggatggatggaggctttagaagcgtcctggggagccaaggttgctgaccaaataggttttttttgacagctctgaaagttcgggaacatgttttccagactaagctactgaaatatttatcactccaggacagaatgtcctcagaatgtgataaattaaaaatgatggttcaagttgagaggcggcgagggtctgaactccctctgttgtttcctgtaggagctgagactggcatcgtacctggcgaggatggccatggtgcccggggccacgcttcgccggctcctgagtgtggtactgcccacagcctcacagcctcagctgctggccctgctggattcggccaccgagagacatgtggaccaygcagctgagagcgatggcggagcggagcaggccgacgtgggcaggcggaggtgagtgccgtggaggggctgcctcccggggcacgtccctgtccacaagggtccccatgagtcctcraggtcatgggaggcccatgtattttgtccatactttttaattttgttaccaatttattttttaaatagaatcttaagaaaataagttcacccagagccataaatatttcatgcatgcccattaaagaaaacgtaaaaaaaaaaatgcataaaaagaggaagaagagaaagaaatatccatggttttatgacctagaaaaatgactgctagcatcctgttacatttcttcctccagaatgtgtttctctgctgggttttacaagcgtgtgtctgcaagtgtgggagcatgtgtttgtgtgttggtatgtaaatgtgtgagtgtgttgtgcatgtaaatatgtgtatttgtgtgtcgagtgtggagtgagcacgctgtggatacagccttgctacattctgcatttcagaatcttacagcagaagtgattttgctccttaccttttaacgctcatgcaaacatccccctatgtaattcttatcccattacttagattctatttcctgctagtgttattcatttaaattttattctttcaatgttattgacacgtggcacaggtggatattatttttactggctcctcatgctaaggggtgtagcatagagcatgtaactgtcatcctgtcacttgacattcagtttgggcccatttttttttaaattatgggtaactctgcatagacagtctcctttaggatggggccccaggtgtgaatttggtcattaaaggctttttatggggaaaggcaggaaggggtgtggagtaaggcgggtttggggggcagccagcagtaccccttgaggatggagtaggtggggaatgaggctgcaaggaaagccatggccaggatgaaaacattgcaccaggatgcagagctcacagcctcagcaaggatgcagaggaggccaggagggcatctgggagcccgagagcctgctgaaccatcatgactgtgtagatagcatttgtcctgagaaaaggggtaatgttttccttatcagagatactttttatcagagtatctgaccccaaaatccaagaagcgctgctgagggtgaatagagtctgaccagggtgagggggagggtggggaagagggaacatctgygggtgtgggcaggaggccacagtgtcgaagagccttcctagtggccttggggcccagtatagtcaggaagtgggttgtggaccgcagtcagagggctggctgcatgttagggggtcagaggtctggttgttggcgtggtcagagggctgggtgtgggctggtcagaggaacaagagggagccagaaggaggccacctctgccaaacggaatgtccagtgacaggatgacagttacatgctctatgctacgctcctccatggaatattaggagccaatcatattactattattaataatattaaaaataaaaccaggtttcacagcctggttttcccagtgtgctgcctgcctgcgtgcacggacatgcaggtggcaagtattcaaggtgactctggagtaggaacgtgtgtggctgcggggaggccacttccgcctgcctaccacccctgtggacyttgtttttggtgcttccccttcagccagcttagtttgggaggccagtggggagagatggacaggccaagctgggacgaggcaagagggcttgaggtcaatgtcaccatgggcatgagcatggcctttctttgcccagcctcatggccaggcagcctggatgactctggagtcccaggccactaacccaatctctgagggcagggcatgcactattcttgtgtccccagcagctagcatccggccattacatcagttatgagtcttgggtttcaagcaatgggaactgaataattaatccaagcaagaatggggtgtattgagggccatgtcaaaatccaggaaagagccagtgttcaggcctcaggaagggcagggccagggaagcactctgggcatcctctcgggtgctgccttcagaagaccgcccttctctgctccaggagttagactcctgggagagagcctgcctggcccagtgtggaagaggctccatctccaccaccacctgggcaggtgtgagccgccaaggcagggggaatgaatctagcacatcctttattggcttgacttgacacctcccactgtcccgggcaacactctccaacgccctctccttcagtctaggaccacgcaccttcatggctttagggctccctgcctagcccaccttccaggcttcgcctgtactttcccaacttctgtatttgtatatgcataaagcagttgtggagctcccactgtgtcctctctcttaggtactagggctaygtggagggtaagagacaaagccctgcttgcgtagagcattcatcccagtgggggaggcagccagtatataagtcagtgcacagatcccattccttcgtgagtgccccaagggctccctttgctcaaatgwctcccccaacccgtcagccttcttctgtctgtgatcccatagacttggccccttgagggcagaggttgcatcttgatgaggctgcagaaggcgtttgatggatgtgcagtgaatgagtgaaagaataaatggtgaacactctggggatgggggttcctagtggcaaccaaaggtggcattgagagatgggtaggattactcatcacttaaagattctattctttttttttttttttttgagatggagtctcactctgtcgcccaggctggagtacaatggcgtgatctcagctcactgcaacctccgcctcctgggttcaagcgattctttctgcctcagcctccggagtagctgggattacaggtgcccactaccacgccctgctaatttttgtattttttagtagagactgggtttcaccatgttggccaggctggtcttgaactcctgacctcaggtgatctgcccgcctctgccttccaaagtgctgggattacagtgggattacaggcgtatttttgaaactataagactcccttcttgcctgcaggaaacaccagagctggtggcaagccttagatggcaaactgcgaggagatctgataagcagaggattagaaaagatgctgtgggcccgcaagagaaagcagaggtaatgatgggcacctgctcatgtggctggggagggggtgagctaagctgcctgtgggccaggctggggaggcaggaggtgacaaggaaaggaggttgctgcaaacagacaaagatttgtgaccctgaagaccacaaatctttattcagtgggctgagtttagaagctgaagatgagcttgtggctagcagtgagagaatgttctcaacatttattaacatttacattctgtatttrttttagctaatggctatttttaatggaatgtaattagaagaattccttatagctactgttcacaaagccctttcatgtcttgctgcattgagccttccagaaagtggggatgataaaatggaagctcagggaggtcagaagaggccccaggccaacagctggtaaacagtggtcatgagatttggggctgcctcactgccccctttattttcttaaacttccaggcttgcgctctttaccttcaccccaatgcctttttccttggctgtggctatcacacacctacagacagagggaagtgaggggcagagtggtctyaaattgctgcaaaccattgtccaatgtcttctgtgattccagctagagaagatgtggaaacaaaaagcaacatcaggtagattcataaggggttaaacagtgatatcagtgtgtagtccagaaacagtggctgttcaacggacatgtctacctcagtcctgccccttccacaatttctcagagctcagttgaaggtgctgagaccgagcttcatagattactcatgataaagcgcttggaaccattagtagcctggttatcacaatatagtctcagataagttagatcaggatattggccaagagaagtacatgcaatcctagaaaaagaaaattaaattcattctatagaactctaaaatattccattaggaacattcctaggctgcactaatagaagtggagtggatacagatcaagagacatgatggtcccactgtcctggctcactctgcgggcctttgctctgcctagaggcaccatggtggagacacagagctgggtttgaatccttgtgcagacttagtagctccaagggcagtaattagtggtgatggcaatggagtggaatctaccacatgccttctgggagggtcagcaagcctgccgttgacatgcagcaggtgcatccccagtgacatggccttgtcctgccctgcttgggcagagagagagcgctgtggctttcaggatgtatagggctcttggtggtcgtcacgatcattatcaagagcagcctgggagtcaggggttggactgcccatggccaggattccagcagcttttttatgggacattctcaaagtgtgccacactcttctatggcaaacgcattttgcctgacttctaactgttgccttgtaaccaggtttcattagcctgcttttagagtgaggctcrtaggtgtactcataaatgtttaacaattggcttgtggggaggggggcaktggtttctgatttgtagcatttgccagtttccatggtgtaaatattcccaccatggctgatctgatgtcacactaacaacatgatgacagtgggctcgcaaaactcctgaaaatgggccgggtttggtggcttatgcctgtaatcccagcactttgagaggycgatgtgggcggatcatgaagtcaagagaccaagaccatcctggccaacatggtgaaaccccgtctctattaaaagaaattagctgggcatggttgcacgcgcctgtcgtcccagttactcaggaggctaaggcaggagaatcacttgaacctgggaggtggaggttgcagtgagccgaggttgtgccattgcactgcatctgggcaacaagagcgaaactccatctcaaacaaaacaaaaaactcctgaaaatggaatggtcatgagccaggaagagttgactacagcacaccactgttacaggcttcagctaattttacagcaatctggtgaccaagggggaaaataaccttttgttaaaatggcactgggttggggaattcaggacccaaggagggattctcttggagaactcagaacactccagagggttcattgccaaaaatattgaatttgatmttttgctatttctttagcatattaaagaagacatgtctccctctcagagagaggatgatattctctggaaaaggaagttggccacacctgtcactggagcccattggcgaactggcccctgtacccattgtaggggcagaaaccattgatctattaaacacaggagagaagctctttatattcagaaatccaaaggagccagagatctcactgcacgttcctcccaggaaaaagaagaactttttgaatgccaaaaaggccatgagggccttgggcatggactagcccaagggaaagacctgcgggagcatctgaagagagaagggatgattttctcctgcccgccggtgtttgtgtgtttataatgcacaactcgcaaatataaattgcacatgcagaaggcacagaccccgtagcgcatgccaacttgcagggactcggtttaatcttgtctcatgaatttccagatggcccactctcttccatatcacaaggacataaacactccttctttcagccccacctccccagggccctggaggagacccccaccctgcaatccacaccccatcctctgctgcagaagctatggtctgtgtggtgacagccagattctctactcttatgttttgtatttgttacatattctatttttataaagggaatttwaaaaaataaatgtgttttgcacaaagctgtttattacaaaacccatgtttgctttatgtaggaagcatttatttgaaattacgtcttacgttttgttccctgtgtggtgttcaatagagagattcgccctctatcgctccagttgccaaaacatgtgtcagcccctggggtctaccgtcaccagttcaaatcagggttatcttcccattttacaaatgaggaaattcaatggtatggaaaactgaagtgatttttacaagatcataaagctcataaatggcaaaatcaggattcacacttcatggcccacaaaccttatcctttctcctggccttgatccatggacacataacagccctcacacagttacctataaacagactccatacaagtgcttgtgttttaccaagagcttgtgtaaatgctgacccttcccatccacacagcagtgcctgaggccagtaatatctcactggggctgggccacatcatggtgtcagccgggcaaataatacaattacaatgggtattctctgacagtaggggatgattaggatgagagtcctctcaccagcaagggaaaaaagcgatgactgataaaaaatcaaacatctgtcatatgagagttgctgctagacccttccaacaactttaacctactttttaatgatcactagtaccccagcaaggtgagtatccctattcccattttactgccaaggaagctgagactcagagtttaaataatttgcctatgatgaaaccacctatatgggaggaatcctcaatttgaacctgagtcttctaactaaaatgcttatctgccatggatgtcccttttccatgggcaaccagaagaccaagtcttatttgcagtttcccatcagcatgcatgcagcaccccaacaagtaccttcgctggggttgcacttctcccaggggacagcagctgtgcaccgttttcagctgccacttgactgcatgactgcattggyagaaaggtgcaggtaagcagtttgaatgcaggagagaagagatgatggcgccagttttcccatccatcagaaggtccagtgggcctcgagtgagaacagagaaagtggagtgatttttacacacaggacagcagagtggagcatgcatggtcttgggaataagcagactggagttcaaatcctgctccactacttaagggccataagttcttgggcaagtagatataattgaatctgtaaagtccaccacatctatgttcttctctacctttttaaggtaattgtctgcatttctgataatttcctgcttctacaggggctctgatagaattatgcatagttgaaagtagattgcatgcaaaaatttcaaaaaatggcttaaaattataggctgaagcctgattgaagaggctgttagcaacagcaggaggtgcccaagctgctcaaaatctagcatttgaacctaataataactccttatgttaatagacagagaaagactaactgctgatttaccttttgtaaactcactgcacaaaaaaatgccaagatgtgttggggaaagcctgtgtttctggaatcagatagaccaggtttaaaytgtggctctacaactttttagcagtcattttaccactctaaacttcagtctctttatctgtaaaacaaagatcctaatgtcgtactttacagtagggacgttgtaaagagtgaagatactagatattatgtctgtaatgtctgatgaaatgttggtgtgcaataaggtagcttatttattttattatattttaacatctttacaaaaatccatctgatatggtttggctctgtgtccccacccaaatcttgccttgaattgtaatccttataatccccacgtgtcaagggcaggaccaggtggtggtaattggatcatgggggcggtttcccctgtactgttctcgtgagtgagtctcacgagatctgatgttttataagtatctggcatttcccctgctggcagtccttctccttcccactgccctgtgaagaaggtgctgttcttccgcttcgccttctgccatgatcgtaagcttcctgaggccttcccagtcatgtggaactgtgagtcaatttaacctcttttctttataaattacccagtctcatgtatttccttacagcaatgtgagaatgaagtgttctttcattccttttgccattctaggtgaaggctgttttcttgaagggctgtatcttcacacagaagcctactcatgagagagaagctccaaggaacttggcttgagaggacttgagctcaagtttggggtttgttacttacaagcaggggctcggctccctgtgtattctgtctttaaggagttcgatctagttgcgttgactaacacaaaaataaataattggtaaatgcaaggtgtgagacgcacatacgaaaatcctgccgtgggaatttgggagtgaggtcaaacctggcaggggtcagttggggacagctttgtgcttacgactcccccagatttccacactgcagtctttgtaaggaagtcactatgagcagcacacatttaaggaatggggacataagtctacctccttgagggcaaagtgtctacatagattatttggaattctgcatgggagatgatctcttttccatttattttttcaattatttatttctatcggtatagactcatggatatttattttatactttgagttataatccaataataatttgttgctctaattgttccagctttcaacattgggagctctttctgttgtctcccatatccctttaacataaccccgtcagtgcagatttttaggtttttccgagtacttccttattttctggcactagaaggtggtctaaaaggtgagcattataaaagatgagcactagaaaagattcgcatcgtttatattccctgtcccagtcctagaatcagacatttctccaaggagtctgattccttttgttggagaatggtattagaaactaaactctgagccctagttgtgcttattgctactggagtattgttacttctaggcctctaagctgacagagcaagaaaatatacatgtacatactaacctgtttatatacacatgtccgttaatattttcaatgtaataatctgtgtctatattatgctaaatatgaatttactgatgtctccaacatgaatccattgccccatggatcattctggctttctcccgttttcttttttattatttttttgagacatggtcttatttctgtcacccaggctggagtgcagtgtacaatcacagtttactgcagccttgactttccaagttaagtgatcctcatacctcaacctcccaagtagctgggactacaggtgcatgccactgcacccagctagtttttgtttgtttgtttgtttgtttggttttgcagggatgggttcccactatgttgtccaggctggtctcaaactccaagactcaaatgatcctcctgccttggcctcgcaaagtgcttggattacaggtgtaagccaccacacctggcccttctcctctccattccaacagtgaaaatcgtggctcccatcatttcccagccatttacttatgtggtcagttccagtacatatgtggagcattatcagggttttgataacctggacccatgtgsgaaacaactttctcagtagagtagagtacttatgtgcagtttcttttgcatttaaagacttcactcatttccaaagttacttaggtcagcatctttttcttccagccttttcagtaaagttgtttcttacatttgaaatgcarttagattattttgacacattctgcattgcttcctggaattctctggatttcttaaatgatgtttttaatctgcatatgataaagtcaattttgcattgacatgrcattatgtatttgttaaaatgattgtataawatgatacaaatttgtataaaatgatacacaatcattttgataagcatatagtgccatgtatccacaattacactatcatacaaagtagttttactaccctaaacaacttcctgtgctccacacgttcaatcttttacctcctccacctggacccctggcagtcactgatcattttactatctctatagttttgccttttctagaatgtccttataattggaatttgtcaaaggtcagttaactatatttgtgtgggtctatttctgggctctctgttctgttccaatgatctatgyacctgttccttcaccaataccacactatcttgattactgtagctatatagtaagtcttgaaattagtatgagttctccaactttgtttttctttagtactgtgttgactctgtagatcttttggcattccatataaacttcaggatcagtttgtcaatatctgaaaaataacttgctagaattttgattgatattctatagacctatagattctataggtcrggttgggaagaattgacatctccacaatattgaatcttccaaatcrtgaataggaaatattactcctccatttgtctagatcttttgattaccttcatcagagttttatagctttctgcatacagatcctgtacatatttttagatttaaacctaaattatattatttwggtggtattttaaatggtatttttaacatttcgaattccagtcatttatttctgttatataggaaagcaatcaatttttgaatattaaccttgtatcctgcaaccttactatcctcaccaattagttttgggggttttttgtttgtttgtttttggtcagttctgagatgttctatatagacaattatgtcatctgagaacaaagacagttttatttattcctttccaatttgtatacattttatttccttttcttgtgttattacactagctaggattcccatatgatattgaatagaagttgtaagaggacatctttgccttattcttgatctgaagaggaagcatccaatttctcattatttaagtatgagattagctataggttttttatgtattttttataaagttgaggaagtgcctctctatagtgtgctgagagattttatcgtatgtgtatattgaattccatcaaatacatttctgtatcaattgataggattttttctttagcccgttgatgtgatgtattccattaaatgatttcagaatgttgaaccagccttgcatacctgggataaatcccacttggtcatggtgtatcattctttttataaattattggatttaatttgtaaatatatttttcaggatttgttcatctatgttcatgtgagatataggtctctagttttcctttcttgtattttctttatctgttttttatattacagttatactggtcctgtgagttaggaagtattctttctgcgtttattttctagaagagattatggaaaattggtattatttcttccttaaacgtttactaaaattcaccagtaaaatgatctgagtctggggctttcttttcttggaagggtaccaattatagattaagtttatttaatagatatggtttatttaggttatctccttcacgttgtgtgaatttttgtagtttgtctttcaagggattcattcatttcacctaagttaccaaaattatgggcatagagttgttcacagcattcttttatgatgcttttactgtccatgggatcagtagtgagactgctctttcatttctgatattggtaattttcatgttttcttttttttcttggttagtctggttagctgtttgtcaattagattgatgttttcagagaaccagcttctggtttcataaaatgttttctattgttttcatttttgctgacttttgctctattttttattatcatttttttctgattgctttggccttaagttactcatttttctttagtatcctaaggtggaagtttagattattaattttaggtctttattccttttttaatatatgcatttaatagtataaatttccctttaggcactactttaactgcattatacaaattgggataagttgtattttcattttcatgtggttcagaatatttttaccattctcttgagacttcattgtcccatgtgttgtttagaaatgtgttatttaatctgaatatattacgctatattctgtttatttccctttattgattyctagtttaattctatggtgatctgagagcatattttctataattgctattattttaagtttgtcttttttttttttttttttttttttttgagacggagtctcacactgtcacctggggttagagtgcaatggcacgatcttggctcactgcaacctctggctcctggcttcaagcaattctcctgtctcagcctcccaagcagctggtattacagatgcctgccaccatgcccggctaattttttgtatttttagtagagatgggatttcactatgttggscaggctggtcttgaactcctgacctcgtgatccgcctgcctcagcctcccaaagtgctgggattacaggaatgagccaccacacccggctattaagtttgtcgttatgtggcctatcttggtgaatgtttcaaccaaagttgagaygattttatattctgtacttgtagaagagattattctgtaactgttagatcaagttgattgagagtgctattcaggccaactatgttcttactgatttcttgcctgcttgatctatgaattactgaaggagggctgttggagtttccaactatagtagtggatttgtttatattgaatttgcatatattgtaaaaaatattgtgtatatttttccttgcagttctttcatattatgcttatatatggtgatgaattgatccgtttaccatatgtattcccttctttttccttgttaaatttccttgttctgaagtctggtttgtctcaaagcaatacagctatcccagctctcttttagttagtgttagcaaggtatatctttctccattcacttacttttaactaacttgtctctgtttttataattagagtgggtttccggtagacaacatatatttggatccttttaaaaaatccatctgacaatctctaatagatgtttttagtccattcacattttaagtgcttattagtatagttggattaatatcagccatgtttgcaagtgttttccattcactgctgaattgcttgtttccctcccttccctttttctcctttctctggttttgattaatcattttctcttactctattttatctcctctcttaacatatcaattatacttaaaatgactttggtggctatacttatttcccttttatccccttttatatattgaccttctactatggagatgatgacccaactctccktcttacacacatgcatgtgcagagacacacacacacacacacacacacacgcttcctctctctagttatctaatgcaattaaagcacaattttaagtaaatatttggcatttacaacattaataactaataatttttatatttagctgagccatatagtgcatttgaattaaatacatttccttctttgtgtaactttttgtttttcttagagttaatagttggcttgtwtaaaaaggactcatcttttggagatgcacacaaatatttatggatgaaattatatgttatctgggattggcttcaaaatactctggaagggcttctggctatgatagacttaatgtattcccagtcttctctgtctccaggctgtgaccttcacaagtgtttcttagcttctcctcacttccctcaagtgagacaggaaagactgagggggctggagccaggaaaatgtcttccctctggtggtgtgctggggaaggggataaggtcatgcagatgcttcagacttacacaatgcttgcttttctactctttctcccagagccactaggggatctttcttatctctctatcatgatcatctggtgaggttgctataggtaaaaccaaacaaagtgtgagggactccctaagactataggcccttagtttcttcctgaacttctaacatttcttacagggcaagttatgcgagtctactttcagccctcagcaattcatcaaaatgaccatgaaggtttcttactggttatggttccagcagcttctaactccagataagcaggtcacagctgtgacgctatagrtgagcttgtctttccagatttggaggtagtggttggctttgtggtctcagttctcggatgggtccaagaaaagacactgattttcagttttctcaactttttccttgtcctatgagtgagagcaccaacttcccagctcttaacatgttgggactgaaactggaagtggcgtgtttcctttttctgtcttccgtttctctcactgtcatgttcctattttttcctccagttttggtatatggcaatgcatatgtgttgttgcaatgtcgtcacttgtgaattctttcatttctgtcatttccgggtcagttactgttgatgaacttttgttatgcatatgggtcatcttttcctgcttctttgcatgcctggggattttttattgcatgcatacattgcagttttacattattgggtgctggattttgttagatacttgtaaatagttttggattttgttctggcacgctgtgaggtcagttgggatcarttgaattgtgtaaggctttattttttcttttaacagcttgagatataatttacatattctagagttcacccatttaaagtgaacactttagtatattgacagagttgtgcaatcataactataatctaatttttgaaaaattttattactcctccaaaaatcttgtatctgcttatagtcactgccccaaaacttcatgttcctgcctacctccaccccagccatagagactttctgtctctacagatttgttgagacttggtttttagcccttgtcatggttaagtccagagttcatgtattcccactattaargcagtgatatggtttgggtccatgtgcaccaaatctcatgttgaattgtcatcctcaatgttggaggtggggcctggtgggaagtgattggatcatgggggatatttctcataaatggttcagcaccatcccctttggtactgtcctcacaatagcgagtgagtgctygcaagatctgtttgtttaaaaccacccaccccccmccaactccacttgctcctgctcctggcatgtgagacatgcctgcttccccttctccttctgccatgatttggtttcctgaggcctccacagaagctgagcagatgccagcatcatgcttcctgtatagcctgtggaaccatgagctaattaagcctctttcctttataaattacccagtctcgggtatttctttatagcaatgtgagaaaggaccaataccggcaatatccatcacaggactctagctgatctatcacacaccagagggaagatgaaatattcctggctgtttgtgaactttgggaattgcttggaactactgtatcgtgcytcttttcctgctctgatagtttcctctctgtatgcacagatcatcactcaaagacttatggaagcccttctgttgctatstagtgttctttgtctctctacctcggcttcctcttcagtattctgtctcataaattctagttgtctcagttcattgtctgtctcctcagctcatctagacctgcggactctgtttgggtttcccctgcttgatctgcagccttaaaattgcctccaggcaccaatcaaaggcaactgtggttgtgcttcatttattcatggycctgtgccatctgttgcctgtctgtgaatagctgttycctataacttggccagctctctagttgtttaagttgggagtgtagattcagcctctgcgactctatcatagccaggagcccttccagggtattttgaagtcaatcccagataccttataatttcatccataaatatttgtgtacatctacaaaagataagccttttttatacaagccagttattaackctaagaaatagaaaaaggtacaccaggaaggaaatttaattcaaatgcactatatggctcagctttaaataaaaatgtattagttattagttataatgttgtaaatgccaaatatttacttaaattgtgcttgaattgcattagatatctggagagagaggaagaaygtatatgtgtgtatatacatataagaaggagagtttagtcctcatctccgtagtagaaggtcagtatgtaaaatggataacaaaacactgagaagttacaaatgttcctttagaaatataaatgttaaaatcataagaaatagctaaacaaatgaaagtacttgtttctggaaaaaggaatgaggggtgtattaccctattttcacgcygctgataaagacatacccgagactgggtaatttatacaggaaaaaggttttatggacttacagttccacatgactggggaggcctcacaatcatggcagagggaaagaggagcaagtcacatcttacatggatggtggcaggcaaagagaaagagcatgtgcagggaaactcctgttttaaaaatcatcagatcttgtgagacttattcactatcacaagaacagcacgggaaagaccggcccccatgattcaattacctcccaccgtgtccctcccacaacacgtgggaattcaagataaaatttgggtggggacatagtgaaaccataatcattcccctggcccctccctaatctcatgttctcacatttcaaaatcaatcatgccttcccaacagtcccccaaagtcttaactcatttcagcattaacacaaaagtccacagtcccaagtctcatctaagacaaggcaagtcccttccacctatgagcctgtaaaatcaaaaacaagctagttacttgctagatacaatggaggtacaggcattgggtaaatacagccattccaaatgggagaaattgaccaaaagagaggggctacaggccccatgcaagcccaaaatccagcagggcagtcaaatcttacagctccaaaatgatgtcctttgattccatgtctcacatccaggtcatgctgttgcaagaggtgagttcccctagtcttgggcaactctacccctgtgtctttgaagggcacagcccccctcctggctgctttcatgggctggcattgagtgtctrcagcttttccaggtgcatgatgcaagctgtcagtggatctaccattctggggtctggagtacagtggccctcttctcacggctccactaggtgatgccccagtagggactctgtgtgggtgctccaaccccacattttcctttcacactgccctggcagaggttctccatgagggccccacccctgcagcacacctctgcctggccatccaggcatttccatacaatttctgaaatctaggcagaggttcccaaaccacaatttttgacttctgtgcactcacaggctcaacaccacgtggctgccaaggcttggggcttgcatcctctgaagccacagcctgagctctatgttggcccctttcagccatggctggagcagctgggatgcagggcaccaagtccctaggctgcacacagcatggggaccgtgggccaggcccacaaaaccactttttcttcctaagcctccaggcctgtgatggtaggggctgctgtgaagacttctgacctgccctggagacattttccccattgtcttggggattaacattgggctcctcattacttatgcaaatttctgcagctggcttgaatttctccacagaagataggattttcttttctattgcgttctcaggctgcaaattttccaaacttttatgctctgtttcycctttaaaactgaatgcctttaacagcacgcaagtcacctcttgaatgctttgctgctagaaatttcttccgccggataccctaaatcatctctttaagttcagagttccacaaatctctaggataggggcaaaatgccaccagtctctttgctaaaacataacaagagtcaccttcgctctggttcccaacaggttcctcatctccatctgagaccacctcagcctggatttcattgtccatatcattatcagtattttggtcaaagccattcaacaagtctctatggagttccaaactttcccacattttcctgtcttcttctgagccctccaaactgttccaacatgtctgatacccagttccaaagttgcttccacatttttgggtatcttttcagcagcaccccactcccagtaccaatttactgtattagttcattttcacactgctaataaagacacatccgagactgggcaatttatacaggaaaaatgctgaatagacttacagtttcacatggctggggaggcttcacaatcatggcagaaagcaaggasgagcaagtcacatattacatggatgacagcaggcaaaatgagtttgtgcaggcaaactcccatttttaaaaccatcagatttcataagacttattcactatcacaagaacagcacaggaaagaccagcccccatgattcaattacctcccacaacatgtgggaattcaagattagatttggggggatacagcaaaaccatataaagggaaggaagagtgagcagggcctgttgtcttatgccataaaattcattcagttatttacttctaaactttggatatgcattacttttattaaaaacctcaaagtccttggtatttggaatcagaattctgggttcattctcggttctgtcacttctgtgagagggtttgacctcacagcttcatttttcttatttgtaaaatggagactgtatcactggctaagtaagcggatcgtgaagatcagaaagactaaatgtccaatgatgagcacatcagctggaaaatgggtaaatgctttaaatcactatgaagaaaatctgtgtggcagaatgggagatgcacatgtgggcattgtcaggggacagcccctrtgttaggctctgcttagcccctcagactacctgtgagaccctggacaagttcttcaacctctttactactcattgtattcccctgtcgaaggaggatatgaaacaatcctcatcttacaattattgcagggagtaaaatagaaagcaaactcccgtacccgggtacccagtacaggttaagtgcctaatcaatgatggctagttgtgttgtrttattgatgaaattatattgacattataacaatatatcttaatataaaaatkgtaggttagttttattgttgctattcagtttcaaaattatgttaatgaatatttgatgacctgagaaagctttagtaaataatggtaataaaaaaagaagcagtattaaatgatagtacccagccttcaatcactgtctattcagggagggagggagggagggacggaagaaagaaagaaggaaggaaggaaggaaggaagggctcttgttttagtaagtgagtacatataaataaaaacaacaaggaaagtagagcaaatgttagcactgcttgtccctggagggtcatctacaggtgattttcttttatttttcctttgtgccttctgtagcttccaaatttgtgtaaatgaatctctattgcctttgtcatcagataagagcacaaaaaatgatatctgaaatcacaggtttggaatagagaaaataatttttcatattttaccttgtaatcatatttctggcttaggggtatctaaaatccatttcacataacaataatcaaccacaaaatgattcttcttagcaattattgtacttttctatgattgggtaaattttctgcagacactctctgcatcagataaacattgagttccactgcatgtaaatagtagtgatttaaataaaatatgtgtttaatttcctcacatgtgacacacaacttagaagtaggcaaggtgggctggagaagagctccacaatgtcatcaatgccatctttctgcttggtcatcctagatgcatggcttccaccctcaaggttgtctcatggtttcaaggtggctgctgcagctcccatcatttcttcctcattccaggtgaagagaagttttgagggatctttggggtatcacttttctggctggaaatctctgtggctggtggcacctttgcccaagttttgcttgggcctgctgggttcatttttcccacttgtcctggcaggctgtgcttggctcacactaccagcctagatcccatgcctgccaaaggcagcaaggcatggagtggcaaggggtgtgtgagtgaaccagcgaggggtccagccaccgtgcacagtcaggcacaccagctgctgcaatggggtgggcagctccaggtgccggcgtgggcaccgactctctgygaggctgtggctagaccaggtgcaccacaggtagcttccatggctgccactggggaatgcggtggcacacggaagcttggagaatccaggaaccactgggccccaaagaggaagtcacagccttggctcagggagctcccaggtctgggcttactgaagggctgaagctcttctcttctcttcaaccacaacatggcgagcaaggggtatgtttcrgccctgtttgtgttatagctctttcagcctgccttccgcaggtcccaagttcttatcctgcgtccaagaagaatgaagcacgcagacaagtggagggtaagcaaggtgaagaggagctttattgagtgacacagtagctcagaggaggcccaggagtgggtagctcctctctgcagctggtcatcctgatgtctgctcagctttggctgaacytggggcttgtatgggcttcagaggggaggaagtgtatgccagttggtccatggatggccatgaatggcctggaaaaggcaccacaagttcccactctggtccgtgggaccggcagctgggcccccagcctacagatcctccctccctgaaggagggcctgaaggtggtgcctcactggggatctgcccccttccacccaggaacctctctgcctcctgctgccattcatggcgcccaggctgtaggtgccaagaggcacctgcaggccagccataagctgccttcagcacccctttggcttccctcctatgcttattggtgtccaaagtccagagggggctgaggcagtggggggctggcatgtcagcaccgcccaaagtgtgtgcacacctggcgaagctgtgacttggccctgactttgctctgagatcggagcaggcaccaacagcagggagaagccaggcagtgggagcaggcatttctgagcctgcaagggcatgggggccttcctggacccccaagagtgcagagattcctgagtctgcagctgtggtttgggaggctgtagctgtggccacaggggtggggctcctgcctgctccatggagtagaaggcctggttccacagtcacaacttgggcagctgtggctgcaccagggaagctccttccccaccaatctggaaggtgcagggctcccacttgtccctggctcccaccagctccatggagtatgcctccttgctgcagccagcatgatggcagcagccactctagacaggctgctgctgccatcagatggagaaagcaatagagcaaagtgtaatagctatgtcagttcccttttttttttcaattttattattattatactttaagttttagggtacatgtgcacaacatgcaggtttgttacatatgtatrcatgtgccatgttggtgtgctgcacccactaactcgtcatttagcattaggtatayctcctaatgctatccctgccccatccccccaccccacaatggtccctggtgtrtgatgttccccttcctgtgtccatgtgttctcattgttcaattcccacctatgagtgagaacatgcggtgtttggttttttgtccttgcgatagtttgctgagaatgatggtttccagtttcatccatgtccctacaaaggacatgaactcatcatttttttatggctgcatagtattccatggtgtatatgtgccacgtttccttaatccagtctatcgttgttggacatttaggttggttccaagtctttgctattgtgaacagtgccgcagtaaacatacatatgcatgtgcctttatagcagcatgatttatagtcctttgggtatatacccrgtaatgggatggctgggtcaaatggtatgtctagttctagatccccgaggaattgccaccctcacttccacaatggttgaactagtttacagtcccaccaacagtgtaaaagtgttcctgtttctccacatcctctccagcacctgttgtttcctgactttttaatgattgccattctaactggtgtgagatggtatctcattgtggttttgatttgcatttctctgatggccagtgatggtgagcattttttcatgtgttttgtggctgcataaatgtcttcttttcccttttaagagcttttccagaagccccacttagtgacatcttcttgcaaatcatttcccaattctcctctcttcctcatccctgcagcaccttacctcctgttggactagaaaatggatttttatttgtaatggttttttttgccaattttgttatttgtggtataatctttatactaaatctttatacagaactgagtcccatgaccaccccagcttgcaagggatgataagaaaggtcattttaaattgggactctctagtatgatagaaagggagaaagggtttgggtaggtaactcgtctctgcccaattcccatgtggccagtagggaaccagagatggtccagcctcttctcttgcagggagaggaagctcctgtcttctgcatagattcctgcttcctcctgataactctgtgttttgagtaatgaataataatatcagaagcaaacattacctgttactgttctcatttttatatctgaggaaactgggctcagatgagtaattccctcagagtcaccagcttagcaaattccagagtcaggcttctaactcatctgtctgactcggaagcctgtgttctttctaacacaccatactgacttccctggcctgaaagtggaatcattatctatttattctttcaaccatttctgtgtgtcatttatttatgggcatctagtagatattcagtaaatgtttgttcaatggatgaatgaatgaatgagcgaatgtctcctggagaggagctcactatctacatggggacacagatcccatacagggccatctataggtgttgtgaagcattgtggaaggaagcyccctttctgggagtgcctcaggtaaactacacgaagaatagaacgttgcacctgagcctggagggccgagcagcaggctgtgtcrgtgaagggtgttggaagcagaaggaacagcatgtgctcaggcttgaggtgcagtgccagtgctgtagggattttactgtggctggagagacaggagtgaggaggctctgaagctaagggagccagggtgggcagggctggtgctgggggctgcagggctggatctgtatgtccttgggaggaacaggttgagaaacygagttttgatctgtgggtcccaatcctgagcatccaacggtggtcactcactccatgttttccccacagtattggtaactcctcaccccctctcttctctgtttagttctctgtgattctatttttggagtttacaaagtgaacatccagtgtgatatgcggagaactctggtgatttgtcctgaagctgtttcattttttttgaattatgggagtctactcttccctcttggggacctgggaggattgaacagccaagggcttcccacggagtcactctcagctctctgactcctgcactgattgtgttgcacttgttttgaaggctaatgagtatgggaggtacccaaactttccacagaattgcacctcttgtgtgcgtgcatgtgtgtggggggtagcatgagacggataatcaaattatttccagagaaaataaatttgaatctcagagggctctgtgaaagcagggaccaatcaattccttctgctgttgatccactatttgacaayttgcagataaaggttgtgaaaacagaattttctctctttttttttttttccataacaacttcatttccatttctagccaacattcattttgcaaaaagccttaggttgtggccaggtaagccctgtcaaattcagtgatttcctagttaattttagtttaaactcaggtgaccgcagggtgtctccctccctcttctctcatagatttcagttgtcatgtggcaagtgggtgtctggtgcccagttccaccgcgtgagcacctggaggtgcacaatttgccgacctgatgttctgaggtcgatctcctgtccactggtcacgagggtgcccacactgtcacctgtgcttgggtctcctcatgatggccctggagccctcgggcttagctgagacctgaggcctgaggcctgcacccctttctgggcacaagaaatgtgctatgcaggggtggtggatgctgtgagagtgtcctgcccagatgcccctcgcagccctggtgccaaccccacaggggctggaactgcaattaataagcaggtaccatttccctctccggttcccctgacctcttacctacctggggtttctataatattccctattatcccccacccctatggttcttcctggagggatttggtgtggaactccttctggaacacactcccatcagcccctttcccgattctcctctcttcctcgtccccctggcaccttacctcctgttgggctaggaaactggtttttatttgtaatgtatttttgccaattttgttatttgtggtatactctgtatactaagaacctctccccaccaactcctaggtgtgtgaaacacttcgaaccctgcaggctagcctcttgccgttgaatgctttgggcttcaaaattgtgtcttctatggatttcaagagcttattttggaagtcagtggctgagaatttaaccctgatcttcactgtgtcattaagaagggaagagtgtgtttatggagtgctcctgccggcttggggtggatggtgatggtacaatgtgggtagggatgggagagactttggttagaccaggattgtatcctgttccaggtcagggaaccaagagagcttctggcagtacctggtagggactccagagattgggttaattgagtggatgtctgaaaaatgagaacttacctgcaagtttgtcccaaacatagatgagttacctcggactgagcagtgcaatcgttggagcctctgtttgcgtaatagtaagtcagaaaaatacagaattctgctctgccygcatcacttaacagtgtgggtggaggggagaagtgtgggaggacttgtttacattgcagggcagagaaaatcattggttaccgatgctgctgatcctttcagtggccctggaacaccaaggaagggcctgggagagctgctgttgttcctatgagcccagctgtgggcacactgcgctgacacaatgtcatggccctcatgacgaggatgacttggaggagccaatcctgacaactgaccctgttgccagggactgtgagtagcacttcatgtgtaataaccgtgaatgcctcacaacagctctgcaaggtcgggtctactattatcatccccattttatagatggggaaactgaggcacgatcatcaaatactgggcacagactctccagtgtgtaggtgatggagccaggcttagaacctgggcagtctactccatgaacctgcatcctcctcagatgacaagggtgagttgtggccccagagggatgggcctcttggcccttttaggaggtccccatcaaagctgtgggcattggcaaatgaggattattttttgagacagggtctcactccattgcccaggctggagtgcagtggcaccatctccactcactgcagcctcaaactcccaggctcaagtggtcctcccacctctgcttcctgagtagctgggaccacagacatgcgccactatgcctgggtaatttcttaaaaattatttctagaggtggggtttcaccacgtttcccaggctggtctcaaactcttgggctcaagtgatcctcccacctcagcttcccaaagtgctggggttacaggtgtgagtgaccacaccctacctgcaaacaggaaatcagggtgccggcatggtcagatactggtgagggctctcttccatgttgcagatgaccaccttctcattttatcttcatatggcaggaagggctagctggctctctggcttcttcttataaggccctatccttatgggatgagggccaaacctcatgatctaaccacctaccaaaattgccacctcctgacgccatcacattgaaattagggtttcaacatatgaattgaatttggggaggggggcacacacattcagtccattgctcgggacataaactccgtgagggcagggactgtgtcctgttctccactatgtcttattacgtagaacaggccccgccatgtaactgcttaatacatgttggttgaatgaacgggtgaattcctaatcatctatttttacagaaaaggaaaacaaggctcagagatgataactgacctgcccagagtcaccaagctggcgagaggcactgcgaggcctgggatgccgagtttacattggcaaacacacccatacacatcaaaaaccttgcttcaagccatggtaggaaggtggagaggctgagacacaaggatgtgaagtccttcctgcatattccaaacatgtacggagggaaaggaagccacgtgctttcaaagaagcttggtttcaacctttctgaatcatcttattccagcactcgctctcttcaagtctctgctcaaacatcgtctttcactgagacctgcctgaccccgttctttgaaataactgcttccgagcttccctctcactgtgttcgtcaccactggacgcactccctattgatctgatgggtgtttattgtctgcagcctggcgctggactgtcagctccatgggaacaaagactttgtggggcttgatctcagctgtatccccagtgcctagaacagtgcctggcacctcctaggcagtcaatgaatagttgtggaatgaatgcagatgagtgaatccgtgaaattgcttctcttttttgcctaccctgattcctcccttaaaaagtcgtattcttacagagcaatgttatcactatagtcacctaacactctgctgtcggaaaaggccagcggcagctggaaaagctaaaattaaaatttaaaaattcattagcatggatgagtgtgcaatgatggggaatgcttagaccctggttgagggagggagcctaaaacctaaagggcttctctgaaaagaagctctgcctccccacaagcttgccagcagtagatggtgtccacgttttagaattctggcgatctgatgggtgagacattgtattttaaggcagttaaaaaaactgtattgaggtataattcatatataataaatcgcacatagttaagatatacactttggtgtgctttgaaatatggatatgactgtgaaaccatcaccacaatcaagacaatgaacatctccatcctcccccaaaatttccttgtggcccttggtaaattcctccctctagggcacccccttgcccacacccaggtaacagcttacctgctctatcactgtagattcgtttgcattttaaagcattttatataaatggaaccaaacagcatatactctgacttctttcactgaacataattattttgagtttcatccacatgtcgcatgtatcaatggttcattattttaattgcagagcagtatggatgtaccatacattgtttacacattcacctgttgatggaaatctgggtcggtctaggttgcagccattacaaataaacctgctgcaaacgtttgtgtatgtatttgtgtgaacataaactttcattgctcttggatatatagctggtggaatggctagaacatatgacaggtgtatactaagcattgtaagaatctgtcaaacagctttccacagtgtttgcaccacgttacagtccactagccatggaggggagttctggttcctccacattctcacacaccttgagtgtggtcagtcttttaaattttacttatgctaatagtcaagcagcgatttctctttgcagttttaatttggattcatgtgtttgtctgccaaccatttgtcttctttggtggagtgtctggttagatcttttgggttgtttattttattatatttgagttttgagagttcattgtatgttctagatacaatgtctttgtcaagtatatggattgggaatattttctccaattctgcagtttgtcttttcattctttcagcggtatcttttgaagagcagaagttattaattttgataaagtccaatttgtcaactttttcttttatggattttgctttggtgtctaagaaatatttgctcaactcaaggtcacactttaaagtgtgtgtgtgtgtgtgtgtgtgtttttgtagtatatggtgcaagctatgaatcaaagttcctttctctttgtttgcacatgcaattgtacaacatcattttttgaaaagactgttttttccatggaattgaattccgcctttgttgaaaatcagtcatatacatatgagtgagtgtatttatatatctctcttctgtttaattgatctatttgtttattttgacaccaatagcaccatttcctgattactgtagctttatgataagtcttaaatcaggttgtgttagatgtatatatttttttcttttgcaaagtaagttgttttggctatcataggtccattgcatttccatgcaaattttagaattacttctcaattctgaccaaaatatcctgctgtgattttgattcagattgtgtcgaatctatagatcagtttagggagaatttacatcttaacaaatattgtgtcttccaatccacaaatacagtatagctcttcatttacttaaatgtttaaaattttccttcagcaatgttttacaggtttcagtgtacttttgtcagattcatccataaatattaagtattggaatactactagtaatcacactgccttttaaaattccagtttctgttttttattactaaatcatagaaatccaattgatttttgttggtttagttgaatctttcaagctttctaggcttactgattagctttagtggcttttttgtggattctatcaggttttctatttagacaaccatggtgttgttgaataaagacagttttaaattttcctttccaatctgaatgctttttatttctttttcttgccttactttactggctaaaacttccaggacaatgtttaatgagttggtgagagcggatataacccactagtttcgattcggttgttcaccattgagtatgatattagctgtgggtttttcgtggataacctttactgtatggaagtttccctttattcctactctgttaatgattttaatcagaaatggacattggattttgtcaaatgctttttccccattgagatggccatatattttagtttttcatcattttatagagtaaattatattgattgattttttaaaaaatattaaatcaactgtgccttcttgggataaactcaacttggtcatgatatactattcttttttgcaatctattgttagtttctatttgctaaaattttgttaagaattttgcgtctaagttcacgaggaatattgatctttggttttctcttcttgtaatgtctttgtctggttttggaatcaggctatcgctggcctcataaaatgagttggaaagtatattctcacttcacttttatggaagagtatgagaagaattggtattatttcttccttaaatatttgttcaaattacccccttgaattttggtgcctggcattttctttattggaagattttaaactaaaagttaaatttctttgagtatacagtatctgtttcttcttaaataacagttggtaatgtatgtactttaaggaatttattcatttcatctaagtggttgaatttactggcataaagctgttcataatattttattattcttttaatttctgtggaatctatagtgataccagttttttcattcctgatattgataatctgcgtcctcctccctccctccctgcttcccttccttcttttctttcctttttttttttttctatttctttccagatcagtttggctagaggtttatcaattttactgatcttttccaagaatcagcttatagcttcattgattttctatactgtttttctgttttgtatttcactgatatctgctcttatctttgttgtttcctttatttggcttactttaggtttaagatgctctcctttttttattttcttgaagggggatctgaagtcatagacttgagaattcttttctaaatataggatttagtgccataaatttctctctagtaaatgtgttagtgacatccacaaatttcaataatgtcagttccggactgagttcaattgatttattttcttcgttattttgcaccacatttcctgcttctttacttgcccggtactccttgattgaatgccaatcattttaacttgttgggggctgagtactttgtattcttgtaactattgttgggctttgttctggtatacagttaagaatttggaaatactttgatccttttgagtttagcttttataatttattaagatgtttagtctatggctaatgattccccactattgagacaagatcgttctgagtcctctaccaaatgacccctgacttccaaagtcttcaagtctggctggtgggaaacagcactatttcccggctggtgtgagcactgaatattgtttcctggaatccttttgggtgattctctccctggcctcaaggaattttctcaatgcatgtactgatgtcactctactgaatagttgaggatagccccctgaagattccagtgttctggctctccatagctctcctctctccaaaactctgccctgcaatctcttgaactcccctgggctctgcctgggttcccttccctgcagcagtgcctggaaagtctcccaaggcagaaagcggggcaactctaggctcacctcatctttctcctgccttccagggtcactatcctttgttgtctaatgtccaacaccttgaaaactattgttttgcaccttttgtccatttaaaaatattttccaagtgggaagataaatccggtccttattactatgtgtttgttgacagtcttagactacttttaatttacctttctcagatgacagggatatcatcttctcatacaattaagatgctttgtctttttctatgaattgtctgttcacttcttagcttatttttctccagggtttttctttctcctgaggctttgggaaatgctacagagatttatatgttagggataatgactatttttttttttttgagacagagtctt

SEQ ID NO: 96907 - DNA, 13367 bp, Homo sapiens
gcgagactctgtctaaaaaaaaaaaaggaagaatacatggaaaacacttagaagagttttaacatgtagtacgtgcttaataaatgctggcccttattactgttactccttgacagaggctcattttctcttgcctgttcctgcaaagatggagacaactgattagccatccttcctctaagaaccaaccatcaacttgtagacacgaaatcacccatcagtttctctttttcacatatactatctgttccttcttttgcctggggactcaactccattaccatcttccagaatcacaatttaaacatgagcatagaagtacttagtaatggaggggtcttcctgtttggtgttccctctattggccagagaacaaacactcctatgagaggagagtttctttttcttccatcagacaggagagcagtatggacctatgtttctatctttgcaaatgaatttcatagcactgtttagatacctctgtgcttggaaattcgcctgctttggtgaatctaatttttaaattttgtcaggtatcaaggtagaacactggtaaactgcttaatctggaaaataaagaataaaatataaacagatttcccctctggctccctgcaaaacatctctctcctccacagtgtttctgtaagtctctagggaacatcttgtatgggctcaccaacaagtcctcctccattcacacccctctgccctgacagataccaggtctctgtgctgtcccaccagcctctaagagtctcctgctaatctactaagtactcttgatcaagagagacgtagaatcaccagagaagacttttcagagtcttctctgaaaagtgcgacctcaactgaccttaaatgacaggtaaggttaatatagataccagtggggaatccagggattcagggcaggatgagcaaagggtgaaagaagcaatggagttggatgagtacagaattggtttggggaggtggccagctaagctgaggaggagagcttatagtgagagagaaggcaggagaaaaggccatgtgagagggcataggagagctcagacttctttccataagaaagtgagggcccttgagtaacattgcagggtatagtggaatgcttggcagaactactggctatattggctacatgttctttggttcttagggcctgtgattctcccaagagatgctttgtcatgtttattcacatatccaacattttctttttctctttttttttttttttttttgagccggagtctcgctctgtcacccaggctggagtgcagtggtgcaatctccgctcactgcaacctctgcctcctggatccaagcaattctcctgcctcagcctcctgagtagttgggattacaggcatgcgccaccacgcccaactaatttttgtatttttagtacagacgaggtttcaccatgttggtcaggctggtcttgaactcctgacctcgtgatccgcctgccttagcctcccaaagtgctgggatttttatttatttatttttgagtcggagtctcactctgtcacctaggctggagtacaatggcgcgatcttggctcactgcaacctctgcatcccgggttcaagtgattttcctgcctcagcctcctgagtagctgggattacaggcgcttgccaccgtgtccagctaatttttgtattttcagttgagatggggtttcaccatatcagccaggctggtctcgaactcctgacctcgtgatctgcccacctcggcctcccaaagtgctgggattacaggtgtgaaccatgatgcctgtccctccccccggctttttttttttttttttgagatggagtcttgctgcgtcacccaggctggagtgcggtggcatgatttcggctcactgcaacctccgcctcctgggttcaagcaattctcctgcttcagcctcctgagtagctggggttacaggtgcccaccaccaagcccagctaatttttgtatttttaatagagatgagatttcaccatgttggccaggctgatctcaaactcctgacctcaggtgatctgcctgccttggcctcccaaagtgttgggattgcaagtgtgagccaccgtgcccagccatcttctttcataattataaaagcattatgtattcactacagaaaaatcaagttagcaaaaagaagaaactaaaaaataatcctactcactggaagtaaccactattaatacttcactgtgtggctttctaaagtttcttataaacatatatttacaatatatgttaatgaaattggggttatatcatgcatactgttttataaggttttgtttttgtttttcttttttttttttgagacggagtgtcactctgtcacccaggctggagtgcagtggtgtgatctcggctcactgcaacctctgcctgctgggttcaagcaattctcctgcttcagcctcctgagtagctgggaccacaggtacgcgccaccatgcctggctaattttttgtatttttggtagtgacagggtttcaccatgctggccaggctggtctcgaactcctgacctcgtgatcttcctgcctcagcctcccaaagtgctgggattacagacgtgagccactgcgcctggcctttataaggtatttttaacacttaatatgttatggataatattctatatcaaacatacttgtatgataggatttttcatagctacagagttggtgacagtattaaggttttcccagccttctggagtgatgaactttgccttccatttcagagtttttttttcctgtaatggaaaaatgtctccttttgtaactgagaatactatccagacatcaggggcatcaccaggggacatggtcatttctctcttttttctttagccggactgtagaagctggaggaaaaggcagtatatctgtggcaaagttcctggccacaaaattttggctacatttataaaattctaattccaggtgaaaggggaatataaacttaatttttctgaaaactacaaagaacagagacagataccaatgagctgcaggcatcattgtgtaagctgagtgcagaaatcgtctggtagctgggcaggcgtcgttggccagagcatggcaggctttccatggccaaagccactaagattttgactgctcaggacttcattttggggcttctggggcataaaaggccttggtacaaagagcatgttatccttttcaactatggcacccttttcagatgtaagattctgagctgacaggagcatgagaccgattgtattaattcttggatttagtcctaagtaactttttctctatataacaagtctaaatggatggcaaggcaagagaggagttgttctgtttattccatctctacctctccttgaatttcctccttcatccccacttcatccaatggctttgtgtttacatgatgtttttattttatttatttatttattttgagacagagtctcactctgtcacccaggctgaagtgcagtgacgtgatctcggctcactgcaacctctgcctcccaggttcaagcaattctcctgcctcagcctcccgagtagctgggattacaggcacccaccaggacgcctggctaatttttgtatttttagtagagacggggtttcaccatgttggccaggctagtctcgaactcctgaccttcagtaatccacccgcctcagcctcccaaagtgctgggattacaggccactgtgcccggcctacatatttttgatacctctatttctgtttcctaacaccactatgtatttcactgcagatatgaaggactccaactggcattagaggttatgtatttaaaatccaagcccacttagaaattataataataaaaataacaacatctagcacttattatacattaattaatactattttggtgttatttatttatttatttttgagacagagtcctgctcttttgcccaggctggagtgcagtggcgcgatcttggctcactgcagcctctgcctcccgggttcaaactattctcttgtctcagtctcctgagtaactgggattacaggcacacaccaccacacctggctaacttttttgtagttttagtagagatggtggtttgccaggttggccaggctggtctcgaactcctgacctcaggtgatccacctgcctcagccttccaaagtgctgggattacagaagtgagccactgcgcccagcctggttttatttatttataatttcatttaattctcagaataaccttattatttttctattataattattcccactttatagatgagaaaaccaagactcagaaaagttaggtaacttgccaaagttcacacatctaggcggttgcagaaccagaattcaaacccagttccatctgactccagagtcgtttctgacactggtctactttctgtctcagtaagtttagaagtcagggaactggaaggaacaacaacaaaaaaataaacctaacttaatgccaagagaattgctgacaagatatatctcattcctactccatgtttaatgtcaatttttgtatcttgggtagggtgcctattataaagctatttgctcaaggttatcctcctcctaccccgcccccatcatcagatgatttttatttatagctatgtttaaacatcatgggcaacactcagacttgctgtatattgaatttgccatcagagcaaagattctttctcaaagcatatttgctttatttactctctggtgtttcccaataaattaaaaagacaattctttttggtttgctttaaattttttgttccaaatattcttcagctctagaattgagtcagtgaggtcaaattagtcaagaccagataagtcaaaatgaattttcattttcatgtccattagatattttgttctacagaatacacaatctgaatttcttctaaagaaaaatatatcctgattaatttacttctgtattgtttatgatcatgtatgctttacttcactgtctgatgctaagagcttcctagaattcattccttaagaagttaagtcatggcatttaattatttggcaggatgttttaagtacatataattattatatcttccctccattttgtgatggtggtgagccaagtaatctgcatcaagagaaaataaataacacctacattaatgctaccaacaaggagctcacagtactttggaaaaactcataattttagcacacagtgggtgttcaatacttcatcatctatcaaactaacatcaccacaccctttccaggtaagagaatctaggcaggctgggtgcggtggctcacacctgtaatcccagcactttgggaggctgaagcaggcggatcacctgaggtcaggagtttgagaccagcctggccaacgtggcgaaatccgtctctactaaaaatataaaaattacccgggcatggtggcgggtgcctgtaatcccagctacttgggaggctgaggcaggagatttgcttgaacctgggaggcagagtttgcagtgaaccgagattgcaccactgcactccagcctgtgcaacagagtgagactctggctcaaaaaaaaaaaaaaaaaaaaaaaaaagagagagagaatctaggcaaagagaaataatgttgattctgttccatatgtcagaccttggaaggtcaactgcatgactgtggctgagactttgtacttgggagtgtgcagttttaaatcctgaccactatcttaggcaagtcccttctcttttctgagtgcctgtctgcttcttgccccatcagacagttctcacacaggttcatggcaacggtaaagaataagattagacagcacactgggtatggctttataatcacgggcactaagtgatgattttttccttattcattccacttggtcttaactcttacccttctattgtttggggatgttaactgcaaaacagggacagaatttgggctaaagggtctttttcccagtctggtaaattaagtatgtgataagacttctagaagagtagatytaaggtactttcttttgtgcacactaatgggaggtgtgaagggaaagcagaattgcaatttccagcctagggaggccaagccagtcggccttgccaaacacgttgtcttggataaaggaggattttcagtcctgctattggctgatggggcctccagtgccttcttcagcctgttggtggggatgatgccctcagagccgcagagtgagcagtctcctcccaagcatcgctgagcacttgggtgtggaagggttgcctgatactgagggtggggttcctggaagacaggcgatcaggttcagctcttgccttgccctttatggttaaatgttctttggaaagcttctatatctttcaaatcctgggggcrttatgatctctcttctgcctatcccaaaccatcttcagccagtactgttgggagaatacaagctccagggcatggtccctggtccgtctggatgacccstccggatctggcatatagctggcgctctatggaaccagatatttatgtaaaagcagggacaatggaatgtgaaaacgtttcgcaaactccaaagcgattcataaccagacagaggtccaatcctagggtatacgagctctctcttttaagcacgtatcacagctgcttctcacgccaccgagacgcggtcaggacaggtgcatccatcttctctgggcttcccctcttgaaagtaggccagggcgcgcaggggttgagggtctctcattcccagagagaattaaacttggaggaaagcaaccaccggcgaggagcggggcgcgtggaagcgagccgcggtccgaggcccaaagaaaagcccaagcctcgcccccgccatcgcgcccgacgagacacctaggtccggggacgggtgtgtgccgcggaagtcaggtgcactgcgcagcactcccccggtaggtacacgctcctccacctacgagtgacctaattacaaggtgccagccgcgcccagaggtgggggtggttaatccaagcggccactcgctgcccgttcctgcccccaaagatgacggaaacccacacgattacagagccgcagcaccccagatgagccacggggtcgcaattctcgtttccgtgatcggactgccaggccccaggtgaggagctgagttcatcaccagagcggccttcccaggggaaccagttacaggctgccagtggccccggcttccatccggtctgcgcctgcgcgcggcccaagccctcgcctctcctggaatagtgctcagggattagtccggttcgccgctgtgcgcactgcgcatgctccagctccatccttcccttcccccaccaccccgccctccgggagccacgcccaaaaagtcaaggcgcttcagttaccagccggctacgtcgcgcctgcgctttgacccccagtttgcgccccaactccggtcgtgcggccgcccggggagggctctgcagttgcgcagcttgctccccggcccttttcccctccgctccccgccgcctcctgacgccgggcgtgacgtcaccacgcccggcggccgccattacagagagccgagctctggagcctcagcgagcggaggaggaggcgcagcggccgacggccgagtactgcggtgagagccagcgggccagcgccagcctcaacagccgccagaagtacacgaggaaccggcggcggcgtgtgcgtgtaggcccgtgtgcgggcggcggcgcgggaggagcgcggagcggcagccggctggggcgggtggcatcatggacgagaaggtgttcaccaaggagctggaccagtggatcgagcagctgaacgagtgcaagcagctgtccgagtcccaggtcaagagcctctgcgagaaggtgagctgtagtacggctgcggacagccgccgcggggccgagcccgccgaggaaaaggcggccgtgaggagggtgcaacatggcggaggccgccggtccgggccccccgagtctccgagaccggcgcccatcctggccggcggcggcttcctaacgacccggcgccccctgcctcccgcgcagggattggttgccgccgccgcctaaaatggcgccgttcactcgactcctgggcttttgagtcagccggccttggcgccagacgaggtggcagggggagcggagaccctgtgggtcatcgtcagggacggttttgagggtgagctggcttggattctgcggcttgggaatggagcctgggcctctccggtgggctgagtaagagtctttccgctggtacccaggcctagttaggtccagagctgcccagaggatcccccaaaggcagtcttgttaggccgtatcccagaacatacctaaaggtcacacagctttagtaccccttggtggtttgtattatactcaccaagcgatcttctccagaaatcaaggtaaggggtgtctttaagaatttttaaattattctcttaacctaatttttacgaaggtcatggtggtagctataagggaggagtgtaacttatttttcatagttggaagaaatcgggaatttggtgagtcatactacataaggagcttttggattggaaatcaagtgtcggttgaatatgatttatatgctgactcaaagccttctctaagcttaacacacttggcattttgccgtttatttttaaaatgaaccacataaaatggaagagcggtaaattttgtatctttgttgcaaaaattacttgatagtattttgtggctgcaagtagtagtagtgataataactgtcgactgagattgtattccagacattgtgcttagtgtttaaataatgtctcacatacactgaaaatagaatgttgtagtccacttagtaacactaaactttatattagctaattcccttttgttttcccctgggggttggggaaacaggtagttaatttagctattagctttgtgttgtatttttaaattcttgtaactcagttttctaaagtacacaaaatgctgatctctgctgtgaacattttaacttcccttttcaaaattaactttgcagcacgtcactttagtacagaatagtggagtatcatattagcattttgtatccgtgaaaagaattaatggagaactattatcctgatttgtttctggtttgatgtgaaaattaggttcatgagtttgacgtatatgtttccaagacaggcttttttagaaaccatgttgtgaacaattggaatttaagtaagtcagatttagatttgtttctcccaagcctgaacaaaactactactagtggatgaggtggcacatcatctgttggagatgccttttaatggtagcgatgtattgaatctcctgtttctttaccctctcacgtcaaatgaggttggtatttattttaaaggtttaaaattggcctttaaaaatgaatgtatattgccaggtcttaatttctaggtactgtacatgatgatcttaccgatttttggaattcagtgcattatatgaaagacttttaagtcagtagttggccagttgactagtcttttgaagaaaacgtggaaaggagggaggtgatgacgtaactggaagactggactgcgagttagatttggacatgagtccttctgctcttccttgagtaattgtgacagactttgggacagccacttcacttgtccttgttttcctgtctataaactaaaatgtgttctgagattatacagtcaattccgttttaaattagtagtgtgtttaatattgaacatctattgaatatctaagattgcatactcttttgagggaaatgaaaagcaatgaagaataagtatgcttattgtcgaggagctatgaatctagtttgaaagaaaagcatggtatgaaaaggtgtgggagatggagcatggaagtagagggtttgtgttggaaactgttgtagaagataagataatactggatgctagagtggggtgggtgaagctgatgcatctaatattgctttccacatctttgtaaaactaagatgtagtgaggtaaatctccattgcttgcgctgcttacgcaaattttagttctgagtgccaaaaaagatggaaataatatttgagagtaggtgttacataaaagtttctgtggaatggatccgttttggtggatatcattatacaaccttcatactgtttataactggtaagtaagtatttcaactttcaggatgatattaaacttccaaactaaattaatttgaagacagttttttgggtatgtagaatccatgaactgatgttttttgtacaagtctttctagtaaaacaaaagctgtctttcactgttaatatttgtgtgccaatggcatctctgggtgaaagctacatatgtgctttttggtgtgattgccttctaaagagtaattttgaaaatttgagggctaatttttttcattagtgtataataatagtattttttgagaaaaaagatacttgttaatagttgataatttcttcaatcataagaaggaatgataatgtaaaagccttccttctacccacctaaatgcctgatttgaaggggaaatatttaaatagtaaaaatagatgtataccataagaggtcattgttactaaaaaatcctgaggccatttttttgttatcccatcaacaattaacagtgttacatgttcagaactgagagaatctaagtatgcatttataaaagacaagagtgaacatggtttttatgttactgactagctaaaaagaattttaagatgtgattaagacttatacaaaagccaaggttgttagtgtatagtatactttgtcatcttgagaatcataatttgttgatagtttaataatttggtgtgcagctttgcctcaggctcagttctataatcagcattacatcagtataactggccgggtatgtttcaatctacagattgaaaggagtaaatagtatcaacttgcttttgcattgactacagtaaacaatcttttattatgtgacttcagctttgttttagcttgggtatgatttcttggctttgtgcttaccaaacatgtggagaacgttgtttgatagccagatttttttttttcaaagaagttctttacctaggtatgctgttttccattgctttgcaagcactataaataaagtgcagtcattagtcattaaaatgttagttttaacatttgttacgtgagtatggaaaaaacaaactgcttccttctaattagatgagctgaaaaatatttgaccaagatgacattcttgtatgaattgggtaatatgttgctgtgagtatgtgtgtacgtttcattttaaagggtgtttggctcatttctctagaagtgatttgaatattgaggacaagcaggtgggggaagcatgttacagaacattatttttatcatacttttataagatattgttctcagttacagatgcaacccaaagactcagaaaggtaaagtgacttgactaaaggggctaaaagtgagattgccaaggcttgtggattctaagcctaatgttctggtattgcttcacagatccccttctgttttcagaggtagtgttagtagtgaaagatgtaggtaaattggggccaagctaaattgggaagtcaacactttcataaaataaaacttttttttttttttttttttgagataaggtcttactcttttgcccagtctggagtgcagtggcgcaatctcggctcactgcaacctccacctcccaggttcaagcagttctcctgcatcagtctccctagtagctgggattacaggtacccaccaccatgcccagctgttttgtatttttagtagagatgggatttcaccatgttggccaggctagtctcgaactcctgaccttcagtgatccacccacctcagcctcccaaagtgctgggattacaggcttgagccagcgcgcctggccaaaacattatttttattttcattgcttgaaagcttcctattcatgttacatactgttgttccgctttgtcttggaaagagtaattattattcagttttggatgtagctgacaacatttgcccctcaaatgagattggtgagatgaaaaccctagataatttcccttgtattcttagtataaatcatgatccagagactgagctctaaagtattctaataaagtataactgactttttatattgtttattgcaacttataaaatgcctcttttcagcagggcaaggtggctcacacgcctgtaatcctagcactttggaaggccacggcaggcggatcaccaggtcaggagaccaagaccaatcctggctaacacggtgaagccccgtctctacttaaaaatacaaaaaattagccgggcgtggtggcacacacctgtagtctcagctactggggaggctgagacaggagaattgcttgaacctgggaggcggaggttgcagtgaaccaagattgtgccactgcactccagcctgggcgacagagggagaccccattccccccggccccaaaaaagcctcttttcatcctcttggcttccacagtcaaatgtcatgcatgtgtgtatttgtttcatggtctcctaggcaggaagctgtaatgcagttagtttggagttgacttcatgaggaaacagaaaaggtgaacattcccactattcagaaacacaggttccccaaccctccctacgttctccactgggaccagaattgtatgttttcagaaaattggctgtaaggctaagttgaagctcatgtactgtagaaagaatgaaggacccttcaggagtatgtgggataacatttgtattaccagtctggtgtggccctgttttatggcagcaaatatgttccctatctcatggtaagtcaggtttgtcagagttacctgtgagatagcctttgcttagtttggaaggggtaagttaggaaaactaagagactgggtttggtggggtcttttatcagggtactgaggagagaggcaaagctatatgtaacagggagacactatttattctttctgctttgacccatttctcttacttcattatcatccttgcctgagaaagctgtcaacctccactcatacacaggcagatctgaattggatgagaaccatgaaggaggaagatttttgtttttgtgggctttttttttttttttttttttttttttttgagatagagtctcacagtcgcccaggctggagtgcagtggtgtgatctcggctcactgcaccctctgcctcccaagttcaagcagttctcctgcctcagcctcccaaatagttgggattataggtgtgtgccacca

SEQ ID NO: 96908 - DNA, 12702 bp, Homo sapiens
gaccaagaacaccctggatggcagctgagtgttcttgcactgcagccattgtcagtgaagctggtgtgtgtgtgtgtgtgtgtgtgtgtgtgcgcgcgcgcgcgcgtgggtgtcgggggtggtgcatcagcctctgagcttggctcaccgggcctgacagacccacttaagggctggttaatgcggtttctgagcccacatggctgagaccgactccagaccctgcaggacccagtgaggtctctagcagtctctcctgggatttctagtctctgcattccagccacaaatggatctatgtcagacactagcaaagttgaggtttggtttctgtagggacccaaatagtttcccacttgtggtagaggggacacaggaggacagtgcttgcttattagagaaacctcttcactacccttaaacctttttagaggttccacctccattcagaggtgctgtgggaatgttgttagaaagacagattattctgtgagaaaatgataaaccaggaagttacatgaaaagcaagtcaggggtcggcctggggtgcaagacaagaagttgggtaagaatgagttgtccaggatagcactggagtgcacgtagctggacaggggcacccagaggtggaggggaggtggggcactccccaggtggggcagagggactcagggcccacagcccaggcttctgggcatcatggtgtggtgcaagtcacaacactgctcccacccatccaactcagcagttcaagggctgtgagcccagggccaagctagcacaccccctagaggggctgagtccttggccatgaagggagggctggcttgaagctgcatctgggctccgcctaccttcacccctttctttggttctctaggaggaaagtatcaaataacaaagcttgtcactcagagaaccagaaaggactccatttgtgtttcaacctccttggagggtcaaggaagcctgcaagagtcttgaggagagtttgatggggctgaacttacagataagcacaatgagagttacagaggcacaagttgtccacagaggccagcaggggctgtgtacctcatgtggccctgtgagctgggatttggaatttagactctgtcctaagagcagtgaggagccatggaaactataataggcaagattgacagggaattgcacttgaaaaacctcctttagctgttatgtagagaaaggattgagggaggggccaggcaggagacagggagacaaggcagaggcccttacactgttcagcatgagacagtggcgtctggactggggagagtgggctagtttggaattagttagggatgaacgcagtcatgcttgctaactggttttactgcgtctacctttgccccttagggcctattctccatacagcagacaatgtgatcctagttaaaacataattccaggtcatgccgctcctctggcttttcatctcagagtaaaagtcaaagtccttaccatggctgtaggagaacagcctgttgcgtggcaagaatgatgcttttttttttttttaacagggtctcactctgttgcctaggctcgagtgcagtggcaagatcatagctcactgcagcctcgaactcctgggctcaaggggtcctcccacctcagccttctgagtagtttggactataggtgcatgccgccacagctggctattttttttttcatttttattttttctagagagggggtctcgctatgttgcccaggttagtctcaaactcctggccttgaaagatcctcccgccttggcctcccaaagtgctgggattacaggtgtgggccactgttccaggccacttgatccaaaaccaccgtaatgaccaatgtttgacccctagatgccaagatattcatcagcaagatctttaaacaatgcctgtagaatagaaaactcttcataaagatgcttatttaacctctccagtggtcacgagtcttggcaagaaagtctgaagacgggaccagctgcacatgttttaccctaagagcttgctatataaaggatactttctggaaggctggttggtgtgaggattcagtcttgcagccactcgagacatcacttctgttcgtaagtccctcttatatatttctctctgagaaaatggatttgtcaacctctttctttggcttctcagctctctcggcctttgggtttgcatagtcctgctatccatggaacaatggctcacaagggccaacacagccttgtctccctcacatctctctgacgacctcatctactacttccagccacctcacttatactacttcagtcactgcttgcctagggccttaggatttcctgtgccctctgcctggaatgtaatccccccagatacctgcacagatgatatcttaccacctcagttctctgcccaaatgttaccttatctgtgaggcctttccagattccatatatgaagagaatcccttatgctctactgtaatgccttctttatttccttgatagcactgcttatagcctgtagttattttacatgttcgttcaaaatgttttcctagggtgcaacacaatgcctggcatatagaaggttcttaataggtatttttgttttttgagacagagtcttgctctgtcacccacgctggagtgcagtggcgtgatcttggctcactgcaacctccacgtcctgggttcaagcaagtctcctgcctcagcctcctgagcagctgggactacaggtgattgccaccacaccgggataatttttgtatttttagcagagacggggttttgccatgttggccagactggtcttgaactcctggcctcaagtgatcccccccaccttggcctcccaaagtgctgggattacaggcgtgagccactgtgcatgaccttttaataaatatttagttgactgagtgagttgaggttgaggatgcaggagggagcaggtgccctccaggacagcagtccccaaccttttcggcaccagggactggttttgtgaaagacaacttttccatggatggagggcagggatggtttcaggatgattcaaacacattacacttattgtgcactttattcctattattattacattgtaatatataatgaaataattacatgactcaccataatgtatggtgaaggaagccctgagcttgttttcctgcaactagatggtcccatctgggggtgatgggagacagtgacagatcatcagacgttagattctcataaggaatgtacagcctagatcccttgcttgcacagctcacaatagggttcatactcctggaatcctagaatcctagaatccctactcctagaatcctagaattagagaatctaatgccactgttgatctgacaggagatggagctcaggtggtaatgcaagcaatagtgagcggctgtaaatacagatgaagcttcactcgcttgcaagccactcacctcctgctgtgcaacccaatttctagcaggccatggtctatggcctggggattgaagacccctgctccaagacttacctcccactgagaactcaggcaggatgcttggaggtgaggtgaaaggtagtgggaggaagggaagcccagtgtatgtgtgagtgggtgtgtgtgcttgtgtgcctgagtgagggtgggtgcttctccaggacccctgtacctcccagttcctggcctgggtggaggctgggcaggacagaggtaaatctgagccagggtctgaccaaggagataacaggttgtgccagaggcaccaggcaaaactggaagggatgggatggagggcatgtggatggaaactattaactctccctggggatggcagggccgaggctttgctctaggggagggggcagtagagttgggccttgaagagtgagtaggagtttgctgagccatgacaaaagaagaaaggcattttgagcttcagaggtctgagggctatgaaaaggtggactagctcagaggatgctggactggactgtctgctgtagcagaggaggtgagacaaagtagtcagcagcccgaggtcagagaggctttaaatgctagtgggaggaccagggactccatcctgagggccccgaggtcagagaggctttaaaacgctaggcagaggaccaggaactccatcctgagggccctgaggtcagggagactttaaatgttaggaggaggaccagggactccatcctgagggccctggaagagttgaagcaaaggaatgagagattccttcagctgccctgaaatgggtctaaaaatgcttgggaggcaaaatcctagacacagtgctgggtaggatgttatggctggcatgagggtgtagaggatgatatccatgtctttggtctgaaagcccctgaggtaaggaactgggccctggggttcgagggatgtagcaggtttggggacaacagtgaaagttggttctagccaggtaggctggagcctggagcactgtgaattggggatcctggatctggttccccctcctggagagagactctgatgtcccctgtctcagtactggcaccctgggccatacaaaccttgtcctatgaggaccctgtcccaagcttttcatggtctactacactcagggcccctgggcagacgaggtgggctgggggactgggtagaggctgggccttgaagctggggaaaggacaaatcaggctgtcagctctgaatgccactccccttagctgccctccaagccacccccaaccaggatgcccaggcaggggctgctgtagttgctgcaaccctgaaggggtggagctgttgatctcggggtagcctatggtggcagggagcctcttgggtggtagtttctgttgggggaaggggttattgcatgtcatgggattaaggtgagtaccagcggctagtggatctgtggtggccagtgggagagtcgagtttctgcgggtgagtgggagtgagaggtgggggccagggcccatggctcccggtatttttccacccactcctgtgcttaataatgcttccctgctttcctgggtgccagtcatcctctcctctcccacctatgactgggtggggctgggaccaagtcagcggaggcagggtgggcaggcaagggcagactcctccaccaccccaccctatttgggtgtggctgcagggagcgtgtgtgcgtgcacacctgcgcagcgctacggtggggcgccctcagggcctcaacgcacacagtctgaccccttgggaagcaaaaggagacaagggccagacatgatctggggtcaccagcaggaccaggacgccaccttgcctcactgctctatcagcacctgcccattgccctgaactgtgctccttcagggaagggaggaggcaaaaggagccttaagagggaatctctagcacaaatttaaccatgaacagaagatctatgagaagaaaggaaaataaaaacttaagcgaagacagacacaacatctgaataaatgcacaggaagtgcagatcacagtcctctctggaggaaaagactaatgccagttcttcccaagtgagtccctagattcagggcaacctggtcacagttcagaggtttgcttttccagagcctgaggcatgcagtctcaacttctgacaactggaaatgtagaggaatagctttgacaggtttgtaaatgaccaacaaggaggagagattggctattaaactccaacacagtagtaattatacattaacagggaaatagatcagatgaccagaatccagtaacaaagattcgtacaaaattaggaaaagttcctaccaatcattaagaagaagttaaataagccttggaaaaaaatcatgaagggtttggggtaacttacacaagaactgctcttttgagagtgaggaccactctgttcccttagtgctaggcacccagcaaacacaccataaatgctcaaaaactgaatgttcatcactggtaatcagagaaatgcaaattaaaacaaacgcatatgacattttacttaacagactggcaaaaatgaaaaaagaaacataatatcctgagctggcaggagcacaaggaaatgggtctcgtgctgatgatgaatgtgaattgataacagtttttttgtgatttgcgatagcacaaaattgaaaacagcacaaatgtacgttactctgggctcgctaaataggcactaaataaaacgagtcagtttcttctcccgagcaagtaaactagagggtagatccacgcgacccggagtctaggacacatcctcgggagtgaacagccacaattcacagacgatgtgtgcagccggggcatgaaaggcccaaggcaaacmcaccacgaggtaaacgccgggactctgaggagaggggtggaagccgggacttcgaggaggggtggaattgacttagagacaggagggagcctcttggagggcaaagctgccctgggcaagtgttcttttctttctaaaccttccttctggtctctgtctggaaatttaagcgcgccccctggtgggggagagaggaaggggaagaaaagggggtctcggaggagaataaagtgctcgtgggtggaagaaacctggaacagaaaatgccagaaaaacctggaacagaagtgcagacggcccgcggcggccccggtgatctccacactcaatcaccctctccaggggagcgatcgctcctgaggctgccagcaccccaccaccacccccaacccgctagtgccgatgacggccacagaggcctttctcgcccccagctcacctttgcacacacagttcccccgtgcagagtttgtgcctccctcatctcttagttctcagctaagactttccctgaccccacccaggtcatacctcctgtcgtcgcgccgcacgcagcatcccagacctcaccttcgtattactagagctggcccgttgtgattcaggtctgccttccacccaggctgtggcccccttcagggcagcatggtacccgtcctgctcactactgcacccagagcctaggacatgcctggcacctaagcagatactactgtactcgggagccatgcatggcctgcgcaggagggtggcaggccaggtgacaggttcaaggtggagcagaggagctttattagagggacagggtgaaacatatttacaccggccgagcagggaccttaagaagcaggcgtgggagcagggtcccagctcagacgagttccaccttggcattggggtacaccgccaccacgtcgtagccctcgggcggcttcacgcgcgccttggcgtggctctcacagtagagccgctcgtccagaaagaagtaaccacgctgcttgaggttcaggccgcagtcactgcacatgaagcactcgggatggtagagcttgtcccgtgccttgacgatggtgcccctgatggggggaacgagacaggacagcgtcgagtgactgatgggttcacgactgcgcccgcatccagggccctggaaggctagggtccgggaggggcagcgggggcggttactcacacgatgccgtggccgcagcgcgtgcactcgggcagcccctgcaggccgctcagcggagcgcccagcttgctggccgtgggcttgaggttccgggggccgccaggcccgggccaatcccctgaaacccggagcgtaggtggcatgaacggggtgaggaggtcagaactccatttctgcggggtgtttggttgggcgccagacgggccatcggcacccgagactggggaacgggtttggcgggcgtggggtgaggggcagcgacagggggtggagagggaatcgggaagccagggcgtagcaaggttgtagcaagggcgtgggaccgggccgcagagaccgaagagggcaggtgactgcgaggcgggacgtggggtcgctagggggcaacctgggcactgcagggagtgggaaggcagatggggacaggtggcaggcgtcttaccgccctcgccggcctctagcatgccctgcaagtagcggaaggagcctgactgcttgggctccgcggccacgggctcggctggctcccgcagcatcctgtacacctcggagcccaggtcgactctgcagtcccggctccgcgggaggcctctggctgggtcagcgctgggagggagaaagaaatagaggaggaagggatgcagttccagccttcaccctgtggacttggggtctggtaaggcttatgagtcagaatgcaaccagctaagacccaaggatcaagtgtcaggggtcagagtgggactgggtgagatttgagggatcaagggttaagatgggttctgggcatggcaccgaaggcatctctgtgctacctggggggtggagacacatgcagggtgctcatctgggctggcagggtggcctcgctgctgccattgtgagggactggaaagcgagggggttgtccatatggagatcccaggcttggtctgccatcttctggcccagtcccggtgcctgagggccgcctgctggttgttgggctgccgtcctattagagagaggcctaaggcactgggagaccctctggcctccagccattccttgttcaccccacccccaccctgctgtgctgtgccaggtggtggatgtcagttggcttcctctgcttcggcatctctggcctgtggtgctcagccagggaagggatttctggggaagggctgggcctggggactggttatgcccctgcagaaatgagaaacgtccttggaaagtcagacacaaaaacctgggcagctgagactcagcctgggcttgtgagccctgcagtggttctgcccaccaccactcaggaagggacagtactggggcaggcctatcccaagaagcctaaggtctgtgtggctacagcagagtatgtggcctcctggcagaggtggccctggtgccaagccttctcaccttcctgaactgtggtgggtactgggtaggcccatggctgggaactcaaaaaacgtaactcctgtcctacagtcagaaagggtccttgactgtcatgtgtccaaggccctttgggcaggctgaggctcaagagtgccattgtgaggtcagccccttctgggcctacacctgtcccccatttcctgctttccaggccacaatgagtagccttctgcaggcacagcagatgaggggcagagaccaggctagggctcaaggctctctgccccactaccccacagccagcctggtgcccatggctgaaacattttgggtgggagtgtcctgaacctgccccctcagccatgaggagagggcagtatctctgtgtgtgggggtctgagtggggactggggatctttgtccctgcagagtccagagctgtgcagttcccagcttgcaagtgcacacaagcaccccacagcaatgtaaacaggggcatgcacactctcacaattatgctttaaagacacacacacacacataaggacaacacatatgcacctaccaatctccctacatacaactaactacatgcgcatggttacagagacttggagccagcactggtcaccctgggaatggccatagtggcctccatagctgagactgggctagtagccagagcagcctgattttaggatgatgtctgaggccaggccatggggtaggtcttagcctcagcctgggagtgacgtgtaaacctcctctgctctacagtgtggtcagagagcccagtgtggacaggaaaggatgcctatcgtagtgggaagaaccctggtttggacttaggaagctctgaggcatagttgagcctgtggggttctgccctgagtaccccctgctttttgtagggtgggaacctggggaacaggcagaccagcagttgggtgggcccccctccatttcccccaccccaacagacaaacaggagggtcttgctgcccaggtggcccccatcaatgcagcagcaacaggaaaacccctatccacatcaggcccaacaaaagcccctgagaaacgtgagcgctctcacacgtgtgtctgtcgggcaagcatgcaggcagggctgacctctaatggggaccagatgggctgtggccagtgggggtggggctcagcctccgggcagaggctttggtgggagggaggagttggagggactgggactgggaggaaggaggccctcactcacccctacccagcagggtgcaggggtccactgcagggccatcagagccactgcccctcccacggtcacccatgcagctgcctctctaggcctgaactctgtggctaggacacacatggctacctcagttttagtttgagtcccagggttatcccctaactgggcaagtctcttcacctctctgaacctgtttctttatctatgagctggggaatgtgatgctttccacatcaggttccttgtggagatgaaataagacaattgcatagtgcctggcataaagcacatacttgttggatgaatggctgtcaggggaattcctgggcccccagtcctgtattttccccctctgtgggtggtacacctcgtaccatatgctcctctgctctgagaaccagcctgctgcccacttggttgttgaagcctcagtggatttttcagcaggatgggggtaactacctgctttgggacactcaacttggatggaggcaggcgctgagtccagatgagcaggtgccatctcctagaggctcagttctagctctctgctggtctggggaggacaggctgagtgtgcaaggactgcctgctccacctgacttgcttctccccatcacctggttctgagcataattgccactccttccagaaaaccctactaacccagaaggatagtaataagttactatccttcctccaccctgggctaggccaagtgcctcctgtgttcccacaagaggcctgagagaaggaggttctcctatcgccccacagggaaggtgggcctgaagttccagctggccctgtcccatcccactcggggatgtgtgccagggcaccttgtgctggtcctagggccaactgtggtttcctcctcctcgatggctccagctagctccaccccctccccaacacccccactcaggcagagggtgggagcagcatggggacaatgggccctgtgtctgtgttagcaaggactcagccctgcaggggtggggtgggggtgtttttgtcaccacccatggagcccatgaccttttaagtacaaaagtggggcagcagctgaggggctgccctggtgcttgtggaaactccctccttctccagtctgagccactggcagcctggtcttcaagggagtcaatgagaacaagtgtgggggcagggggagctgctctacagtcgccagcctcccaggcccaccggccctgagcctctcctggaagactgaaccccctccccaccacgtcatcctggcactgctacctctgagggaggctgggcctcatgcatgagcttgaggcccacaccctgctgctcccctctgcctggcctgtggcaaacctggctcatttgtctatggcaacatgtacccctacccctaaggtctggggtccatggggccatcagagcaagtttctgagacacagatgtggccatgaatccctgtaagaacagctgaggtccaggatagagaagcccaagagcctttctgtggccctgctccaccacctcatctctcacctctgtcctctcactccttccatcttgtcctcccttcccctggacctttcttttctctgaacttgtggtgcaagacctcacctctgggccacacttcctctccctatacccctttgcctgccttaccattcctagcccttcaggtcttggcttcaataccccttcctccaggaagcactccttgactccttgtctgagtcatgtgactactctgggctcctttggcccctggcttcccctagcccagaacttctaagtgcctttcccctgccagaatgggcactgcctggaaggtggtaagcatctggctccagggatgccagccaggcagggtagggaatagagcaagatgggattggggtagatagtgagggagaagctggggcacatccttccctctggttcagtgaagcctctccctgccttggccccttttctttcatgttgagagggtggacaaaggcaggcccaggaggcaatggtcccacatgctgggtcccatggttctggctccatcacagaccatcccagtctccttgcccaaactctgtggcccagagatggctctggatacctcagtcatccccacttggctactccttatgccatggcaaaacaaggccctagaatagcctgaccccctcactcttcttgaggacaggaccagagatatgacttctatcacacacagaaaggtgactgggcagacaggcctgcagcctaagttctgctagaagcaccacaggatggccaggagagaacttcaggcttggatagggcactcagaggagtgtcccatagcctgaggtcactccacagcctgagactgccaccaatctcccccgctgcaagcacagtgacttctttctggtctggcatcactgagcaccagagtgaactccagctggctgtgtgatagccgcaaaccaaggcctagcccagatcctggacatcataggcaccttggtccagaatccaggattgcccggagtag

SEQ ID NO: 96909 - DNA, 47077 bp, Homo sapiens
ggcagaatggcgtgaacccgggaggcggagctttcagtgagctgagatcgcgccactgcactccagcctgggcgaaagagcgagactccatctccaaaaataaataaagaaagaaagaatttgggggggggtcagccccccgcccggccagccgcccagtccgggaggtgaggggcgcctctgcctggccgcccctactgggaagtgaggagcccctctgcctagccagccgccccgtccgggagggaggtgggggggtcagccccccgcccggccagccgccccgtccgggagggaggttggggggtcagtcccccgcccggccagccgccccgtccgggaggtgaggggcgcctctgcccggccgcccctacggggaagtgaggagcccctctgcccggccagccgccccgtctgggagggaggtgggggggtcagccccctgcccggccagccgccccatccgggaggtgaggggtgcctctgcccggccgcccctacagggaagtgaggagcccctctgcccggccaccaccccatctgggaggtgtgcccaacagctcattgagaacgggccaggatgacaatggcggctttgtggaatagaaaggggggaaaggtggggaaaagattgagaaattggatggttgccgtgtctgtgtaaaaagaagtagacatgggagacttttcattttgttctgtactaagaaaaattcttctgccttgggatgctgttaatctataaccttacccccaaccccgtgctctctgaaacatgtgctgtgtcaactcagggttaaatggattaagggcggtgcaagacgtgctttgttaaacagatgcttgaaggcagcattctcattaagagtcatcaccactccctaatctcaagtacccagggacacaaacgctgcggaaggccgcagggtcctctgcctaggaaaagcagagacgcttgttcacatgtttatctgctgaccttccctccactattgtcctatgaccctgccaaatccccctctgtgagaaacacccaagaatgatcaataaaaaaaaaaaaaaaaaaaagaaagaaagaataaagaatttcaaggaagcgacagcagagcactgagccaggcacacagcccttctgggcgtggagccctatgtggtggcacaggttatgtatctatgaagccaatcctgctctcacatgttaacatgtacaaaatacatgtttaaacagttgtacgtgatacaatttcactatattgtgcattgtatacttgttttaaatatattttattttcatttttttaagggatttttatttttttaaggcgtcttgctttgtcactcaggctagagtgcagtagcatctttttacctcactggagcctcgaactcttgggctcaagggatcctcatgcctcagcctccctagtagctaggactacagatgagtgccatcacgcccagctaaatttttaattttttgtagagatggagggtctcactatgttgattgggctggtctcaaactcctggcctcaagtgatccttctagcttggcttcccaaagtgctgagagtacaggcgtgagccactgcacccagactttatttatttcttacagatacagggtcttgctttatcacccagactggactgcagtggcagtgatcacagctcactacagctttgaattcctgggctcaagcaagcctcccagctcagcctcctaagtagctgggactacaggcacataccaccatgccagcttttttttcctttctttcttttttggagagacagggtcttgctttgttgcccaggctagtctcaaactcctggctttaagtggtcctcccacagtgttggaggtacaggcatgagccactgcgcccagcctgtactgggctttaaatatattttcttccagttctcagagcagcataataagctaatttaatgcatgagaaatgtttgtcatgactgctcatcagcactgaatggatacaaaatgtgatacttccatacaatggaatactactctgcagtataaaggaatgagctatctaaacacgctacaatatggatgaatcaaaataattatgctgcaggaaagatgcctggcaaagcagaatacatactgtatgaaaatgcaaaatattctgtagaaacagaaggcagatcagtgctgcctggggagagaggaagaagtaggagggaaggattatcctctgggggaaccatacagtggaattctccccaatggcgcgtgagtaaaagtgatgtatattcatttctgggtacagctcatagaaatgtcccatgcaaccctcacttttttgcctttcccatcctctggatgaatgaagaggactttgagagccgaggtgaagacagagccacaagatccaaggagactggatccctgagtgactgcaaagtccccttcaacaggcattggcctgcgacacgaggtagacgagatctaaggtgttaaaactcttgctatgtgaggttggtttgttacagcagctaaccagccctaatacatagtccaaagtaatcatcctgctagaagagagtcaggtgtgcccctcagagtaaggttccacacggacctctggctggttcctgcaaattggactcagcactgagagtagataggtcagccagcctcagggaggagacagtccaaattgctgagccagttttctcatgcagccattgaataagttcttaaatagctgggaagagacagtctgacagccacagaaggggccatactgcccatcggacttttaagaggttcttttgatgaacgttcatctgggacacaaatagccttatgttctgaagccattctggacaatctttccacatctgtcatcctcagaacttcctgtcactaagcctgcagtctttttttccctcaagtccctcaacaacagagtaaatcatgatccaatggccaggaattgatgtgtctttatttcagggtctttgcgtggatttcccttttctgtgcccttgggccctgtctgaggaagactagaacactctagcaatttgcttctggctggagccagcacaccatgcagagccatctgcaaactggactttggatttttcttccttagtcaactcatcattaaaccgttcatgaaaccactgatccaggttgaaggatggaatggagaagagggtggcagcagaggaatgtaagtaacttgctctggcaacctacttgtgctttaggacttgcatggacccaacccacacatgtcacttcctctcgatgacagggtgttgctgagcacccctgattttatggctgagtagatcagataacactcagttcaggtcacgtggtcacctagtaggccaggatcaggcatccaatttcaccagacccctgaagcaagccaggagctatttctaaaatggaatataactatttgctgaaggaaagcataagtttgctccaaaatccaatgcttgagtattaagaccaaagccagaactatttactctgcagcctggtccactaagaaaagtttctctttttgtatgatcctgccttaaagttggcagctttcaagtgacccagtaactggtcaaaataacgtacctaagtacaggccgggcgcggtggctcatgcctgtaatcccaacactttgggaggctgaggccggaggttcaggaggtcaggagttcgagacaagcctgaccaacatggtgaaaccctgtctctactaaaaatacaaaaattagctgagcatggtggtgcgcgcctgtaaccccagctactccggaggccagcaggagaatcactcaaacccgggaggcagaggttgcagtgagcagagatcccgctactgcactccagcctgggtggcagagattccatctcaaaataataaaataataataataataataataataataataataataatgtatcgaaatacatctatgttacctaccaagtctaaagaagccccagcccaagtattgcacctcttccctagtagggagtgtgatctacagcagctttcccttcactttgtacgaaatatctcaacatatcccagactcctagatggcttactgcgaggcccctatatatttgtgagatttattatccatcctctggcacacacatcatgccttaccaaatcatccaggatatctgctattcccttttcttaaggtccatcaagatgatgtcatcagtgcctcagcagattagcctgatatccattagaatggagatttagtaaaaaaaatccctgtaaactggcagggtgcagtggctccgcctgtaatcctagcactttgggaggccgaggcaggtgcatcacctgaggtcaagaattcgagaccagcctgggcaatacggcgaaaccccgtctctactaaaaatacaaaaaaattagggggcgtggtagcatgtgcctctaatcccagctaatctggaggctgaggcacgagaatcccttgaacccaggaggcggaggttgcagtgagctgaaattgcgccactgcactccagcctgggagatagagtgagactctgtcattaaaaaaaaaaaaaaaaaaaaatccctgtaaactaagtggctgggtccagagtgtgacataccctgaagcaagacagtgagggtttaccgctgcccctgccagatcaatgcaagggattcctggtgtttggtacagaagaataaccattgaccagacctcttgttgcctattagagaccaacaactgtgctgatctgtcccaagaaggaccgcatctggaagaatgcctgcagttggggttcttaccagaataagtaagtttatcataatgctctgttgttcttcaaggccgtctctcttctgttctgggcaaactgaagaggtaatggtgatgtgatgggactcaccctgcgtctttcaaatctttgatagtggcattaatccctgggtgagataaggtactatttttgatttattttcttggtagttaaggagagctccagggccttccatgtagctcttcctttcaaaatagcccttgccccatgggttaggaagccagtgtcaggattccgcccctgttgataccaatagcaactctgcatataaccacaatttcagagtacatagcccaggcatgagacagacttcactcaaaactttttttttttaatctgtgccatgtacatgtattatacagtatattcacaaaaagaggggggaaattccatttttaacaattaaatacataattattaagttttaaaaattctcctttgtgtaccactccaaaatcctctcctgcacatactatttttttggaaacacctagtcgtctcatcgttatcacaccggttgtaactatgtacctacgtgtctaccttccccatcagactcgggaacaaggagtcgggtttgagtcccactgtcccaagcacagaacgctggactcccagtagaccatatgttgcaaataaagaccttcgtccctttcaactcaggccgtccacgagcccaggagttccaacaaaatgatgtacagcaaccttttccaggcctttatgttgcctcaatatttctcacctgcaaaatgggaatgatccgtacctgcctcgctgtgctgtcggaaggagtcagacgatgggtgtgaaagtattgtaacactatagaaattaattcactcatccatttaacaggcaattattaagtgctagggtggtgcagcgcgattaccaccgcattacacgcgttcctccagcaggttgcatccttcccgtcccgcgtagggggggaagggcgtctccccaccaagtttttctcccagcgaactccgggtggtgaccttattcaaaatggcgcaggcggcctcgggggctagtgcggcggcgcggactccgcgtgccctctgacctgttggcagcaggcggagggggggaaccgggcgccgccatattggctgttgtcctgtgaggggagcggtagcggcggcggcggcggcggcggcggcggcggyggcggcggcggcggcgcggcgtgtggagcgagggagcggcgcgagcggcggcatgacgcggaggcggagcaggccgagcggcggtgcgggcaggcgcgagcgggctcgggccgcggggccgcagaagccccaggcgcccgagcccccgccgccgccaagcctggaggcgggagcgggtgcaggccctccggaggcgccggcggagcccgaccacgacggccccagggaggatgacgaacccaacctggtgcccggcccgcaggtaggagcgagcggggagacttcggcggctcgggcgctttcaccttccccgagcgggagcgggagtggggcggggttggggatgggccatcctgccgcggctggggtagcagccttcccccgggtccggcgccgaagctttctcccccggggcgggaatggaggctggacccctctccccaaagccgaggctcggtccgcgctcctgcgactaggctgaagctgctcccctctccccgccgcctccgggcgttcyggccgtacacccacactgggactgggactgggactgggctgtgatcccgaggccgcagctccgctctcggcccgccacctcccccgggcccacctgctccctcagccacaggccatctcggggctctgggactggacgactgcagcctcttccctctgcccccgggaacggctccactccgtcccctgcagcgcctgcagccgcggccccctcagcagctgtgtctcctggcgcctcctcgccatacccagcagagcagttggagcagacagccaggctgcccggaggagtttttggtggggtttctgcactgaggtggaaacccagcagaacctgcccttcttccctcccctgctccgcaaggcagcccaccccgaccttgagatcccaggtttggagaatcctgctgagagcgaacagtaggaggattccccaaagcttccagcttgccacctggaagaaggtcactttcttttgagcaaaggagataacgggaggtaccctgccaaagttcactgagmggcgggggtgacatgggccacggttgctctgggagggttgtggcactcggggctgggtggctctccctaagcttgctctgacaaaagagttttgagttggtcttttggctgagcctgcccaggaaggcaggctcctgcaggagtcttggagggtcggatgcggcgscggatgaggatgaggcgtggcggaagatgcgtttggctctgcagacactgcatcgggcagcaggggactctgggaggctggtgcagccagaaggcatggctcttgacagccttctagtagaatctctggaattgtgcatgtgagtggggttgccgtttggggtaccttcccacaaagcctcccctgacctccccagttgcgtcaggtgccctctctgtgcccacagccctctgtgcctccctctggtagcactcccctttctgtgatgaaacattgtgttgatatgtctgttgcctgccctggrctgtgaactccacagggacacaggctatgccatctttctctgatcttccacgcctcgcccagggccttgctaacacagaataaaaataactaggtgaatgagagagaaaatgaatcggtccagaacccgtgcttattgtaacccagttttcatgctgatttcctttgtgtctcagatcacaataaggtttttaattaatgaaaatgtcagcacttactgagtgtcagaagctccaccttcatccgcatccccatctcctatcctaggctgacacttccgtaggagactccccaggttggacccccaacccctactgggtctagcttccaaccccaaagctgcttcccccaccagcctactctgggacccccgtgggagtgctgttatccaaaaagggagagtgggagaagggagagctggaaagctgttgtcttctcttcttcccattcagcagaccatagaatacttcagggtctctgccacatagagatgccaaaaagcttggatgatggctcaaccattcagtttttattaaggacacaactttgccaagagctctaagcttcatcaatttctttgacatctaggttcctaccatgttcttacctactccactacttgacctgctgattcatttatttgtgccaggcactttacataccttacttctaatcttcccacctcacctgtatttctccgcagcgtttagcacaaatatgatgaattgaccattgatgtgattatttgtttttatttgtgaactctgcgagttcaggagccatgtcagtcaccattgtacccctgtgcctggtggttaacaaatattgatcaacaaactggaggatataattatcattactccatttttcagatgaagaaacagaaactcagagcaactaaacatttgcccaaatgactccaactgtaggtgtcagacaaaagaaaagaaaaggacttttaggtactttgggggattttcaacaaggcatttttttttaaactatagccccaaagaagggaaacaaactggtaaattcggttctagttatgccccactttgaccgggggtggggtctggaagcaggcttttgtgccctggtgcaaagcacctagtgtaagggtagggttcagtcattgctctgcctacaagcgtgtttttggtgaggaactctggctcccattgccactcataaccctgtcttacatctacagagtggataaggaagatgaaactcagtgtcatataccaaactgaatccaaaggtggcaaataagaccacttccagtccacaggcttgttgtaatgccccagctcacatattgttttgtttctgtttttattttcatttgagccaatattttaaagatcaaaaggtttcccacacatttggatttggggctcttttttaaactaaagatatggtgatgctgggtccacttttccacaaggcagtaatcagtagtctctgagtagcatttggcccttttagacagcgtatgctccttargcatctttggttctttccaggccccttcactcattggcataacctgtacacatttaaagcaggaccttgagtttaattgggatcccaaatggctttcaattgtttcaggccactaaaccacattgatctgtttcctaacaacccaaatcctcgtttatagcacaagaaggctgaaacagttactaccttattagcaaaggaaaacaaaacaaacaaaaaaaaaataaagaacaactgaaaaagcaattgtaggaggcagtggggaatagtgtttagagacttggattgaattcccagcttagcctcctagctttgtgactccgcaagttgcttctctctgaccccatcaggaacttcacaagaggccttggtggctcacgcctgtaatcccggcactttgggaggctgaggcaggaggatctcttgaggccagaagtttgagaccagcattggtgacatagtgagatctctggttctataaaaaaaaaaaaatcaaaacttagctgggcatgggttcacacctatagtctcagctagttgggatgctgaggcgggaggattgcttgaacccaggaattaagttacccaggacttcatgtgcacgccactgcaccccagcctgggggagagagggaaacaccgtctccttttaaaataataataatacttcacaagagaagcaacctatgcagcagctagtacatagaagcgcctcacctaagagagggggcaggagctgtgccaggtggccatacaaagcctgagtgttctggcctgttagctctgctagctgtctttcatctctcttggaccactgagtttgtaatccagtgtacactcaataagcccccaggagacttgctaggatgtaagccagcagttgktgaggagaggtgaactcatcctacccttccccacctcttgttccctccacattgtcctctgggactttgcccagtctagtttaaagggactctagagatccgattcttccactgttccctcaagaaattggagcagatgattagtcagtatctttaataaaagcatctcattatgtttaattcactcagcagataccaaaaccacctctgtgccaggacctttatttggggtgcacagatggataagatagttcctatctttggggacctcccccttagaatcagtgcctacccagcctgcactacttccattgtcagtaggaggaaatgatactgaggggatccttgccacctctggttcttctttgtaagccagtagagactcactatataaaaatgtcaaaagacctttgaaaatgaagacttacccacttaggattttaatttttttttttaatttagagataggatcttgctatgttgcccaggctatcctcaaactcctggactcaagtgatacttctccttaagcctcccaaatagctgggactacatgtgyatgccwctacacccagctgagttttaaatttttaatttttgatatcagatggatgatcctaacacctttacttacctcatctagaattttttagagcagggtctatgttttaatttatttggggggaaatatattgtgtgtggaccttatatactcaatacatggctgttaaaaattaagtaaggattctaccactttgttcttgtctgcccccacaactgggccaggctggcagttattcatttaggccagccattcgcatgctgtgatgcccagttttatttcacatggcatttattgtgcagacactaaccgatcccagctctgtgccaggcctgggctagctgcgcatgcagaagtgaatcagacatagtcccttcccacaaggggctcatagtctagagaacgtgtgtatagtaattgcagtaatgctagaaggagatatagcatcggcttcctctgaataaaggttcaaatcctggaccctattaagtggcctttgcaagtgtttcagcctcttggtttgttttctcatgtataaaatgacaatccaggctgggcgcggtggctcatgcctgtaatcccagcactttgggaggccgaggcgggaggatcacgaggtcaggagatcgagaccatcctggctaacacggtgaaaccctgtctctactaaaaatacaaaaaaattagccgggcatggtggcgggcacctatagtcccagctactttggaggctgaggcaggagaatggcgtgaacctgggaggtggagcttgcagtgagccaagatcgcgccactgcactccagcctgggcgacagagcgagactcctttctcaaaaaaaaaaaaaaaaaaaagaaaagacaatccagtcttacatggttaatgttagggtccaacaagtgcggtatgcttaacacaagtggtagctctgagtattgtagatatttggtgtcagggttgcccaagacataacctagaggaagatgggtcagagaatgcttctcagagctgagtcttcaaggttgtgtagaagttctccagaggacaaggtggtagaaaggagtctaaacaaaggaaggaacttgtacaaagacccagggcgagcaccactcatttggagagtcgggagagatccggctgaaggggctagcagggttcttgaaaaccacaccaagaggtttaggctttatcctgtaggtggtgaagaatcaatgaaaggttttaagcaggaaagagaacgtgatgtgcttcaatacattctctgatagcatgtgaggaagtaattctcagtgggagagacagctgtgattgcttgattccacctctcccttgccccaagctaataatcaycagatcccctgtgctttgctggaccctatcccagacttacagagtcagtctccaggtctggatcccaggtatctattgttgaattgttcccaagtgactctgacatgtgactgggtctgggagctgctgaattgagggtgccagggggatctttgaggagacctagggtattcttcaaacagtgggtttcccagggaggagcttttccataaacaagaacagaaacaaccttagtttaaaacagaacaaaaaaccttcccccagttctgatctattaatgatatttgccaacttccattgtgtataatcttccattgtgtatccaaacacttacctgtgcctactctgtgctacagcttctgctgaatgactgcaatacagtgacttgtgggacacaggctctgcccttgaaaagctcacagtattgtggaaaggacagatttcaaccactagaatatatatgataagctctattctagagatacgtttttaaacaaaagagtgttaggatatcctagagcaaagccaagttcattcttcctgtggacttaasaggatgtaacacccagatcgagcctaaaaaaaagagaagaaaaaggcagaaggaacagcatatgggaaggtgtgactactttatgtatttggtccttcttggcaggatgtgcagaagcagagaaggactgaggagaggcatgctatgtcttgggaagggccctgtgtgtgtgccttcggttctgtgcctgtgagcctgccttcatccttcagactctgggtggctcccagcacagcagctgcatggttgtgcagcctgtgggccaacatgctgcagtccatctccccttcattctccaccaaaggcccttagctccctttattatttccccctccatgcttaggatgcttagcacaagtggtagctacgagtagatctatctactgtgaaaaatgatgtagggaaactaaagcagaaagaaggggctggtggaactgcaaacactgaaggttttattaggaagttatagccagaaaacaaggagctgggggttcaaagaggccttgaagtcacttgtctagtccttctgtcctttgcttcaagaaataaatttggggccrggcgcggtggctcacgcctgtaatcccagcactttgggaggccgagacgggcggatcacgaggtcaggagatcgagaccatcctggctaacacggtgaaaccccgtctctactaaaaaatacaaaaattagccgggcatggtggcgcgtgcctgtagtcccagctacacaggaggctgaggcaggagaatggcgtgaacccgggaggcggagcttgcagtgagtcgagatcgcgccactgcactccagcctgggcgacagagcgaaactccgtctcaaaaaaaaaaaaaaaaaaaaaaaaagaaataaatttggtttgggcaagtctcacttagtaagtttccctgtcatttcttccagggcagaagaggaaagaaactaacgggtattgagcacctactttgtgccaggcccaggccaggtactttacataatttatttccttctgtcctcacaactctgtaaaatatggttttattcccatttcataaatgaggaaattgaggctcaaagaaattgagtaatattccaagatcatattgaaaatggcaactgggatttgaactcacarctgtgtgtctcgtccccaaaattcatgctcttcctcctccatgagtaacgtgtgctggggttagagtagcagagtggcagtttgacctgaggattcaggtaaatctgcggcttgggccctccttgtggctcattgcacycaggaggcagttcagcggatgagctagccttgtggggatattaaaacagaaagttttagggttaaggtcactaggatcagagagactcactcccaaccgagcttgtacaaccagaaaggattctccactgactagtctcgtagtgtgaaacagctgttctacctcctggaagggcctgagcccacagcctgcatggaagtttgggtaacagctccagggcactgaggtggggttgtgtcagctctcttagaattaactgcagctctgattgtcagcattagaatagtctgagattcttctcactgattgccctctcatcagtggctcagagtgactcatagcatgttgggaaatgcactgttttggctctgttttaaattctgcctttgtgttgaacagctgagacatgagccagatgggctttaagctttcatttatttattcagtgaatgcctgcaatgtgtcaggcccaagccaagcctaggttcctgggcatacttaaatgaccaaggtccacacactgcccccagagggctcacattctaccaggaatttaggaacagacagaatacatctgtggcacattttgatgatgctatactaaatagaatcagttgtgcttagcttgaccagcaagagcttcattgacctttgaccagaatcttagggaatgaataggaattgtcaagggtagatgtttcccggcacttagcacaattggcaggagayagggactctgacaatgttgaatgagggaataaatgggtgaatggaagagtgactgatgataactatgacaatgagtttttctaggctgaggattaatcattttctctgcttctgaaagggaattttagctgctggtgttgtcctctgcctgccttggtgacagagaggctcttggagttgggtgccttgagagtagagtgctctaatgggccatttcaaaatagaatttgggacctgttgcagggcagctggttagatacagcatgtgtcttggggcaatcctgtacgaacatacacaaactctggagatgaaaaagaatccatgggatgaatgaggccacgctgagtgctggaaattcaatccagcttcagagtagtccttgacagctgtctggtctggcaatgggttattcccaaattgtggacagaaaggccaagctagaaaattgagtcatgcccccagagagctatcttttttttttttttttttgagacaggctctcactgttacccagtttggagtacaatgrtgcaatcttggctcactgcaacctccgtcacttgggcttgagcaatcctccaacctcaggagaccttatatattcctaaaaattattgaggaacccaaagagcttttgtttgtgttgtttatatctattgatacttaccaaattaaatattaaagctgagaaagctttaaaatattttgtcactaatttatttaagaaagacaatattaaagctatcttgttaacataacaatttttaatgaaaactatattttccaaaacaaaattagaagaatggccaggtgtggtggctcatgcctgtaatgccagcactttgagaggctgaggcaggcggatcacttgaggtcaggagttcaagacyggcatggccaacatggtgaaaccctgtctctactaaaaatataaaaattagtcaggcgtattggcaggcgcctgtaatcctagccacttgggaggctgaggcaggagaaccgcttgaacatgggaggtggaggttgcagtgagctgagatcatgccactgcactccagcctggatgacagagcgagatttcatcttaaaaaaaaaattagaagaatggtcttcttttcatttttgcaaatttcttttcatctggcttaatagactaaagctggcttctcatatatgcttctgtattcagtcttttgcaatacattgttttggttgaagtatatgaaaaaaaatccaacctcacacaaatatgtaagtgagaaagggaggaatgtttcagtagcctttccaaataatttccattattgaatttgagcccatatcagtgaagtcttcatactcatttacactaaaatctattggtcgagccagtgctttgaatccatcatgctttggtcatttggaaaataggctcactggattttgcacatcttccaaatgttttccatttcattttacaatgccaaaagataacatttgttaatatcaccaccaatttcatcagaaaagtcttcaagtatttggaagctgtcaaactcatggtggtagatgcaagtttcagaattttaattttcacttgaaagcttgcattttatatcattgcccacaaayactgtcagttgttttccttgaagtgacaggctcattttattcattgttcatttttttgagaaaatgtctgccaatacccaagtctaaatagtaagtcattctttcagttaaaaaatggtgttccatgaaaaaaagtggcttcctcttcctttgattttatctctcttttatccaggaaaaactagaatgccctaacttaatgcttctcaggccaagacaaaaaagtcttgggcctgatctggtaagggagcagagataatggttttaatggctacagatgccagccccctaggccctagagtgcacctagagctcacttggccccttcactgctctggggatgtgcatgctacagcatggatcccttgtgagtaatctcacactctccagagattctggttatgcttagagtgaagaaaaattatcttggagcttttttgaggagatcccaaatcagtagaaccsccagaacttttcttccctcatcttttgcctaaggctagacctgcatcctcagaggctctgaaatttaaactgaggtgagcaggaacaatgggctgctgcccagggctgctggattcaagaatcagttccatcagcctttgtgatgaagaaaaatggttggagttttcattcattggatgaacatttactgatctcttctttgtgtaggaatactgtgccaggtgctaaaagtacagcttgggagcagctgattgaaagtctgggttgacygacttttcagggcataaggggtcatgaatgccagaatttgggaaatggcagcagatcacagtcaaagggaactctgaaccaagagctgttctctgccaaagcaaaaatttgaaggaaccagtggcattactgactataaatataacatctctagggcttgggattcttatcaccctctagcaattaaagtggagatgaaagtagcagaggaaagttcccagttccacaaggcatcatacctaggggcaggcgccatggcctagagttcagacatcagctttaggggtggcccctcaaactgcctgggcctcaaagaaggactcaagtgtaccaaactcagagaggacagtggataaactagtcttcartgtagacttagaacagaacagccaaggggcttagataatagattgagtgcctgcagcctggatcccttgagctaagtgctttgtatctctaatgtgacttaatcctgtgggcagctttatgcagcatgggtggtatcatcactcagttctgtgggcagcttcaattagagcttaattagcttttcaggccctgtgtttcttgctttaactaggaagacaacctatcctgtaaagtcacttctagtgatggctaatctcatttattttgtgtaccattttggctctcgggagagtcacattatttccattaactgggggcatctcattataatccctaaagaatgcagtcttttactcttaacgcggttaagattggaaccattctggaggtcaggtggacagatgggcctttctctgtaggcagcagtaatttcaagcagtgtctcattggactgcctgccggctgcattgccatggggacacctagcaaatctgagttctctaccacatggcccactgagtccatgcctgaagccaggccctgtgctgcactgtgagggatccagacaggaatcagacctggcacctgcctcttgtagaagggatggaagatacaggaaaataaattgtgcagaagacayaactactgtaaccaaggcacagtgtactaggaggagatgggagaggagaagtgaattacgagaggagaaagcctagaggaggttggacttaaattgagcctttagtctcagctagtcattggaaaaacatgagaagaaagtgggttttaagcaaggaatcacctttagygaaagcatgaaatagaaaaaggcagagattattttgggaacttagggaatgacttcatggggttgaggggagagattaagatttctaacaagtcagtttagattcatcatatatgagagactcacgtttgtgtaaaatgcagtgaccatttattgtttcctattgttcctgtcgtgttaatgatgaataccatgtgttcagcaacatctatgtgcctagcactggactaggtgctttgtcacatttatttctcacagctgaccctacaaattaggacttaatcccattttacagatgagcaaacagagagggtaagtagaactagcccagcatcttacagctggtaagtgatagaggccaggattaatgccaaagccagtgttgtttccactgcgccccagtgccttccacaagtactttggcactaagtgcagtcacactgattacacacttaatttataagaattgtgtatttgcttttaaaaacagaaaacacacgtatcatacgttttattacacatttgaattgtcggttataactacaaaaccatatacagtcattcctccacatctgtggattcaaccaattgtggatagaaaatattcaaggaaagaaaaggatggttgtgtctatrctgaacaagtatagactttttgcctcgtcattattccctaaacaatacggtatagcagctatttacatagcatttacactgtattaaatataagtaatctggagattgtgggagggtgtgcattggttatatacaaatatgacaccattttatatcagagattggagcatctgcagattttggtatctggggggtgtcctggaactgatcccccatgagtactaagggatgactgtatattgtgctttataggccacataaagaatttcaggctgggcacagtggctcacgcctgtaatcctagtactttgggaggccgaggcgggcggatcacgargtcaggagattgagaccatcctggctaacaccgtgaaaccccgtctccactaaaaatacaaaaaaattagccgggcgtggtggcgggcacctgtagtcccggctactcgggargctgaggcaggagaatggcgtgaacctgggaggcggagcttgcagtgagccgagatcgtaccactgcactccagcctgggcgacagagcgagactccgtctcaaaagaagaaaaaaaaaagaatttcgagaataactatacaagattttaattgtatgtactgactttcgaacctagcatgcaaatgaaatgaaaccgttgtagtaaaattacatgtcttggtgctcgccttgtggtcatcatcatggcaggaaaagggactctatctagagttactgtggcacttcgtagctatggaaagtttcctctttgccttaatttctctgaataccatccttctctatccaccttccacccctgcagttgccattaaacaactgtcttgctcattgaaatgttcccttggcagacactgatttaggctgtatcttttgtgagttccacatgtaaaatttctgtctctctggtactctttttctaagttccttgtacttccgaaagtttcattatgcttctggtactactgtttggttcctttcttttttgagaaaccaaggacccaagtcagtgtaatggtaacattagaggtttaaggataccctaatgctaactcattatgagaaagtaatttcacgggagaaaaatgatggcattatcttattggtaggatgagggtgatacccttattattcccgtaggcctctgcagacacatgttacccagtgttgggtaagtttggaaggtatgtcagttaactaccattgcataacaaaccacctccaaaacctagtggtttaaaacaataccactttctatctctcatgagtctgctctcggctgggctcactcatgtttctctgatcagctggccaatcagstgggaagactttgctttctccacaagtctctcacatccctccagcagctagcctggtctcgctctcaggccatggcagaggttcaggagtgagcaagcccagccgtgcatggaaacaagtggaaatgtatacacacctttcaggtttatggctggcagcctatttgctaacatcccattggccaaagtgacatagtcaagcccagtgtcagagtgggggcagatacaaagttgtaggatataggaagctattaattggaggcattaaatgtaatcagtctcccagtcaggacccctcaatgtgaaagcaaacctacagacttatakttgtttttctttttttttttttttttttgagacggagtctcgctctgtcgcccaggctggagtgcagtggcgcgatcttggctcactgcaagctccgcctcccaggttcaagcgattctcctgccccagcctcccgagtagctgggactacaggtgcttgccaccatgcccagctaatttttttgtgtttttagtggagacggggtttcactgtgttagccaggatggtttcgatctcctgacctcgtgatccgcccacctggacctcccaaagtgctgggattacaggcatgagctaccgcgcccggcctgagttatatttctaagcaagtttgtcacagaaggcaaaaaaaaaagtccaaataatgactgtattgggcctatgctatgggcatacacagggtagacactttacctgctacgcagtgatgatccttacaacaactctgcaaggtaggtaggaattggagcccagagaagttaaataacttgctcaaggtcacccagccagtatgtgttcaggcaggaattagaatgcatatctgtttgatttcaaagcccagactgttttcaccatactcactacctctcaggagcaccaaccagagccttaccttccctctgacacaatttcccattgagttgatgctttctgactagctgtacaaacgcctcctccaaaatgttgctgcgatcctaagggaattgtgcaattcttcagaaaacccacacattctcctaaactgtccactgactaaaagcattctttccttccagatgggcattggtccctgggctgtacaggcagcccaagaattgtggacactcccagccatgccagagagggaagggccatcttctctttaacctttaagatttggggatgtcagagaattaggatatttgagcatgagttttggagccagactcactagggttcaaccactcgctagcttttaaccttgggcaactcatttaacttcttgaaatctgtttcttcatcttaaaaaatgggaataagaacacctcgtttgcagagctgttacaaggactaaattttaattatgtctaaaaagtgcctaacccagtgcctggcacgtaataagtggcattactaatattgttactattattttgaaggagagcctttcccctcctgggaaaccctgtttctgtctgttggacaggtcccccccgcctccagccagcctgtgcagacttgctgcctgctgtgtcaccgggaacgcaaaggctgggaagaaggcccttctcaaaatggactggtgttgcagggtgagaagctgccccctgacttcatgccaaagctcgtcaagaatctcctaggcgagatgcctctgtgggtctgccagagttgccgaaagagcatggaggaagatgaaaggcagacaggtcgagaacatgcagtggcggtaggtaaccgctgacaggggtccctgaatgcaggagggctcctccccaaggaagtcaggctgttccctgtcctcaggtggctctccttgggcagctcccatgcccaggcactgagagacttctgggctgcactggcacagcattggcagctcaagttcagatttgggggaagaagagaaacttctggcagcccaccggtcagtccctcagggtggtctgtgcacaggatgagggcccactcataggtactggtagatcacgagcctgctgccttcggctctgtggcagcttgaaagccaaccagtatgacatgggagacagagatgagtttgagggtctgaaatgtgccctagttagaaggacagacacttgggagtcatctaagtctgctgtttcatgaatcacgatggccagactttcctcatttctcacgtcgctgcagatcttcccttttacccaggaacagtttagcttcaggactcctggtcaaaaggcccttcctgtcattggccgctctctactccccaaaggcccgcagttcacaggcagtctctgcccctaccagagtctctctccccagtctccacacattgcatgtaagtgggaccaccacagccctttcccagcaaaggcctggccctcatttgttcttatagctggagttgtattaattgtgtttttgctatggcacatggtctggaggagaaggagctccctcaggaaaagctgaggcagcagagggtcagctccgatgtttgctgtttgaccgtgagcctttttcctcccccttctccagatctccttgtcacacacatcctgcaaatcacagtcttgtggagatgactctcattcgtcctcgtcttcctcctcatcatcctcatcctcgtcctcctcttcctgccctgggaactcgggagactgggatcctagctcgttcctgtcggcacataagctctcgggcctctggaattccccacattccagtggggccatgccaggcagctctcttgggagtcctcctaccatccccggtgagtctccaggctcgggagagagccaggccctataaatgtggacagctgtgttttcctatccactttgttcaaacaaatcataagactggttactaaaataagtaaaagtggaactgttctggtggaagcaggggcagcttagaccttgactatttctggaactcctttccccacaactctgaacttgaaaaatactgctaatagaaaaacgtttgcctctcaaagttgtcattggctctggtagttcacattggatcaagagggcatccggtgaggtctgtctgagtagaaagtggagtcataggacttagatcacctgacccctgcagcaccacagaggacctgggcaaccttgtcttcctaggccttgatttccccacctaagggatgggtataaaagcactgaatttaaatgcccaagagattggcagtgtaagccgtaatagttattagctaatttagcagctgtgtaagtcttctttgaccctgaaataactctcagagacccagagacaaaactcttgggttattggtttattatgtaaatatgatttactgtcatacttctaaatgaaggagctgagttcttcaaagtgggtctgctcccagaattatgagtgttgagcagtatataattccattaattttggtacataagctagagagtcatcagaacctttttcccacttgtctgaaatctggggccctcaggggtctggcatgccctgctgctgtggtacacgtggcacagaggcagagcctgggcctgctgctccactggcttctgcagatcatcctccaggcctgaggagcacctgtgtacaagcagatcctagagagaccctcagagacagaatgcatatcttctgctcatgctgcagaaaaggcatggggccttgtgtggaatcagcattcctagtaccttcttgcttgggcctgggctccttgagcctgctcagctgtgttgctgcccacacagaatcttctgcagctccagggtcccctgtgctgagaggctgtgccctcttgtcacagaagcaggatgctgtggcagtgagcctgtgggctttccttcccaggtctgggctcccattctgacccctttctcctccctctgcccacaggtgaggctttccccgtctcggagcaccaccagcactcagacctcactgctccccctaacagccccaccggccaccacccgcagccagcatctctaatcccgtctcaccccagctcctttggctccccaccccacccacacctgctgcccaccaccccggcagcacctttccctgcccaggcttcagagtgccctgttgctgctgccactgccccccacactccagggccatgtcagagctcccatctaccctccaccagcatgccgctcctgaagatgcccccaccattctcggggtgcagccacccctgcagcgggcactgtggtgggcactgcagtgggcctctyctcccacccccgagctctcagccactccctagcactcacaggtaagtgtgytgcatgaagggcaaastcgctacccacttgaacttagaattttggaaaatttggggttaactttgaggtggcaattaaaaagtagactatgtctttcctttcattatttttcaattgtaaagaagtatgtgttttggcctggcacagtggctcacacctatactcctagcgctttgggagtcctaggcaggaagatcacttgagcctaggagtttgagaccagcctgggcaacatggcaagacccccctctctacaaaaaattttgaaaattagccaggcatggtggcatgcaactgtagtcctagctactcaggaggctgaggcaggaggattgcctgaacccaggagtttagggttgctgtgagcattgatcatgccactgcactccagcctgggtgacagagctttaaaaaaaaaaaaaaaatagtatgtggggtttttttgttttgtgttttgttttgttttaacttggaacaattcagaaatgtataaggaaaaaaatgtcttcacaacctaaacttctaccactgtggtatattttcaccatgtttctgtatataaataacatacttagatatttgatatacctttcgtgtagtagtaattttttaacattatgtcatgatcatttccccagttaaaattcttcaagaaacttttcaatagtcatataatgtcttactgtatagctcaagcatactttatcattcccctattcctggatatctaggcatttccagttgtttaaccataatgaatgagactgtaataagcatccctgcacctaaatctgtttgaatgagaaatcatgtccttcagggagattcctagaagtaactcttaagtactaagaaaggttatactaacatatatttgaaagagaattctttggagaagatagaggtatatttttatgttagaaatcagatctgtgtttatcatgcatttctatcttcctattggaaagtctcctgtgtctggcacatgccgggttgacagtgtctgcagtctgccacccgccggttttcacttagcgttgcctcctcagcatatttgtgttctcttgtggtgttcttagcctctagcttcaaaggctggagaacatcgaccgcaattcatgttactgttctctagttgctgagcatttgggttattcggacattttaacattaccaacagtgtctctaaagatgtcttttcttaaagcctttttcctcttttggatttttcttgttggaatcaagttctcagaatgaaaaaagttactagttaaaggctgtttaggtgttttttgttctctttgagggttcttaatacacattgaaaaactgctatccaaaggggtctccaaactgatgtaaccaccaatgagtgctggtttcccatattcacaagcacactattttaatttttctaaaatcaattttgtggcctggtgcccagctcatgcctataatcccagccctttgggaggccgaggcagaaagattgcttgagcccaggagttggagactagcaagggcaacataatgagactctgtctctacaaaaaatttaaaaactagtggggcataatgtgcatgcctctagttccagctacttaggttgcgggggctgaagtgggacaggatcgcttgagcctgggagatacaggctgcagtgagctgacatcgtgccactgaactctagcctaggcaacaaagtgagagccagtctcaaaatagaaaataaaatcaattttgctggccaggcgcggtggctcattcctgtaatcccagcactttgggaggctgaggtgagcagatcacgaggtcaagaattccagaccagcctggccagcatggtgaaacctcatctctattaaaaatacaaaaaaaaaaaattagctgggcatggtggcgtgtgtctgtagtcccagctactcaggaggctgaggcaggagaatcgcatgaacctgggaggcggaggttgcagtgagccgaggtcgcaacactgcactccatccagcttgggcaacagagcgagactccgtctccaaaaaaaaaaaaaaaaaaatcagttttgctaatgcaatagataatgaatggttggtttagaacaaacttctgtaagcaccactgataatgattcctgccaccatcttttttaatccacgtcacatgcttagcatcctttctagcagcagagagggctgctttggactgccctggaagctgggcctccacacagctccttgagctccgtccttgctctcagttcccctgccacctcagcctcagcccagcgttgggaccagcccaatgggtgcttcagctgctcatggcccagcctaaggcttcagctcttcctggctcaaattatgggatgtttcaggcgtatgtctcattcttaccctgggaaaatattctgtattacaagatatcccagtgcttcctgaaatccagaggcagaacaatacagtggagagaatatgagctttgcatagagagaaacgtgggcttgagttccccacatctcccctgcctgcacccaccatgtaccccttctcagggcactgtgcacatctcactttatcctcctgtttatcgtgcatcattgtcactgtctgtttgcatccttgagtcctggccacctgttgggcaaagcagtcaagtactcagcttcactctctaccactgcaaagtggggataatgacacttrttttggaggacttgggggatggttagaaataatatgccaaggccgggcgcagtggctcacgcctgtaatcccagcactttgggaggccgaggcaggtggatcaactaggtcaggagatcgagaccatcctggctaacatggtgaaaccccatctctactaaaaatacaagaaaattagccgggcgtggttgcgggygcctgtagtcccagctactcgggaggctgaggcaggagaatggcgtgaacctgggaggcggagtttgcagtgagccgagatcatgccactgcactccagcctgggcgacacagcaagactccgtctcaaaaaaaaaaaaaaaatgccgactctagaacctggcacaaacagtggctcttatagttggtgtcccagaagtcacttgctttttctcaactccgtgccctgtggttaaggcagctccacccatctactccagagcaccagagtctgctcagaagcaccttagaaagtgaaaggagactggcctcatggatagccctgagtgttccagaggagccttcagcccactaatgggttcaggcctatttattgagcacctgctgtgtgcagggttgttatgctacacactgggacccaaaaactgaagcaacacagcccctgcccttgaggcgtgcagtccagtttgagagacaaatgcgcaaacagaccatgacagtgacgcacaataagcagaagatggagtgacgtgtgcacagtaacctgagaaggggtgcatggtgggtgcaggcaggggaggcgtggggaaacctttccagaagagccacatttgtgtttgggatgggccttgagggacagtgcaggtgttcgccctgttcaggtgagaggtgcaatgtagttggaccacctgggacctctgtggagtggggcaagtgaagggcggtcaggatggcaggtggtggttgggatgcttcctgggtttctgcatcaccctgcctcacctctgggccttcctccccatcatcagggatcccgggtgcaaggggcacaagtttgcacacagtggcctggcttgccagctgccccagccctgcgaggcagatgaggggctgggtgaggaagaggatagcagctctgagcgaagctcctgcacctcatcctccacccaccagagagatgggaagttctgtgactgctgctactgtgagttcttcggccacaatgcggtgagtgagcctgcccaggctagagagggctgggggccagccaaggtgagcaaaaggagcaccctgctctccccagagaccccgttgctcacggtggtaattaccgtgctggggccgtgagtccttgcacctgcgtctgctcgcttgmtcctcacagcacatttgtgaggtaggggtttttaaacattttgctacctttgctcttctcatggtttctcttaagattgactttttttccttaggcaaaaggaaaggaaatggcagagagaaagctatgattctgatgagtatgtatacgtgtgtaatcccagagaagtgaacgcttgggagtgatgaaggcagagtggaagcaaaaaggctctcagtcccccaagtgtgacagccagccgagggacaggccgtgagcacagacggcgccaggaaggaggctcagatcagagggcatgctggctctggccagggggaggaagcagtgcagaagtctcataaggtgaagaggagagggccgctggttagggtagagcagctgaggatagaagaaatgaaagtaattaaattgctagtcacctttgagctaggggttattatcctcattttagagatgacaaaattgaggctcacaaagactcggtgactcgcccaaggtcatacagcttcccagtgacgaagcccgggctccaacttgtttttctggctycccagtcagtgtttgcccagctctgccctgttccctcctagtcccttcacccactgccgcctggattcagcctggctgagagggtgaagccatgtggccttggtggctaatggtagagagaacagttgtcttgcttctcatcacatacttggtgcccgtgggagggagtgctgtgggccccccaggcccagggtgtaatgtcagcacctcccccccacccccagccacccgctgccccgacgagtcggaactataccgagatccgggagaagctccgctcgaggctgaccaggcggaaagaggagctgcccatgaaggggggcaccctgggcgggatccctggggagccygccgtggaccaccgagatgtggatgagctgctggaattcatcaacagcacggagcccaaagtccccaacagcgccagggccgccaagcgggcccggcacaagctgaaaaagaaggtgggtgtagggagagcccagctctgccgtctctcctccctgaggaccctcgccccaacccccaggacttctggggcatgaatgatgctggctgccaaaggcctcagcttggctcactgttctgggaaggtctgaatgagtttgggaggcatcagggtcagggatcctgggggcaaataactggaggaaaaaacgtgtcatggcctgagaagttgcttgctggattcctccaagctgaggacttgcttcagtcagtcatttattcattcagcaaacacttctacaaatactggcagccaaagtgtgacacagttaagttctcacccagaagaagctgtccagtggggagactgacacaaaactggacaagcatattagcatgtgacaagtactgggatgagggaagtcccccatcctgcctggaaatggctttacaagaggctgactgtgagtacagactcctcaggagggccctcctggcagcaggcacggcacattccacagcagcttgacagccaaaactgagcagaagagaggcaggatggacagtgttgttgagggagggcctctgaggccctgcggaagagctgtggctttatcctaccggtgagagaagtcactgagggttttaatcaaagcatgcacttggtcacacctgcatcctaagattatgccgtggccaaatggaaggtagcttggaggattccaggcaggaagacctcgagttcgatgcctcaggcaggaaacgcaggccaagggagagatgattgattgtggggccagagaagaagagagggattttcagaggaagctgaagtgatgggcctttgatctgatggcaggagagggagatggaggcagggatgtctcccaggtgtttgcttggtgaccagcaagatggtggtgcctttcactgagccaggatgggatttgcagaagacagtgaattcagttgaggcatgttgactcgaaggttcccgtgagacatctaagtggagaagtgcagggctagcatttaccagcgcagagatgtaattgaagccaggggaatgaaccaggcctcgggactgaggacagaacctggtgatctattcctcggcagccctcctgccagatgagccccagagcttgatggcttgtcccttgtggcttctttrcctcttcacctgcctactcccaactgcatctgcacagtgacacgtttaggagcccagcatccgaagagatttgggtgtaacaaccagctagttccagttcctgggtggtcaaacagccctagtgctttggaaagcagaagtgattcaccatcctttttcagccccaaggacaaccaggatccttctcccgccgcctgaagtagtgagccaagggktcccaccgctgccttctgaaggtggtcagcactgtctttctcccatgcagtcacctagccagaaaggttcagtgggctgcagtagtctctggcctttcctggcttcttaggacagtggttcccagttaggtccccagagagcacatccggcagttcccaagtctgatgtgcttttcgtaaatatgtgtgctcagatgtctcttcccctttactgataatgctatcttctctcaccttttcttctgacaaactttccttccaagttcagttcagctgtttcctccttcatagccatccttgggtaacttccactgtactcccaacctacctcatatatctggaggctctgctcactcatcccacactgcacagctcctgtctggcaggcccaggcagaaccaggcagccctgcctttccagacttagtcgtggggctgcaggcagggacagacacacagtggcagcgtgatgcatcaagtgattatggtcattatctctgtagacagcagcctcctcccttgtctccttccacctcctggacttcacagtctggctctccaccaaagcccagctgctccttctctcccgcctcaggaaatggaaagagctcagtgtctctctgctcccttctcccactgccagcccgtgacactctcaccttgtctttgtgtcttctgtctacacgaaggtgagagagtcatgggctgacagtgggagaagggagcagagagacaccctgcttcttaaaaactgcacccctggctctgtcatctgtgacctcctgccactcctccacatccactgaagactctcctgccccgttctcttcttcccaggtcaatccgtttctcacycacttgaatggagtaagcattgctaagtattggtaggagggcaggcaaattgacccatcactcactcactcactcaccagtactcaattccttgtcccgctgtctttccttcagacccactcagaaacactgcagccctgggttccaccccagcctggctctccctttctacagctcaagaaaagcacatgagtgaatctgtggcagccagccacgtgggctcccgattgccgagttcccgtgtcgccaggcgggcctctcatggttccctgggcttcctgtaccttagcacgtccattccccacagtccttctgtcaggcctccagtcttctcaaaccgctaggccttccgagcccacaccttattttttggcaaatagcctcactttttatttcaatgaggaaaaaagccattatacagggattctcccactgttttgccattcccacctgcaaacwtactttcttccttgtcatgagagtcacccttttcccgcctaaggcctgtgcggtactttcttgacccctcagcccagcagcaggctcctggtctagcttagcctctcctccatgctgttcccgtccacatttcattgtgtccaccattctcttttttggaagcaaactgctccttgagcctgttacctctctctcaacccctccccagcctctttcctctcatcacagccacacttcttgaaaaatgatgtctgcattcactgtcttcccttccacccattagctcattgcaggcggttttctacccacaccctctccagagtcaccggtgacttttttgttgccaaatccatcctcctctgctgttcccatcgtgttagtccactagagaatatctggcatttgtgtttgtccttttcacacattgtctttgggctcctctgtcctcagccaggcaggaaagggcaaggggagtgccatgttctccagatgtcttgcctgcccctctgacgtcctttctgtctcctttgtgagctcctcgtcctccacttgaccctccttcatggggacatctccctgggaaagagatgccatctagaaacagcccaatagtgtttcctccccaccctgtacatccacgtctccaactgctactggacacctccttgtggacgtcccacaggtatctcagactctgcacatccaaagttcagcttgttgtctttctccgaacaggcctgctttcccttctctgttgtctgtctagtcaatggcaccgcctcccaccctgttgcctgagccggagcmctgggcgcccgcctggggagtgcatcatagtgacctggaacagcatgcctggaactggatctcagtttgacacttggctctgccacacttgctgtatgacattgggcaaatcacttaacctctaagcctcagtttcttcatccataaaatgagaataacagaacctaagtcgtagattgttgcagggatgaaatggagcgatgcatggaaaggttaggcagagtgcctggcacatgtgagttctcaggcagtggggctgctgtggcagccatagtggccatcaatgtttctctgacttttctcattctgtctccctacccagcaccaaaagccctatccatgccacatcgctgatagctcagaccagtccaccgctctccaccctactgccactaccttaaaagccatcagtggctggacattgccctcgggcacaaacactgtagggcctgcagggcccttcacgatcagcccctgccagctttatctctcagcctctcctttctgaccttcctgcccacctgccccacccaacccccacatcccccaaaaaatctgggctacagctatacctctgaatgatttgcattcccagaagatactgagctttcccatttccagcctttccacttgctattccttctctctagaaaatgcttgtctcactgcctccgggatgattccactccccrttctgtgctcagtgcagatcctcccacctccaggaagcactccctggtgaaccagtctgtgttgggagcatctcctctagattcccagatcaccccgtgctttcttccatgcagcacttgtcactgtcactctgaattcaacaggctgtttgctgttgtctccctcagcagactgaagtcagcgaggcagagaatgtctcacgtacgctaaactcacagggcctggcctgctgcctcacagcctcaatggtcggtaaatggttgtcagatggaattgagaaacataggaacttctgaagatcaggcctgggtgtattgtcctggctctgccacttcctagccacctcctcctcctgttctttccaaagtcgaggtttctcacctataagcagagggtcatgatgcagcaaagacagtggcgaggattaaaggagacatctatgggaagtgctgacggtacagagcagaaagtgtgtgtttctgtgctttctcctctggcttccagagtgtatatggttccatatcattccctccacaccagcagttgtcaaacttttttttttttagcagccaaacttttctgtgaaatctgtgtggtgctgggggagcgaggtgaagggcccttggtcctcgttggtccaacccagggcctctgagccctactcacagctagaaatgctgctgcagctgctgcagaccaagctgctccctgagggccacgaagcccagccccaccttcgcacatgggaaaggaccccacacagactctcagctgtcctcatactgaccctggaatgtagagatacctcttcttcctaatttacaaataggaaaagtaaggttcagagagaataagtgatttgtccaaggtcccacagaacaattgactgtagtccattgtggagccagggttcacaaaagataagtgcctgctgggacgcagggtcaccctctgtacattgactccgaggtggtagcaagccctggtttctctcaccagctgccctttcatgtttctcttcctccattcccaaatcagctggaagtacaggaggcagtgggagtcaatggcgccaggcgyaccacagcaacctccttcccgagggttttttatctgccgcctgtctccctctaaaggcatcgttggccttgaggtgggatggagaggttggggtgactragatcccacagactttcattttgattccctagatccagatctgtcaaagccaactggcagggcctggcctctctgagccttccaggcctcacctgggcaaaggagcagctctcacatcttgctgtgtaggccagtgtgtttgtccatggtatgccattgggcacactctaggtgtgaccttgattacttgagaccaaatgtgcagcaagtggcctctctacgggaacaccgccctctttggtaacacccagacatagcatcaggaaggcacatgccctcccaaccagagtaatctcatctacccccacacctgcctcctgtaagaccccgtgatggcatggctttttccccaccacccgtaggggtggagagaatgcctctctagtagtggtcttcacatgcatccccactttggctttactccggaattattgtccccattttgcagattagtccactgaaactgaggctctgggtgaacaagctgtaaaaaccctaccctctgtgggtgtgactacccctgcccccaggacatgtacctgtctggctgcagtttgccctcactcctgcagggtgggtaagcaggctaggattttaaggctttgcttccagcaagttagtggcaaagctgggccccaggctgatgggtcaggtatcacattgtgcctggcagttgacagcctcctgctaaaactgcctcttgccttggcaggaaaaggagaaggcccagttggcagcagaagctctaaagcaggcaaatcgtgtttctggaagccgggagccaaggcctgccagggagaggctcttggagtggcccgaccgggaactggatcgggtcaacagcttcctgagcagccgtctgcaggagatcaaaaacactgtcaaagactccatccgtgccagcttcagtgtgtgtgagctcagcatggacagcaatggcttctctaaggagggggctgctgagcctgagcctcagagtctacccccctcaaacctcagtggctcctcagagcagcagcctgacatcaaccttgacctgtcccctttgactttgggctcccctcagaaccacacgttacaagctccaggcgagccagccccaccatgggcagaaatgagaggcccccacccaccatggacagaggtgagggggccccctcccggtatcgtccccgagaacgggctcgtgaggagactcaacaccgtgcccaacctatcccgggtgatctgggtcaagacacccaagccgggctaccccagctccgaggagccaagctcaaaggaagttcccagttgcaagcaggagctgcctgagcctgtgtcctcaggtgggaagccacagaagggcaagaggcagggcagtcaggccaagaagagcgaggcaagcccagccccccggcccccagccagcctagaggttcccagtgccaagggccaggtcgctggccccaagcagccaggcagggtcctagagcttcccaaagtaggcagctgtgctgaggctggagaggggagccgggggagccggccaggaccaggttgggctggcagtcccaaaactgagaaggagaagggcagctcctggcgaaactggccaggcgaggccaaggcacggcctcaggagcaggagtctgtgcagcccycaggcccagcaaggccacagagcttgccccagggcaagggccgcagccgccggagccgcaacaagcaggagaagccagcctcctccttgggtgagtgcaccaggaactgagcggctgaccccctaccccagccagtccacggggtggaggggcagcctttgtgtgtagacagcgctgcccccagagcataaccccaaaggcctggccatgggcactgagccctcctggctgtgtcttcctagacgatgtgttcctgcccaaggacatggacggggtggagatggatgagactgaccgagaggtggagtactttaagaggtaggtgtgggctgcctgctctcccacttgtggaggactccaggtcctgcccacactcaagccctgtgttgtgcctcaggcctcagaaaggcctgctcccttggccctgaccccttggggaggctcaccgcccccccaggccctctcccaccagcctgcctgccgaaaacccacggagccactgggcaggatggcacatctgggaaggtgcaagagataggaggaggcatgtcaggccccaagaaccagggctttttccagctttatttgctttgtgtcttcacttgcacattctctgctttgcctgggctgaggtcaatgaagcagtctagaccaggagtctggccatgaacatgcagcctactgataaatggcatagagttggggaggatagaaggggtgggggctggccaggaggccttcccaggagaggtggtaaccaagttgaaacctgaagagtaagaatgagttggccagataagatgaaaaggtattcatgccaagggggccagtgagtacaaaagattagggtgaaagaaacacggcatacagtcaccctccatatctgcaatcaaaaatattcaggaaaaaaaacaaaacacaaaaaatagcaatacattactaaataatgcaaattttttaaaaattagtatttttggccaagcgcggtggctcatgcttctcatcctagcactttgggaggccgaggcrggtggatcacctgagatcaggagttcaagaccagcctggccaagttggtgaaaccccgtctctactaaaaatagaaaaataaggcaggtatggtggcacgtgcttataatcccagctactcgggaggctgaggcaggagaatcgctggaacctgggaggtggaggctgcagtgagctgagattgggccacagaacgagactccgtctcaaaaaaatacgtatttttacaggtggtggctcatgcctgtaatttcagcactttgggaggccaaggcaggcggatcacttgaggtacttgaggtcaggagttctagaccagcctggccaacatggtgaaaccctgtctctaataaaaatacaaaaattagccgggcgtggtggcgggcgcctgtaatcccagctacttgggaagctgaggcaagagaatcgcttgaacctgggagtcagaggttgcagtaagccaagattgtgccattgcacttcagcctgggtaacagagtaagactctgtctcaaataaataaaaataaaaatataataactacatagcatttacattgtattaggtattttaagtaatctagagatgatttaaartatgtgggaaggccaagcacagtgtctcccacctgtaatmccagcactttggaaggccaaggtgggaggatcacttgagctcaggagttcaagaccagcctgggcaatatagtgagaccctatctcttatttaaaaaaaaaatagtaattttaaaaaaaagtatatgggaagagcagtgcaggttttatgcaaatactacaccatttttatataagggatttgtgcatctgcagagtttggtatctgggtaactaatccccagcagattcagagggacgactgtacttaagggaatgayggaagccagcctagcagagctagagaatcraacaccagatgaggaggaactggaatcccaaggcagtttcactgtcttcatacatagttccctgggcccaatccagaagcccccaagccagcaaagctcctatgcctgctaaaccctagcacctgagagccaaagaggttttgtagagaacctggtctcttagtgatggggacatggtaccttaggagtccagtgagcaaaagaatgaacctctgattgtgcttctcatgtgtcccccaaacccaacaggttctgtttggattctgcaaagcagactcgtcagaaagttgctgtgaactggaccaacttcagcctcaagaaaaccactcctagcacagctcagtgaggtacagagaccccaagagttacatccactgcctctccctgtgcttggccaccctctctgtacgctcaccagaccattctgtgctctggggcacagggagttggacttggggcatgggatccctggcttctgtctgcatcttcacagcaatggctggctacagcctccaaaggtcaaggccccatctcctcccgcagccactcacctgtaggcctctgttctattactcctccctgggccctgctgcccatgctcctgrmggtccccttcctggactggcatctcctaaggcataaccatcagggtcttaaccagctgatttcaaaagtgcccaggtagccatcagacccatggggctgccctcacccctgatgttatcagtccttgtgtcaagtcccacttcctgccctgggctcctcagtgtaggctaccaaggtacttcccagctgaagcagtataagaaggggccagccctgagtgaacatcgtgggtcatttaggcatggaggagttgatgggggctacccaaagcagggcaagctccatgaggatattggtagccacagtgcctcctagaggaagagacctgggtgccagatggcattggcatcccctcccagccacccacacaggtccttttgtctgaaacaatgatgtaccagatgatgatctggactgggaacagacaactggagaaggcactgggcctggaaccctattgatgaagagaagggcagctagcaggcagaccttgggctgggggctgagtggctctgcagtttcatatctcaaccctcagctgtgtccctggggtcaggccttttccggctggcaaccacacagctgtcctggagamtggaaggctggggcaggcagactgagctcacaaacaactcacttcccccatgatggccccacctgtctttctcctctttccagtgccaggccagctcctctctgggcctaagcagcaaacttcctggaccctcagctccccaggggcagctcagagagcctgcagccaggacagccttcagagctggggctccctgtgacccttgtgctgccccagagtccagactgtcttctttacactcactttagtcctcctctcctctgaaggggttgggctcagtcagccccctttgccaaactgagatgcccacaagccccagaagtatcttccagatccaaggtggcctcctgcctcttctccacctccatgggaaccaggagtagcaggaaccccaggcacttcatctgttatccctactgagagaaaagagatcgcatttcctcccacaagcccagttctgtcattcaagaaatcaaatgcaactgtctccttccactgcctcctcttgaccctttttcacctggtctggcctcttttccaagatagaagatgcccctctycccaccccctagtaagcgctctcctttgagcctcttcaccctcccccgggctgtgcacctacagtcagaggcaggagcacagctgcacagctggcctcccagcccctgctgatggacagcaagtgccaaaggctggatctactcaaggattgtcccmcaccttgtcaggatcctgggactggggctctgtctcccaacccgttaacctgcatcctctgctacaggtgatccagggaatcttcaacattttcagcccagggaacaaaaatagcagccagctgtttctgctaccagagacccatgggtacccaagtggcatggggaggctggagcatggctcattgcttactgtgattctgctctttttttctttctcaggccctgcccaggctgagctgcttcagggcrtcctgaggccctgactgccagctgaaggcgtataatttttccctcygtgtgccccacctacccgtccaagaccctctgtgctccccaccatcctggaccaaccaaaagctgaacggatgccacactgtgctggggccccttgacctcagcagagccgcttcctggtgctacgcagcctccacactcagagcccgtggactgggctggcctaagggccagggctgatggtactgctggcccaacactgctctctttgtgtttggtttttttgtttttgtttttattttgtttttttccaattctttacttttgatactgtgaagatctttcgtgccgaaagataaagcaacatttggacacagagttggcatgttggtgatttgtgggtctgggcggggagggagttgagggtgtgctcagaagcatgggctctcccttagtcactaaccctagcatgcaccatgcatcagcagtttggtgctattgtcccattttacaggtgaggaaactaaagccgataggaaagtgactcagctcaacttagtctggctgattagcattgagcgcagactggtatgattatggcatctgtgcccttttctccttttgggaggtctctggtatgtgagcctggggcagccccttccccactctttcctgtttccctctttgcaagatgggtgagttggaggggttgaagatggtctctgtgcatctggatgtgagaagaggtctaggaaagaccctgaggccttcatggatctgtagcctgggccatcgaggcccctcacactgacttcacagtcaggggaagttgggggtaaattgagttttttataaattagatctgattttccagtgggggtgggacatgtagctgagggcttgagagttaagaggataatgaactcttctgtaaagtcaagcaaactacctcatcccccgaaatggatctggtttgtaaatttggattttaatacaatgagttttcccaaaatgcccctgacacacttgtgtccaaactccatgccccaaatttagttttcgctcctaaaaccaactcgaggttatgtggggagctaacagggtcactaagagccatgtatttgggtgttgtgagcaggaccagaaaccatgtcctccatccctcccaggttgagacccaccatgggactggcagtaagcaccagcttattttttttatagagatggggtcttgctatgttgtccaagctggtcttgaactcctggcttcaagcgatcctcctgccttggcctcccagagagctgggattacaggaatgagccactgtgcccagcctaagctttctttactaaagaagacttcatgaattcctgtgtatccttcacatcccagctaagaggccattgtactgtgaaaactatgacacttcgaaaagcggtaccttgtcttaggatctttctctttaagaccagttatctgtctatatttctagtctcaatctacataagctcctcgcacaccaggtatgtgtcttgattatcatctgcttgagcgcagtgccagcgcccagcacacactcttgaaggcaagaaagcacagagctgaccaagtcattccttagaagtctctaataaagttgaaaccacttactctgacagtcacagcaggcatgctctggtcgcaatctccttttctggccttaggtctggcttccccatcccacccttgccgcaatgctgttgcctggtgaatctgtgtacttgcacatcgccagacctgtattcctgcagcgccctggcccaggacgcctctcctctcccggcctgagattgccacgcttccctggaagcgccccccaggcagctctgttagagcatttacagtaataaccgtttacatttatacagggcctcccacttcaaaaccactgccatccgtatctgatgcgtgccccaccagtgaacgtatgtgtcacacaggcgcagtcagggaggcagggtgtgtcgagcggtttatcccgcaaccccggcgtccccggcagggatgaaagcgcagggcccacgcgaactcggcccgcagctcccggccctagaggacgcactgtccgccggcaggggcgtgcccaagacgccatgctctgggagaggttgggcacctggcaggccgccccgactccggatcagctgtctccgctgcgtacgtcttcctcttccaatgggcttggattgagccttctagcgcatattccaagtcctccaatgtcccacaatgccttgcagccggtttcgccctcggtcctggcaactgtcgcgtaaccacccatgaaagcgtccatgcctcgccgtgcgatagtatctccggaacaaatttgtccctctgcgcgatccggaactccgaggtcgttcctacgcgccgtcgttcgcctcttcacatcggattgggtctcacgcaaggatgaggcggggtttcgccgtggcgcgcatgcgtgcagcaaagaatggaggagtcggaacccgaacggaaggtaggagagaggcgagaccccgcgcgtgtgggagcgggcgtgaagaggggagcaggccgtgcctgactggcgtgtgcttgcagcgggctcgcaccgacgaggtgcctgccggaggaagccgctccgaggcggaagatgaggacgacgaggactacgtgccctatgtgccgttacggcagcgccggcagctactggtgaggggcacgcgtccggggagggatggggccgtgaccgcggggtcgcagggggcgggcgtggcctcggcctccgtggggaggagggcagtctgaggagtgagcttcagtacaccagggcgcggcccccagacaaacgagggaccgacggcttgatctgaggggtagggcagctttgcgcctcgggcacaggatcctcgccccaaagccaggatcctgacgctgaccttgtggactccatgcccatcctatctgtggatcccgggtggaacctcagctccagaagctgctgcagcgaagacgcaagggagctgcggaggaagagcagcaggacagcggtagtgaaccccggggagatgaggacgacatcccgctaggccctcagtccaacgtcagcctcctggatcagcaccagcaccttaaagagaaggctgaaggtgggctgggcagcactgcctgggcgagaaagaagaagctgagcctggtacaccgttttggtatctgtctgacatcttccacttcttttctcagcgcgcaaagagtctgccaaggagaagcagctgaaggaagaagagaagatcctggagagtgttgccgagggccgaggtatggttgtagccaggatagtgagaaggtggactgagtcttctcctcccagccccaggcatgttatatctcaagggatctggcttctcagaagcaggagccagccctgagccatgtctctctcttcagcattgatgtcagtgaaggagatggctaagggcattacgtatgatgaccccatcaaaaccaggtatgtctgtacagtctgcagttgcccttgcttaggatggtacatgcagggatgctcccaggccagctattcccagggctctcttgatccctgttacccatccacagctggactccaccccgttatgttctgagcatgtctgaagagcgacatgagcgcgtgcggaagaaataccacatcctggtggagggagacggtatcccaccacccatcaagagcttcaaggaaatgaagtttcctgcaggtagtcaggggctggagagagataccacacttttataatcaaatgcctgtgaggttatgtcctggctcccactgagctcagccacatctgcattggatccagtcactggggctggagggatttgaggaggagtttctttaggttccttgttgcctcagctgtacgtgttcattgttctctgctgttacaaagcttcaggaggaaagtgccattgggcatagacactgggtacaaatcctggctgcacctagcctgtgggccttggacaagtctctttttttctttttttttttccactctctctctctctctctgagcctcagtttcatcatctgcaacttgtaggggtagtgccagttttacaggctttggggctctgagaaagtacctgtgagtcatgaagacgatgtcggttggttttcatagccatcctgagaggcctgaagaagaaaggcattcaccacccaacacccattcagatccagggcatccccaccatgtgagtgtggactgtggacctggggtccttgaggagggctggaacagggaggagcaatggctaggtgtccttcatcttctgttgaaattggccctcgggtcatcctctcccaacagtctatctggccgtgacatgataggcatcgctttcacgggttcaggcaagacactggtgttcacgttgcccgtcatcatgttctgcctggaacaagagaagaggttacccttctcaaagcgcgaggggccctatggactcatcatctgcccctcggtaagataggctggcctggagggcaggccagagattggggctgccatctggtgccagcctttgtccctctgcctgcagcgggagctggcccggcagacccatggcatcctggagtactactgccgcctgctgcaggaggacagctcaccactcctgcgctgcgccctctgcattgggggcatgtccgtgaaagagcagatggagaccatccgacagtgagtgctggcgctccctgccccccacctctgccacctgcgagtctgtggaaaagctaaaggaccctttaccttagccactccacagatcttcacagagggctgctgtgagtgcgaccctcaaggagctcccagtctaatggggaggttagttgggggaggacagagggatgtggccaggtactgtgggagcacggcagatggaatggcccaccttgctggggacatctgggaggtgggagctcagagaaggcttttccgggaaggtgacatttgaattgggaagaggggcagtccaggctgaaagcacagaggcggacggcccaggaaggtcagggtcattcagtggtcagtcaaggaggttgaggcactggggtagggctggatcccagcggcacctgtgtcctttcagtgctgtgcagtcctctgcagaccaccagaggccctggaccaggccctctgttcacagatgggccagaccccatcccggaggccttcctccacggacttctgagtattagggagatggtgagcacagaaaaggtgaagccagtgggccaggaaagcgagcccagagtaaagcctctggagcttgatgacagcgcttctgggtgagaggctgacccaggagaagggggaaggcgcgccaggccgagcggtggtgaagatggctgcagtgccttgggaaagagctgtgtgctatacatagggcaggtggtgggaatgatgagaaggggacagacaaagaaataggaaggaggacagagagcagagcagatgcagggtgcctgcttgcctctagataggtgataggccagtggccccaacctgagggtctctccttggtccccagcggtgtacacatgatggtggccaccccggggcgcctcatggatttgctgcagaagaagatggtcagcctagacatctgtcgctacctggccctggacgaggctgaccgcatgatcgacatgggcttcgagggtgacatccgtaccatcttctcctacttcaaggtgccgcccccgcccggccagggcaccctgcaccgccccccactgcacgccacatcagactgcagggaccccatgcccctggccaccccaacccactgctcatactttgtgggctgtgtctcagttgctcagcttccccagaccccatgcccctcagcccagccctgtgtgcccttggtcgcagcccccctcttcctcagggccagcgacagaccctgctcttcagtgccaccatgccgaagaagattcagaactttgctaagagtgcccttgtaaagcctgtgaccatcaatgtggggcgcgctggggctgccagcctggatgtcatccaggtgggcaggtgctcctgatgggcggtctctcacctgtgggggctggatctgacaagtctccctgaagctgattggagccgggggtccaccttgtgggaaccgggggtttcattcaaagcccctgacgcttaaccagggccatttttagggcaccagcccttggcggccagaggcttctggtcacctcctggtccagatgacgggccatggcagggctgtggcgggtaagcctaatctcaagatcacctgacctgatctttgtggtggcaggaggtagaatatgtgaaggaggaggccaagatggtgtacctgctcgagtgcctgcagaagacacccccgcctgtgagtgcagccaggccaggccggggccagagtccccaggaccagggagggctttggaggggacagagtgccaggggaggtgcggtgggtgcccaggcagttagcccctgactggagttggtctttccggacaggtactcatctttgcagagaagaaggcagacgtggacgccatccacgagtacctgctgctcaagggggttgaggccgtagccatccatgggggcaaaggtcagggtggtgcaagcactggcttggaccctgctgca

SEQ ID NO: 96910 - DNA, 27361 bp, Homo sapiens
acctggctcctggccttcccctccaccccaagccctgccatcgtcctgagcgaattccatgctcacacagccaccagccccacacctgggccctcatatccaaggagctcctccaccctgcttggccattcactcccaagagtgacttggggcttgttattgtctcagacctggcctacttaatatctctgtgcctcattgataagacgagactaattttaataatggcatctgccccactgaggggtcgtgaaaggcttttgaggaattgtaggtaactggcacatagtaaatgcttcacaggtgttaaaacaagaattgatctgaggccccagaagcacgtagctcgcaggatgtcatccacagatacattttatttgacaatcagagtttttaatatgataaattgctttccaatatcagccctcctattttctggccacatcccatcctccaggtgacactttcactgtagtcactaacatgctgggatctccattcactttaccagctactttcgcctattgctctcctgctcttcacctccatacttccccactcagagtacatcatgtattgttgcagtgatgtccttgtcaaaaccctaagctctttttttcttttttcactcctctctggcaaaaatgcagtcctgatgaacgcagtatctgccccaggcagtgggcaagtgctgtaaggaaccatcaccaacaaggctacagggaagcccagggcttggggaaaatctagtttcagctgttaagagttggtaaagaaatgttctttgaagaggcaaagaataatatggattaatttgggaataatggaatgcaggattttgtgaaccatggtatagagtttgaaggaggaagcaatggggatataaaccagtaaataggtaccacagaacattatggaaatcagagacggggaaaagagaattgactcagagagggtctaacatatgctgggctgtgtattagtctgttctcatgctgctatgaagaaatacccgagactgataatttataaaggaaagaggtttaattgactcccagttccacatggctggggaggcctcaggaaacttacaatcatggcagaaggggaagcaaacctgtccttcttcgtatggcggcaggaaggagaagtgcagagcaaaggggaaaaagccccttgtaaaaccatcagatctcgtggaaactcactatcacaagaacagtatgggggtaaccaccccatgattcagtgacctcccaccgggtcactcccaggacaagatgagatttgggtggggacacagccaaaccatatcaggcagtgactgaagcaggcactggatggattttgtagatttacctggccacagtgttaaccagggtaataaatccccatttatctctggaagatggtagaaactcaagccactccatgtttacctgctgcctggaagggggagaatggccaggagtaggagtttgaactagcgctttctttcaccttgaagtcattagaaggcagaggaaagtcaagagctccacgtgaaagccagagacagaagataacctgttggacaatgcctgggctagtgggagggatgtgatcaacgggcctcaggtagaagggagaacaaccctttcatcaaaacacaaggaatggaagcaataatgaatatctgtatcagtcatcttagtctaagttgttattgtaacaaacaatccccaaatctcagtggcttaaaacaactaaggtttttccttgtttgtggtatatactcatcatagattggtagggaactgtggtcattaagctcagccaccatctggaatgttgctggttcctgtgccagagggaagagacagctctgcagggtgttgctttggaggttctgggttggatgcaacagatgtaagtttcctttgtagctcatcggccagaattaatcacgtgggcccacccaaccccaagggggccagaaagtgccatcttactctgtgcctagaaggcagagaattggaatttatttggtgaacagcactaatgacttctacattttaacccagaaaagcttcattgctctctgaggttatttccagctctgccatcctgtaataccaggactttgggaggccaaggcaggtggatcacttgaggccaggaattcaagaccagcctggccaacatagtgaaaccctgtctctactaaaaatgccaaaattagcagggcatggtggcacccacatgtaaccccagctacgcgggaggctgaggcaggagaattgcttgagccctgggaggcagaagttgcagtgagccaagatcatgccactacactccagcctgggcaacagagttagaccctgtctcaataaataaataaacaaataaataaatatggcaactccagccagaaaatttaatgactgtacagccacgtaagactgtctctcagaatgcttcttaccacattctttgcttagaaaatgcaagattggattgctcctccaattgctagcaagccaggagtatgaaattcaggagctggggcaattgggaattagtggctgcattgcagttgtgaccagaatcataaaaaagaggaactaaggagttactggaaagattttaggacaatagttttcaaactctggcataagaatgaacactatgcagccttaaaaaaaaaaagaatgcagatttagatgttagataggaaaagacttccaagtaaacaaatgaaggacacgaacagattatacagtgtgctaccattaatgtaaaaaacaaaacaaaacaaacaggtggcctgggcgcagtggctcatgcctgtattgctagcactttgggaggccaaggtgggtggatggcttgagctcaggaatttgagaccaaaatggccaagatggcaaacaactgtctacaaaaaatacaaaaattaaccgcggtggtgttccagttactcaggaggctaaggtgatcacttgagcccaagagttcaagaccagcctggacaaatagcgaaaccccacctccacaaaaaaaaaaaaaaaaaaatacaaaaattagccagaaatggtggtgtatgcctggtcccagctaccagggaggctgaggtgggaggatcacctgacaccaggaagtcaaggctgcagtgagtggtcacaacactgcattccagcctgtgagacacagagaccctgtctcaccaaaaacaaaaaaaagtggaagccgttcaaacacattagtatttgtaaggatgtataagaaacttctagtttcctgagaggggaactgggaagctggggagagatgaaggatcactttcgtgtcatttataaatcttactcattgaaaacaatcgacttcccgatgcaatgtagtatcccagagcagaaaaagggccttagtggggaaactggtgaaagcagagaaaagtctagttggtagtgttgtaccaatgttacatttcttgttttggcaaatgtacgaaatgtagttttcgtggttgtttcccagttcataattctgtcctatacatttcttctccctcctctgtgtggaactcacacagaaaaccttgaacatcttccattgtttcctgtgcctagcatgcctctcctgctcttcctgacctcggaagctgtgctcctctttcaaggccaagctctgaaagagttacttgctctggaaagctttcctagacctccccctcaagtgttctcctgggacatgctatctttattagtgctagggacacatggctttgtttgatttctaccaactaggttgcccagaaagtggactccaagatgaaaactagatgcacgttttttagggattaacacttgtggaagaggaggaatgcaaggctgggacgggggaggaggtgggctgcgtgatgtaatcctaacaaaagcctcagcagaccccacaagctcagaagccaccatgtccctcaaagttgtcccaaattggggtaagagaaatagcgacctgagatttccagcccattactcactagatgtaggctacccagggaaaagggcatgactttggctaacgcagctctcctctgaaaaggcactgcccagagggctaaccagctgaagggtgtttgtcagcaacacttctagcagctgaggcagaaaggcttcaatctggaaggagggtggggtatcacatctcctctatgtcatccctcaccctgcaactgtaatcgctatattcccagtgcaaggcctagaaaacaatgttccaattggaaagactgaaggtgctttggctctctgaaggcagaggcctggaccacaggattacatgtggtttcttcccacactaagaaccaagtgtgtttcttcctcacccggttcccaacagcagagagagaaagcttccctttgattagagactaagagcctcagaaaccgttaagatgttcaccctccatttgacagtgagaaccatctgggagacagcagatttcattcttaaaggactaacatttctcaataaccttttaggtctttcgtcttttcaagcaaatgaatacttttattaacatggtaagtttttgtttgttttaacatggtagggttctgacctcaaatatttgttaggtctgctactcaaatgaacttacagctggacaacgtatgaaccttgaagatgcctcttctagtccagtttagggtccaatgcagacagttccatactgtcatccccaagcccctcaagggcctttgccaatctttcattttatgccaagtcctctaaaacgcatcagggtattacatcaacttgtacagaatatcaagatcttatcttctattttaggttccatgtcaaataaagctgagttaggttgtccaaacaaactcaccagacaggttacataagatagtgtaccacaacaaatttaaattttgaacaaaacacatctctcctcctttggtctcacacagaaattaaagtctccaaatacagacaatactatccattctccagctcttctccagattcacgagtcccagccaggtcggcccatccacactccccgttgaagtctggtcctttcttcagtagttgctgcatggagtcgtcttccagaattaatgcagctccttcagcacctccagagctggagaactccaactgtgagtctcatgtgtcacacacagacccaaagttccagggagctatcaggtcacacaagaaatagcaaagcacctcaaaaatttagaaataaccaccaaagcccgggaacaaatgtgactgctgcaagagcttacaatctaggccctaattcctgtatgtgagagcattttcaaacaaaattacttcccaaacaaaaacacgttaacaatcgaaactcatattgaggtcatcaaccacagaccatagcagaaaacgtagtgttaagtgagacagagcatagacaggaaaaaagagaaaacaaaaggctctctggtttcggcttctccagggtgtcagccaatctccaccagttgaccagaatccattggctggaaacctaaagcacaatgggaagaaattcatcatcgagaggttaatcccaggcacaacgacccccaaaccctcacgaacgccactgtgcaggacgccacctcttctggccaccacctgactcactccagtctctagcaacgttgacttgtccaacgtcttccccgaaaatcctctatttccacccccgcttgctggacggcccgggaccttgtccgtttctgtttccttggcgactctgagatttatgacccttccactgaacacgcatcacgcccaaacccggccactctgattatcccacgccgccaccgtcaaaaaacaaaacacgaagacggggcccagatcggccctgacccgagcacgcctttattctcccgccccacccccgattccggtgcatctcgatgaaatcatcgctctcgaagagcggccaagctggggccgctcctcggcctggcgcgggtgcccgacttaccgccgaccgcgctcacgacgactcgctcttctctatccgccggacsagctcsaccagcatctctgccatcttcgcaatctccttggccttctcctcggccttctcgcacctcttggccgcccggccctcggccgcgtcgcccgggttctggaggtggttgagggcgctctcctccgaggcctccacctgcgttttgatctggatragcatattgtccatctcccacagcttgctccggttccgcaggtacgcccgcccgtgctcgcgcgtcagcgacgcgatgtcctcgcgcatctcgttgatgaccgggagcagaaactgctcgaaatcctcctcgggctccagcacctccacttcctccggttccgccagctcgacgatgtccaggggccgcatctcttcccactgcctcggaaccgcaatagcgatgtctgttggagagagaaaaccgacactcgctatgcttagcaatagagagcccgaatattcctgaaaacttttaccctttttcaacttttcttctcagagaagccacggacaagcgacttacgcgcagagtaacggcgaacaaaatggagtcccrgccgtcaaccagcgctctgcgcgttgcggcccctttcacgacacagccgggcctctttacggtcagsggggygagctgcgggcgcgcgcacgtctagaaagagaggcaccggcggcggcgtcgcggccgcacggacgcgcacgcaggcacgcgcaggtacgggaccgcacgctctcgctcgttcctgctttcccgttacctctgtgcgtcacccctgttttaccctgtgtttggagggtggcctcttctgggtgtttccctccgatagggcttcttgagcacgcgagtttacattttttaaaaaggcctcccgcacttcccaggcgcggtggctcacgcctgtaatctcagcacgttgggaggcgaggtgggtggatggcttgaggtcaggaattcgagaccagcctggccgacatggcgagaccccgtctctaccaaaaatacaaaaattagccgggcgtcgtgttgcacgcgtgtaaccccagctgcttgggaggctgagacaatcgtttgaaaacgggaggcggaggttgcagtgagcccatatcgcgccactgctctccagcctgtgcatcagagtgagactccgtcgcaaaataaataaataaaatataaatgaaaattaaaaagggccttccacactagaagaggaggatcctacgtgataatgcagctaccccaggtggacgcttaaagccccttcctttcacgcagggggacctgagtcccctcagccgttttatttactttttttttttttttttttggagacagagtctggctctatcgcccaggctggagtgcagtggcacgatctcggctcactgcaaactccacctccggggttcacaccattctcctgcctcagcctcgcgagtagctgggactacaggcgcctgccaccgcacccggctaattttttgtatttttagtagagacggggtttcaccgtgttagccaggatggtctcgatctcctgacctcgtgatccatccacctcggcctcccaaagtgctgggattacaggcgtaagccaccgtgccgggccttatttacttattattatttaaaaagtttttttttttattgaggcagggtctcggtctgtcgcccaggctggagtccagtggtgggatcatggctcactgcagccttgatcttctggcctcaagtgatccttccacttcgggcctcccaaagtgcagagattacaggcatgagccgtgcgcctggccctttctgcctttttaaagagtagttttccttcttccttggatgacagtcagaagggtctgggtgtcttttcaccaaaccggcctccccacaccccaaggtggagcctggctgctccgtcctgaggccccagcagacccatgttcagtgtgtggtgcaaggcgctgtccagagcctctgagcccttccactggatcctaggctctttggggtcttagctctgtggccttaatgccctaacgccctgggcagagcttggcgcatattggtaaatttgccttaacatccactcaacacagaatgaggagagatacgttaatttcctagcttgttgtcccattcccaaacatcaataaacttttcagaaatccagcttacataaatcccatggatttggcttccattttcaaggtaaagggacacatcacagttttgactacagcagaattaaggattcagagaaacgtaagtatatgttttgttttgacttttctcaggttcttaatattttggttgctcttgtaaaaacccaactttggggcttgtgtgaaaggaaaataaatcttgggaccccataatcactaaaccaaaggggacagtcaagctgggaactgcatcaggcaaacctgcctcccattctattcctaaaaaagatagctactaagattaaaaagctacctacctccctcacaaggaaattccttgtggacaaatgacagaactcggagccacccatctgctcactgagatagatgcatctctgactgcctcctttggaaaggccaatcagaaactcaaaagaatgcaactgtttgtctcttatctacctattaactgaaagcccctgccctgcttcaagttgtctggcctgtctggaccaaaccaatgtacatcttacatatattgattgatgtcccatgtctccctaaaatgtataaaactaagctgtaccccaaccaccttgggcacatgtcatcaggacctcctgaggccatgtcatgggtgtgtgtccttaaccttggcaaaataaactttctttttttttttcacatttctttcattttttttattattattatactttaagttttagggtacatgtgcacaatgtgctggttagttacatatgtatacatgtgccattctggtgtgctacacccattaactcgtcatttagcattaggtatatctcctaatgctatgcctcccccctccccccaccccacaacagtccccagagtgtgatgttccccttcccgtgtccatgtgttctcattttcaattcccatctatgagtgagaacatgcggtgtttagttttttgtccttgcgatagtttactgagaatgatgatttccaatttcatccatgtccctacaaaggacatgaactcatcattttttatggctgcatagtattccatggtgtatatgtgccacattttcttaatcctgtctatcattgttggacatttgggttggttccaagtctttgctattgtgaatagtgccgcaataaacatacgtgtgcatgtgtctttatagcagcatgatttatagtcctttgggtatatacccagtaatgggatggctgggtgaaatggtatttctagttctagatccctgaggaatcgccacactgactttcacaatggttgaactagtttacagtcccaccaacagtgtaaaagtgttcctatttctccacatcctctccagcacctgttgtttcctgactttttaatgattgccattctagctggtgtgagatggtatctcattgtggttttgatttgcatttctctgatggccagtgatggtgagcattttttcatgtgtcttttggctgcataaatgtcttcttttgagaagtgtctgttcatatccttctcccactttttgatggggttgtttgtttttttctcataaatgtgtttgagttcattgtagattctggatattagccctttgtcagatgagtaggttgcgaaaattttctcccattttgtaggttgcctgttcactctgatggtagtttcttttgctgtgcagaagctctttagtttaattagatcccatttgtcaattttggctttagttgccattgcttttggtgttttagacatgaagtccttgcccatgcctatgtcctgaatggtaatgcctaggttttcttctagggtttttatggttttaggtctaacgtttaagtctttaatccatcttgaattaatttttgtgtaaggtgtaaggaagggatccagtttcagctttctccatatggctagccagttttcccagcaccatttattaaatagggaatcctttccccattgcttgtttttctcaggtttgtcaaagatcagatagttgtagatgtgcggcgttatttttgagggctctgttctgttccattgatctatatctctgttttggtaccagtaccatgctgttttggttactgtagccttgtagtatagtttgaagtcaggtagcgtgatgcctccagctttgttcttttggcttaggattgacttggcaatgcgggctcttttttggttccatatgaactttaaagtagtttttttccaattctgtgaagaaagtcattggtagcttgatggggatggcattgaatgtataaattaccttgggcagtatggccattttcacgatattgattcttcctacccatgagcatggaatgttcttccatttgtttgtatcctcttttgtttcattgagcagtggtttgtagttctccttgaagaggtccttcacgtcccttgtaagttggattcctaagtattttattctctttgaagcaattgtgaatgggagttcactcatgatttggctctccgtttgtctgttatcggtgtataagaatgcttgtgatttttgtacattgattttgtatcttgagactttgctgaagttgcttatcagcttaaggagattttgggctgagacaatggggttttctggatatacaatcatgtcatctgcaaacagggacaatttgacttcctcttttcctaattgaataccctttatttccttctcctgcctaattgccctggccagaacttccaacactatgttgaataggagtggtgagagagggcatccctgtcttgtgccagttttcaaagggaatgcttccagtttttgcccattcattatgatattggctgtgggtttgtcatagatagctcttattattttgagatacgtcccatcaataccgaatttattgcgagttttagcatgaagggttgttgaactttgtcaaaggccttttctgcatctattgagataatcatgtggtttttgtctttagttctgtttatatgctggattacatttattgatttgcgtataataaactttcttaattgactgatgcatgtcttagatatttggggttcacacttgacatatcggagacagctagctcatacattttttatatgaataaaaataagtgactcaaacaaaaatgagatactactaagcacctattagaatagtcaaaatccagaacacctacaacaccaaatgctgttgaggacttgaatcaacaggaacttttattccttgctcgtgagaatgcaaaattatactgccattttggaagacagtttggtagtttcttacaaaactaagccatattcttacaataggatccagcaatcacattccttggtatttatccaaatgagttggaaacttaggctcgcacagaaatctgcaggtggacgtgtctaccagctttaactgtagttggcaaaacttggaagcaatctagatgtccttccataggtgaatggatacaaaaactgtggtacatccagacagtggaatattaatcagcattaaaaagaaatgtgtcatcaagccatgaaaagacatggaggaaactaaaatgcatattatttaagtgaagtcaatctgaaaagactccatattgtatacttccaactgtatgacattctaggaaaggtaaaactttggagatggtaaaaagatctgagtggattgggagggatgaatggggggagccacgggatttttacggcagtggtgaaactactctgtatgataccataatggtagacacatgtcgttatccattcatccaaacccatagaatgtacagcaccaagagtgagcacttaggtaaactaaggacttcaggtgattatgatgcattaatgtggatgcatcagttgcaacaaacttaccgctgtgtgggagatgttgatgggaaggggagggtatgcaggttggggaacagatgttgtatgggaggtctctatactttctgctgtgaacccaaaactgctttaaactgctatttaaacgggaggaaataaacccatcaaaaaaccaaatggctcccgaaaggtggatgagttcaaaaacagcacctcttccctggggtgaggttagattgggccccactcctccaggtgttcttgtgcagggcagaaatgccaggtgcacaacatgcatccagggactgatgagctagcgtttctttgttttctcttttatttatttctttcgaattkctttttcttttttttttgaaacagagtttcactctgtcgcccaggttggagtgcggtggtgcgatctcggcttagtgcaacctctgcctcccgggttcaagcagttcttctgcttcagcctcctgtagctgggattacaggcacccaccaccacacccagctaatttttttatttttagtagagatggggttttgccatgttggcctggctggtcttgaactcctsacctcaagcaatccacctgccttggcctcccaaattgttgggattacaggagtgagccaccatgcccagcctctttcattaatttctgttcttatctttattatctcctttctactttctttgatttattctgtgctttttaaaaattktcttaggtgaaactcaactcattaatgggttttttttttctaacatagcatttaagatcttaaattcccatcaagcatgactttacttgcatcacacagcttttgatattggcattttcattatttagttctaagtgtacttttattccaattatgatttcttgatccataaattattagaactgtgctttggccaggcgcagtggatcatgcccgtcatctcagcactttgggaggccgaggcaggcagatcacaggagtttgaggccagcttggccaacatggcgaaactctgtctctactaaaaatacaaaaattagccaggcgtggtgatgggcacctgtcatcccagctacttgggaggctgaggcaggagaatcgcttgaacccaggaggtggaggttgcaatgagccgagatcgtgccactgcgctccagcctgggcaacaagagcgaaactctgtctcaaatgaacaaaaaaccaaaaaccagaaaaaaaacccaaaactgtgttttaaaaatttcaaccacattagagctgtttatgctcttctattactgatgtctaacttaattgtattcttcttagagatggagttcggtttgatagtgattctctgaaatttgtaaaaatttcggcctgggcaattgcagcacactctgtgtgtgtgcttgagaagagtgagcattctgtaaggctgggaccaggactttatgcacatccaccaactcccgcctcccccaatgttgcaatagcttcctgtttttgcctcattcacctatagtgcaatctctatgtagattccatttctttggtgcattgcagagtttgtctggattcatttttctttctcttgagtgaattatttataaatttagagattctttagaaattgttgaagtcaaagatgcaattttgcaaaccagtttgactgtgggcagccccagggcatcattagctgtagcctgagaacaaacacaggtgcaaacaaaaccagggcgtttcagctggtaaatgctgccatgaggcagaacttgcttttccccaggctggaaattggagaacagtttgtcctggaccaagtgatgaaaggcagggcgacatgggggaagaattggaactcccagtcctatggctcagctgtaaattctgcagagtagagcagagaagggattgttttgttccctcttgggagaggacgtgatgctgagggcccagtgtgagaggctttgggcacagagcgacctttaatgattcccagaggcagcacagcccctggacacctgggcggcctccagggaaggattagagctgcctgcacatgtgtagtcctagtgagacggcaggaggcgggactctggagacagggctcagacatcagaccagtctgaggactagctaaacaggggaagaggtaaaagcacctctacagaatccatgcccactgacaacacccggacattactgccactttccatkacaacagccttatgacccagaagttaccaccctatttctagaaatttctgtataatctccccccttaattttcacataattaaaagtgggtatagsccgggcatggtggctcatacttgtaattccagcactttgggaggccgaggcgggcggatcacctgaggtcaggagtttgagaccagcctggccagcatggcgaaaacccatctctactaaaaataacaaaaattagctgggtgtggtgacacgtgcctgtaattccagctactggggaggctgaggcaggagaatagcttgaactcaggaggtggaggttgcactgagctgagattgtgccactgcattccagcctgggtgacagagtgaaagtctgcccggaaaaaaaaaagcaggtataaatatgactgtggaactgcctctgagttgctactctgggcacattggctatgggcagccctgctctgccaatgagtgatacctctgctgctgctgtactctgccgcttcaataaaagttgctaacaccaccggcttgccctgaaattcttttctgggtaaagccaagaaccctcctgggctcagccccaattttgggactcacctgtccctactaggggcacctgttcaacattgctggtcctgggagcagatgcagaggctgagctgtgccaccgcctgagatggggagaagcctggtgctatggaccgaatgtttgtgtcccctgcaagttcttatgttgagatcctaaccactaatgagatggtatttggagatgaggcctttgggtggtgattagggttagatttggtcatgagggtggggtacctatcacaggattagtgccttgtaagaaaagatgcaagaggtcttactctctactttctgccatgtgaggctacgacaagaagactgttactggccaggtccaggtccgttctgcccatgtgcagtaaatcaatcactatgacatgggttctgcaaaagaaaagatacttattctcaagggcaccaggtgaagatgtgggaaaacagctctcaaatccacttctctgaaaataaggcttagggatatttatgggttagagaagtggggtggtttaagtcttggggaaaggtgattggcagtggggaaaaataaagtaacagattcattttgcacaagtgtagtcagggttcatgacatttcataggacctatgtacagaaaatggtggtgttagcatgatctgagggtggagtatttggccctctgatgtccaaaggccacctctcaggcacttgcgcaggcccagttgaagagttggtggtctcagctggtttgaacatgacaggagctggcccaagttcctgaaaaataactgaagtaaccattaccatggtgacctataaatgctatctataaagtagccagtaaaggtcaggtgcagtggctcatgcctgtaaccccagcactttgggggaccaaggtgggaggtttgcttgagctcagaagtttgaggcttcagtgagctrtgaacataccactgcactccagcctaggcaacagagtgagatcctgtttcttaaaaagtaaaataaaaaatacagtagtcagtaaaggtttaagttttagaattcagtgatgcatacttcagctactgtggccttcagcttcatggaaaaaggaagaaaaaataacaaaaagcaagtgacccaaagcaagcagggtaagcagatctcatcaaattaaccactcagtttaaagatggccatttgcaaaccaggaagacagtcctcaccagcctccagatctggtagcatcttacccttggactttctgggctcaagaactatgagaaataaatgtttgttgtctaagccatccagtctggcgtaatttgttatatcagcctgaagagcctaatagctggtgtccgtccctagggaagtcataagcagactggcttcctctcctttgccctttgcttgctgtgggcctgaagtgtctaaactgccatgcttcctccactttctgtttgctgcttctccagagacttgaatagcttgacaaaaccaaagcctgaagttataaatggatgggaagaatgggaatgtacacatggtccaaagattttatcttgctatgggagaaagaggaaggagagtgggcaacaaagccatctttgtggtggtgaaggatgatgattattttattttgttattccagaaaggaaatagaggcttatttgtaattattatgcctaaaacaatccagaacaaaactactaaaaaaattgaaaagactagtagaactttcaaagtaatgaggagaaaaaagagaataaaataggactctggaaaattgaaaagaaaagggaaaatgaggagagaaaacaatgaagtaaaatgcactataaatagaaaagggaacaaatatttaataaaatccaatcatggctgggcacggtggctcacgcctgtaatcctagcactttgggaggccgaggcgggcagatcacgaggtcaggagatcgagaccatcctggctaacatggtgaaaccccatctctactaaaaataccaaaaattagccgggtgttgtggcaggtgcctctagtcccagctacttgggagactgaggcaggagaatggcatgaaccctggaggtggagcttgccatgagccgagatggtgccactgcactccagcctggacaacagagcgagactccgtctcaaaaaaaaaaaaaaaaaaaaaaccacgaaaaaaacaaacaaaaagaacctaaaatcaaggtatgtgctatatataagaaacacacctataatgaagtgacaaggaatgtataaaaattaaggaataaagcacaatttaaggttaaaatacgaaacaagaggagcattgtgtaatgataaatatgacttacaaagaagttatatatttcagttatctagtgctgtgttcatgacaccctaaatttttttcttgagacaggtctaagtctgttgcccaggctggagtggaatgccatgatcatggctcactgcagccttgaactcccaggctcaagtgatcctcccacctcagcatcctgagcatctgggactacaggtgtgcaccaccatgtctgcctaatttttttttttttttttaagagacaaggtcccaccatgttgcccaggctagtcttgaactcccgggctcaagtgatcctcccacattagcctcccaaagtgttgggattacacgtgtgagccaccacacctggcccaaatcttatggtacttagcaccataacaatcatttgtcacaattctgtgggttaggagttcgggcaggcctcagctggttggttcttctgcttcatgtatagtttatcacctagagtcactcactctgctgggttgagctgctacctggaatggctgaaaaacccaaaaaggtctcactcacatgtctggggtcttagctggggtgttggaatggtcagaggcattctctttcattaccttagtgagaaggattcatatgcttcctttggatgtaaggaaagctggggaatgtggaccctgtctgggaagccacttctcagctaaaactgtcatttatatcatggaggggaagaatggatgccagcagaaagctaactagccctgccacaaccaaaaacatccttgtattgtttaagccagtttgagctaagtacagtctggattatataaaaagagctgttagatacaagatgtgaatttggacttgttttatctttttccatttatatatttcacatttttgcatttttcttttaaattttttaatattttttggtgacaataacatatatataacattgtttatattctcttatatacatgtgcatttaccatgtatatcatatataagagaattgagtagaaacattttatatatatatatgtgtatacaatatagtttcatctatgaaagaaactcactgttaacaatcaactaagtctggaaataaaaccatgccacacctagaaatccaggtgtgttccttcttaactcagatctccctcgccccactggaggtaacccctcttgtgacttctagtttcctttcccttcccttcccttcacttcctttcctttcccttcccttccctttcctcccctcccttcccctcccttctcagcccctccctgctccttccctccctttgcttctcttctttcttttctttttttttttttgaaacagggtctttctctgtcacccagactggagtgcagtggcatgatctcagctcactgcagcctcaacctcccaggctcaagcgatcctcctgcctcaacctcctgagtagctgggactacagacatgtgccaccaccacctgttgtttattttttttttgtagagatggggttttgccatgttgcttaggctggtcttgaactcctgggctcaagtgatctgccaccttagcctcccaaagtgctaaaattacaggacagagtcactgtacccagccttggccagtcatttcttcactttctttgttgttttatccactaggaatgcaatcataaagaatacggtatagtctttcccacttttgaactttatgtaaatggaatcatagttattcatttgtatattgctgcttctgctcaatatagtctatctatcatctatctaacatctatctatcatctatctatctatcatctatcacctctgtctctctatctgagattcacctgtattgatgcaggtaaggatagttcactcattttgattgctctatggcagtgagtgttaaaattgagtgtgcatcagaaaaacccaggaaatttgttaaaacacatgttccagggcccatccctacagtttctgatttatttgatctgggataaggcctgagactttgtgtttctaacaactccccaggtgatgctggcactactggtgtggggaccgcactttgagacctgctgttctgtagtattctcttgtacaaataaaccagcctctatccaagcactggtaaggggcctatgaatggttttcatttacagctatcatgaacaatgccactgaacagtcttacatatttttgtgcacacgaacatgattcttttcttttttttttttttgagatggagtctcactctgtcacccaagctggagtgccatggtgcgttctctctgctcactgcaacctctgcctcccaggttcaagcagttctcttgcctcagcctcccgagtaactggggctacaggcatgcaccattacacccaactaattttttattttattatttatttatttatttgtttattttttgagacagagtcttgctctttcgcccaggctggagtgcagtggcgcgatctcggctcactgcaagttccgcctcccgggttcacaccattctcctgcctcagcctcccgagtagctgggactacaggcgcccaacaccacgcccggctaattttttgtatttttagtagagacggggtttcaccgtgttagccaggatggtctcgatytcctgaccttgtgatctgcccaccttggcctcccaaagtgctggaattacaggcatgagccacggcgcccggccttttttttttttttttttttttttttagtagagatggggtttcaccatgttggcccaggctggtcttaaactcctgacctccctcaagtgatctgcccaccttggcctcccaaagtgctaggattacaggcgtgagccaccacgcctggccaaacatcattttctagcttacatacctagaacagaattgctgggtctagagcatgagtatctttaactttagaagataacatggaactagtttcttaagtttgctccttctgtttactctcacattagaagtctgagagagtttccatgattgtccactaaaaaattgcccatatttttaatcttttaaatagaaaacacggcagatgtgaaacagtgtcttattgtggttttcatttgcacagacctgaatgctaaggaggctgaccatcttttcacgcctgtattgaccgctggggtttcagctgggggctgtctgcatacgatgcgagggagggtgaagtttctttttgttccgagtgagggggagttgtcacagcacctctgccatgcaacattcttcctcaccatgtggcaccccatctcgctcttttttttttttgagaccgagtttcgctcttgttgcccaggctagagtgcagtggcgcgatcttggctcatcgcaacctccgcctcccgggttcaagcgattctcctgcctcagccttcctgagtagctaggattacaggcatgcaccaccacacctggctaattttgtatttttagtagagacggggtttctccgtgttggtcaggctagtcccgaactcccgacctcagatgatccacccgcttcgacctcccaaagtgctgggattacaggcgtgagccaccgcgcccggccccatctctcttctatcagcttccgtgtgcgcggtccagcttctgagstctttgtttgctctggtctgaatgtttttgtccccctaaattcatataccgaaccctaatcccccagttgatggtattaggaggtggggatgttgggaggtgattaggttatggggattagtgtaactgaactcgggttcaggccactcactcgccgacattcgagagacaagttttggtaaaaggaaaggtagctttattcgagaagccagcagcttgggaggtgggggcaggggcactgaactcttgtgttcaaagatcacctctccaagttgtgtctccagatgcacgtttttaagggaaatctggggaagtgcgaatgatgatcaaagcattcttgtggaacagcagctatgtgcgcagtctcaggcaggtagttacgattgctgtcttgcggggatgtcatgtgaccttttgcaagtgcagttattttgtttttttttttttttttttttttttttggaacagggtttcattctgttgcccaggctggagtgcagtagcatgatcacggcttactgtagccttgacctccccaggttcaggtgatcctcccacctcaccctctacagtagctgggactaaaggcacgcaccatcacacctggctaattttaaaattttttttagagattgggttttaccaagttgcccaggctggtctccaactcctgggctcaaatgatctctccccctcagcctcccaaagtgctggctgcaccaggccagccagattagtcttagttttgctttttttttggacagtctcactctgttgcccaggcatggctcattgcagccttgacttcactggctcaggggatccttccacctcagcctcctgagtagctgggactacaggcgtgtgccacacctacttaaattttgttactatttatagagacggggtctccctattttgcccaggctggtctcaaacttttggacttacgtgatcctcctgcctcgacctcagcccaactattctcatctggtgggtggaaacctgcggctagccgcttccaggattgctggtcagtgcacttctctcttatctctgctgaaggtcctctttccctgaggctgtttttaatgaatagtgtgtaagcgtaagcaaagctgtaattatactcaagcaaacacaatttttctttaaggtagactcagtactgttatattagcaccctcctagaaaccgagcccagagagctgccttgccccttctgccatgtgaggacggagcaagacggcaccatctatagaccaggaaacagcccctccccagacaccgaatctgctggcaccttggactcccagcatccagaattgggagaaataaattcctgttgttgataagccactcagtgtatggtattcttttttttttttgagacggagtctcgctctgtcacccaggctggagtgcagtggcacaatctcggttcactgcaagctccgcctcccgggttcccgccattcttctgcctcagcctcccgagtagctgggactacaggccgcccgccaccacgcccggctaattttttgtatttttagtagagacggggtttcactgtggtctcgatctcctgaccttgtgatccgcccaccttggcctcccaaagtgtacgggattctatgacagcagcccaaacggacgaagatgtgcacttgtgtgtgtgtgtgtgtgtgtgtttttttttttttgagacagagtttcgctcttgtcgcccaggctggagcgcagtggcacgatctcggctcaccgcaatctccgccttctgggttcaagagattctcctgcctcagcctcccgggtagctgggattacaggtgcccaccaccatgcccggctaattttgtatgtttagtagagacggggtttctccatgttggtcaggctggtctcgaactcctgaccttaggtgatcagcccgcctcggcctcccaaagtgctgggattacagtcgtctgccactaagcctggctaatttttgtatttttttagagagggggtttcactatgttggccagcctggtctcgaactcctggcctctagtgatccacccacctcggcctcccaaagtgctgggattacaggcacgaaccactgtacctagccccagtgcacttcagaatcatcctgtcaagttccgcaataaacctgttggggattgtcagtgagcaacgtagtttattgggagtttggtggtggtggtttgtaaaaaaaaaaaaaaaaaaaaaaaaaaaacaaacaacaacaacaaaaaacaggccattcacagtggcttgagcctgtaatcccagcactttgggaggcctaggtgggaggatcgcttgagctcaggagttcaagaccagcttgggcaacatagtgagactgcgtctccacaaacattttaaaaattagttgggtgtagtgactcatgcttgtagtcccagctactcaggagggtgggatgggaggactacttgagcccaggagttaagaggttccagtgagctatgatagtgccactgcactcccacctgggtgacagagcgagaccctgtgtctaaaaaagtaaaatgaaatgaaataacaacaaagcaacaaatggatgttagattttagccaatattctgtctattgtgggtgggttttcccctgtcatctatattcttctcactcttcccagttgagggtgctgggtgctggagggaccgcagggggaagtggctctcttgctgtttctgttctggacggggatggtcagcatgggtgatggtactttcagtgcacatgatttttctacagcctggctgcgctggggataacatttccatagtcttctttatttttttctgagacagggtcttgctctattaccccggttggagttagtggcatgatcatggctcactgaagcctcgacctcctgggctcaagtgagcctcccacctcagcccccagagtagctgggaccactggtgcacaccaccacgctcgtctaaagaatagtttttgtagagatggggtctcactatattgccgaggctggtctggaacacctgggctcaagcgatccttctgcctagggctcccagcgtgttggaatttcaggcatgaaccaccacgcctggcctccgtagtcttccttttttttttgttttgagacggagtctcactcttgtcacccaggctggagtgcagaggcggaggtctcctccgcctcccaggttcaagtgattgattctcctgcctcagcctcccgagtagctgggactacaggcgcacaccaccacacccggttaactttgtatttttagtagagatggggtttcaccatgttggccagcctggtcttgaactactgaccaccagtgatccggttgctttggcctcccaaagtgctgggattaaggcatgaaccactgcccagcctccatagtcttcttgacacagaaaccaagccccatgcagcccacatgctctaaagggctcctgcctcactccttgtgcctcaacctcccactgcacatccatgcctctggtggctgctcacctgaccccacctcacaggggtggcctattgcttggtcagcaactccagcccagctcctgcctggccaaaccagagactgtctttgctgtctggtggccaaactgcacgttgtccagaggtctgactccttccaagctggtcctttctgggtactttccttcagccctagagtaccaaataatttcctacatcttacagtttactctttaaaacggtttaggccgggcacattggctcacgcctgtaatcctggcactttgggaggccggggcaggcagatcacctgaggtcaggagttccagatcagcctggccaacatggtgaatccccgtctctactaaaaatacaaaaattagctgacgcagtggtgcatctctagtagcagctactcgggaggcagaggctggagaattgcttgaacccaggaggtgcaggtcgcagtgagctgagatcttgacactgcactccagcctgggcgacagagtgagactctgtctcgggaaaaaaaaaaaaaaagttttaaaattgagatataattcacagaccataaaattcatcttccaaagtttttaattcattggtttctagtatattcacaaagttgtgcaaccatcattccacaatttcatcatcttccaaagaaagcccgtccctgttagctgtcatgcctcttctctcttcctccagtacctggcaaccaccaatgtgctttgtctctgatacacagatttgcctattctggacatttcacataaactcgtgattggcttctttcacttagcgtaatatttgtaggattcactcaggctgtggcatgcgtcagaatttccttcctttttatggccaaataatattccattgtatggacagaacacacttcatgtcttaattcatctgtggatggacatttgggttgttgctaccgtttgacttttgagtaatgctgctatgaacgcgggagcacaggtattgtgtggatggatgttttcaattctcttgggcatagacctgggaaggttatacttttattgatattaatagttctgatattggacatccctgctgtgtggtttcacctctcatggactctgacggctgctgtgccttctctgctcggcaggcggtgccctgaggcacaggtgggcgtctggggctggaactctcgctaggcgctacaacttcctctcctgccctgtggcagagccaagccccttgcagggctgttgccagcatgggatgagtctatgaaaacacgtggcacgcagtaggtccacagttaccactggcagcctggcaagcctggcagggcccggacggcagatgcgcttcggtgctgctgtgagtcttgtgttctgccttaggcagaaagtcctgggtttgtgttttgtgaatgaatgacgcatgagtgtgccaaatatcctttacgtgacagaagaggagagggctggcttgattgagtgtgggggggaagaacctggatcttgtaatgtaatttttgtttaaaaaaattagggaaaaaccccaaatatgaccatttcctgccattagcctgcagatgagcagctgactccccagtcccatccctccgcactgcttttccctgtcctgggtctgttctgttacatggagttcctgggggaagccctggggacggggcatctgcccagggctcactgctgttgaaagtgaataaagaacgtccggatttcctttgggtggacggtgatgatggggcctcctggtggcctcgagggagaggtggtgtcacctaggggaacagaggtgatctgtccagtgtggcctgggatgcctcctcccagcctccctctcaccccctgcacctgtctacagtctgctgtggctcccagcctccctctcaccctcctgcacctgtctacaatctgctgtggctcccagcctccttctcaccacactgcacctggctacagtctgctgtggctcccaccgtggcaacggcctatggcatccccttctgccaggactcctgtgggcctcttggcgtttctgcccaccccgagggcaattcataggttggtcctggccctagtggcctcaattcctcatgggtgttgccctcaaagcccaagagctttctgagaccatctggtgagtctgcccttgcctcaccaggctcccctgaaggcatgccctggggttgggcttcgatcttgggagggagccgtccacttatctatcactcatccatcttccttccttctttccaaccaacatcatcttccctccctccctccctccgtcccttccttcctcccaccaccaactgagcgtgcaccatgcacccgccaccatgctgtgtgtagtggacaacgagctgcacaggacagaagaaaccgctggggccaggagagtggaggaggcacttggcctggttggtgactctggggaggcatcctggggagcttgagcaggtgctggccagagtgaatgggacctgtgcgtcccaggcagagggcatggtgcggacagggactggagcctggaagctgcctgtagtgcaggagctcacggtggcacatgtcgtatgaggcagggaccggctgatgggctgaggtcagcagggccaaggtgggcagaagcccctgggcccctagctgtcacccagggcacaggcagggcgtgtggtctgcgtgtgcacacgtacaagtgcacacacacgcctgtgtggagccctggcaggcagagactaacccaaagcctttcttaaccgactgtggtagatttgggagggctgcgggttcagagtaggaaagcagcctcgcaaggtcgcacaggccgggacaggcagatggttggatgtgcaccgggtctgaccagctgctgagcctggctgggagtcctgggtagggagctgaagcgggggtccccaaacctctgtggcggccaggccccgtcctccagctccagcggtgcagcatgctcaaatcccaggtccctgtgagcgagcgctcctccactgccaccacggaccccagcgcctgcagcacagcctgcagggagaggagcagagggagagtgagct

SEQ ID NO: 96911 - DNA, 27776 bp, Homo sapiens
ccatttccctgattgttaattgtacctcaacaaagaactgttagcactaacaacaaaagccttcattgttcctagacataaaatatctttcagtcattgctaaatacatagcaaatagtcatttttaacataaaaatctcaaggttcctaacaatctatcaacaatctaaagttgtgatgagatctaatgagttctaataagagctcatagtccacaacttcaaaaggacagaaaagcaggtaacaaagttacctgcttaaatacgaaatctatttgcgaagtaaatgcccacgcaacaagtatttattgtagcccagtaaaagcctagtcgtgtatagtgctgtcgatgcggtaaaaatgtctgcccacacgctcctttcaagtaacttgggaaaagatcatacgcgcacaaagaactaaaatacagaatgacaggagtcgaggaaatgttggaaacgcgaagcaataagcaatccaactgggatcacttctgactgaagtaatcagggcaggctcccttgaagtggcgggatgtggtgcccaatcactaacgtcctggagggttgttcccgctccaggggctcgaaccctctgatggtagtgcaggggaagccgtcgctggcccaaacacaaccattccctcagccgaggtcccccagcccttccaatgctcgcggggcagcgctgaccgcacgtggggccgcgccaggcctggcccggcggccacctcaactcccgcctcttctcacgaccccaagaagccgctcgcccgctagcccgctcggcgctctgcctcaccgtgactcccgacccatgctgccgaccgcgggaatactggtgcccttgagtaccacgcacaggcgaaccggacaaacaaggaggctgagctgccctcaacgcccggcaaagaccagcgctaaacactagcagcacctacagctgtggcggccatcccagcgcggccaacgaaaacaggacgtgctggcgccggcagccgaaggaagagaaaagccgaccggaagctgccgctcttccacagcgccccacctcgactggaggacgcacagcgccggccccatcgaaaggtgatgccttcgccccgcccagtcttcccggcgcccgcaccacgcccggctgattagtgcgatggagcgcagcgcgtcagcctcgccggcccgtgagggtgtttcgcgccagagccaaagaggcgtcctgggcaggctgatgtctgccttaatttgcgctaaataatgcggcaactttctccgtacacgctctttattcatgtatacattcactcatttatttatgttgtcatatgccaggcttgtgctagatcctggggagctcacagtctatccgggaaacagatgactaaagccagcacagtggctcacgcctgaaatcccagcactttgggaggctgaggcgggaggatctattgagcccaggaattcaagacctgggcaacgtagccctcgtctctgcaaagaaaatagtaataataatagacttgactaaaaacacaagcagaagtaatacagcaaggagagtccaccattggagacggattcagaaaacacgtttcccttggaagtgaactctgaggtgagatttgaagacccggtaggtgttaacctagtagagaacaaagagctaaaaatactttggcaaaagattagttctcaacattgcttgcactgggaagcttaaaaataaaacaaaaaaacaaaaaaagggccagccatggtggctcatgcctataatcccagcactttgggaggccgaggcaggaggatggcttgagcccaggaattcaagacctacctgggcaacatagcgagaccctctacaaaaaataagcaaaataattagccaggtgtgctggcacgcctgtggttctagctacttgggaggctgaggtgagaggatcatttgagccagggaggctgaggcaagaagattacttgagcccaggagtttgaggctgcagtgagctatgatgactccagcctgggtagcacagagaaatctcatctctaaaatattagtaaataaaatagaagcctgggttccacccctatgttctgatttaattggcctggagtgcttcttgtgcactgggaatttttaagcttcccaggtaattctgaagtacagtcaagattgagaacattattcgagagtttgggcaccaaaaaaatgtatatgtattgtctcatgcaacacacacagaaatgttgaattttttttgttttttttttttgagacggagtttcgcttttgttgcccaggctggagtgcaatggtgagagctcagctcaccacaacctccacctcctgggttcaagcgattctcctgcctcagcctcccaagtagctgggattacaggcatgcaccaccaccccagcttattttgtatttttagtagagatggggtttctccatgttggtcaggctggtcttgaactctcgacctcaggagacctgcccgcctcggcctcccaaagtgctgggattacaggcatgagccaccgtgcccggccatgttgagttgtttttgcaaaaagctataatggagttggagaaaggctcatatttttactttacttgcctctgtactattttactttcttacacctaaagatgatggaaaagttctgtgtcttgattttagtggtcattgaatagatttgcacatttttcaaaattcactgaactgtaccctttaactgtacatgacttattgtatgtaaattttacctcaacatagttgattaaagaaaaaaagcaaaccaacgagtgacactccaagatgagtttatgctccccacgccccccgtggcttgctgcccacctgtggtagctgcgagaagcattgaagagggatagagactggaggttctggcagtccatgccaagggtaagaaggcctgagctaattaatgagtgacaggatggacaccaaggagggttaggaatccccctgtaaattgtttggatgtgggctgcaggtagggaatgtggatttcaacctaaaagacatagaaaaccaccagtggcttaaacaatgaagactgagaagtgatcagattctgggtgtattctggaagcagctctcaaagcgccaatagataaactggatgtgagctatgacggaaaggaaggaataaaagatgactgccaggttttcaacagagctattgtggactgtggtgaatttgtggagatgagaaaagcatggaagcaacagatttagtggaggaaatagagaaagtcattgagtttgtttcagtcatgtgatatttgaggtgcctactagacatccaggaaataacagctacaaatagaggcgggagagatatgggtcctcagcattttatagaatgtataatacacagtatttgaagccatggactggatgaggccatgcagaagtgaatggaaataagtccttaatttttgaaattaacacaatttgaatattgcttagaatcacaggattagggccagatgcagtggctcatgactgtcatcccagcactttaggaggctgaggcgggtggatcacatgagggcaggacttcaaggccagccttgccaacatggtgaaattatgtctctactaaagatacaaaaattagctgggtgtggtggtgcgtgctaatcccagctactcgggaggctgaggcatgagaatcacttgaaaccgggagacagaggttgcagtgagccaagatcgcgccactgcactccagcctgtgcgacagagcgagactctgtctcaaaaaataataataaaaagaatcatgggattaatgttatagatttttaaaatcacaaactcaaacttcttgattttaagtaacaaaactgagactcaggaaacatatttcatcctagatcactaaccttgttggaatctaacctggaactagagtccagagatctgacacttaggccagagctgtcttcaagatactttatttccaactcccctttaagacaacacattaacaagacaattctaactggcttaaatatttcttatatatataatatatattctaattaatattacattaatataatatatatagaatatatattttatatatatatatatatatatatatatatattttttttttttttttttttttttttttgagacagggcctggttctgttgcccaggctggagtgcagtactgtgatctcggctcactgcagcctcctcccaggttcaagcgaatcttgtgcctcaacttcccaagtagctagtagctgggactacaggcacacaccaccccaccagctaacttttgtatttttcatagagagggtttcgccatgttgcccaagctggtctcaaactcctggactcctggtctcaagcgatctgcctctcttggcctcccaaagtgctgggattacaggtgtgcaccacccccactccaccacaatatatttatagtaaattcacatcaagtctgtcctggaggaaggcttttttttttctttttttagagacggagtttcactcttgttgcccaggctggagtgcaatggcgcgatctcgactcactgcaaccttgcctcctaggttcaagcgattctcctgcctcagcctcccaaatagctgggattacaggcatgagccaccactcccagctaattttgtatttttagtagagacggggtttctccatgttggtcaggctggtcgcgaactctcgatctcaggtgatctgctgcctcggcctcccaaagtgctgggattacaggtgtgaggctggaagattttatctatttagataggtgaaagaaatgactatagtctgtgttctaatacatcactttcagtaaactaacctgttttccaaagcagcagattttgactgtgacttgacttactaacccagtattgaatatctaataacccacttgctgtttttagtgccaactgtgatgacacatgtccatttacacaactaattgaactaaaaaaactactaggttacatggtcaagatgtcacctctaaacaaccatccttgtccctctagttttaatccatataccttttttttttttttttgagacagagtctcactctgttgtccaggctggagtgcagtggcgcgatctcagttcactgcaacctctgcctcccgggttcaagtgattctcatgcctcagcctcttgagtagctgggattacagacgcgcccgccaccacacctggctaatttttttttgttttggtttggtttttttagtagagacagggtttcaccatgttggccaggctggtttcaaactcctgacttcaagtgatccacccgcctcggcctcccaaagtgctggcattacaggcatgagtcatggtgcccagccagtccatatacatttcaaaacccagaaatttccaaataaaaaacgttttaaactattccaaacactaagaaacttcaattcccaggccaggcgcagtggttctcgcttgtaatcccagcactttgggaggccaaggtgggtggatcacatgaggccaggagttcgagaccagcctggccaacatggtgaaacctgtctctactaaaaatacaaaaaattagccagatgtggtggcatgcatctgtaatcccagctactcgggaagctgaggcatgagaatcgcttgaaccagcccggggggcgggcagaggctgcagtaagctgagactgacatcactgcactccagcctgggcgacagagactctgttctgaaaaaaacaaaacaaaaattagccaggggtggtggcacatgcctgtggtcccagctacttgcaaggctgaggtgggaagattgcttgggcctgggaaagcaaggctgcagtgagccctgatcatgccactgcactccgacaggggcaacatagtgagaccttgtctcaaaaaaaagaaactttcaggtcggctgcagtggctcacacttttttttttttttgagacagagacttgctctgtcgcccaggctggagtgcagtggcacgatcttggctcactgcaagctccgcctcccaggttcatgccattctcctgcctcagcctcccgagtagctgggactacaggtgcctgccaccatgcctggctaattttttgtatttttagtagagacggggtttcaccgtgttagccaggatggtctcgatctcctgacctcatgatctgcccgcctcggcttcccaaagtgctggaattacaggcgtgagccaccacgcccggcctcacacttttaatctcagcaaattgggaggctgagacaggcagatcacttgaggtcaggagtttgagacctgcctggccaacatggtgaaaccgccatctctactaaaaatacaaaaattagccaggcatggtggcaatgcctgtaatcccagctactcactactcaggaggctgaggcgtgagcactgcttgaacctgagaggcagaggttgtacatcatgccactgcactccagcctgggcaacagagtgaaactgtcaaacaaaacacaacaaaacaggccgggcgcagtggcttacacctgtaatcccagcactttgggaggccgaggcaggtggatcacctgagctttggagttccagaccagcctgaccaacatggagaaaccccgtctctactaaaaatacaaaattagctgggcgtggtagtgcatgcctataaactcagctactcgggaggctgaggcaggagaattgcttgaaccccrgaggcagaggctacagtgagccgagattgtgccattgcactccagcctgggcaacaagaacgaaactctgtctcagaaaaaaaaaaaacaacacaaacaaacaaaaaaaactttcatttctacttgatattattcaacaaatcaagcaaatgatcagggagatgcctatcagttaaagacaaaaaatggcaccaatagatacagatatcttataactgtcttcaaaatataaatttgataatgatctacaattactaaaattttgcatgtgtcagctggctaaatgattttttttttttaagaaagaaaagtaggccaggcacaatggctcatacctgtaatcctagcattttgggaggccaaggcaggaggactgcttgagcccagtttgagaccagcctgggtaacatggtaagatcctgtctctacaaaaaatcaaaaaattagccaggcattaatggtcccagttacttgggaggctgagacaggaggattgcttgagcccaggaggtcaatcaaggctccagtgagccatgattgtgctaccactrcactccagcctggacaacagtggtaaacactgtttggaaaaaaaaaaaagcaccaaaagagtaaacatgtgcaatgtgcaattgaagaccactagtatcttctcagcgattaaggaagtgacaactttaaggatgatttacaaccctttagatactagattcattatggaatcaggaaaaatgtgtgcttataatctttcacccaaatcagaagaatagacttaaattattcttcattaccctggttcaaaatgaaatgacagaaatcaagacttaaagagtaattttttaaaaagtgtatgtgtttttaatgtcacaaggattaaccaaattagactatacaaaaatctgtaaggaaatgtaacaccaagtgacattaacactttagtcttatattcttttaagaagacaacccaacaaaatatggcagttactgagttagttaaaaggatatttataaggccaggtgcagtggctcacgcctgtaatcccagcactttgggaggccgaggtgggcagatcacctgaggtcagaagttcgagaccagcctgaccaacatggagaaaccctgtctttactaaagaatataaaaattagctgggcgtggtggtgcatgcctgtaatcccagctacttgggaggctgaggcaggagaatcccttgaaccaggaaggtggaggttgcggtgagccgagatggcgccattgcactctagcctgggcaacaagagcgaaactctgtctcaaaaaaataaaaacaatgtttataataactcatctagaccatatttggggggaaaaaggacatttatgctattgggttgcatgcctcaattcttcacatcccattttgtttttgcttgcttaaaacatacttctaaaaagtgaaactcaaatgtaaaaagttccaattctgagtttggtatacagcaataaaaattttataaataccttccaatttcacatgtatgaatcttttctttgattaaatacttgtgctggagtaaaaattaagatactaactcaacaagaaaagttacaatgtgcagagttaacattagacaattcagtttctttcattttatttttcagatgacttcatttctcaggacagaatgacacaaacacaagaagcagtctctagggctggctgagaccacatttatctgttctcctaaaagcactagctcagctcccaaaagaagaattacaaatctgagaagttagaggaaaggtacagaataggaattctgattaacaagaaaaatcaattaatgacattggtactctattcttcmtatcagtaataatacaaactcagcccttttaaatcagagaatctgccattctatatctaataaagtagctttacaacccctaaagtaaaagaattacatgaaggtgtaaaccaatttgcctcctttagagacactgcaatatagaagaggatttttttttttttgtaagcttctccttctcagttctacaggcttcatggtacttcagagccccaataatcaagcagttcatgacaaaagataaaagtgaaaaagtagacacagagatctgtgaagacttcgcccattttgctataggtatccattgatcgatttatcacttcggcaggaattcccgacaatagaagtgcagctgttagtactgttgtctttatcttcttttcactctgtgtagagaaagactcaaattaatcttcaaagtttcagcaggctacattaagctctatacaaacatgatcagtactgctgtttttaaccgaaatgatttaaaaactgttaatgatgtttcaaaacaatcagtaagataccaacatttactgagcatataatatgtaactcatcaatctgctaggcaatagcagacatcagtcttgctttttttttttttgagatggagtctcgctctgttgcccaggttggagtgcaatggcacgatctcggctcactgcaacctctgcctcccgggttcaagcgattctcctgcctcagcctcctgagtagccgggattacaggtgcttgccaccatgcccggctaatttttgtatttttagtagagacaggatttcaccatgttggtcaggctggtctcaaactcctgatctcgtgatctgcccgcctcagcctcccaaagtgtcaggattacaggtgtgagccactgcacctggcccagtcttgttattagaagtttttaaaaagtgttatcttggaagtatgacataaataacaatttatgatatatacaacagtacaatataaaaacaagaaaaatattactagacaggacataaataactgctaaatgactgacatggataatgtgtgacataggagctcacaggagatataaattactccagtgttttatgtaaataaagcacaaggaggacttcagaggaagtaaaattaaaaacaggccttcaggccaagtgcagtggctcatgcctctaatcccagcactttgggatgccgaggctgggtgatggcttgagcctaggagtttaagaccactctgggcaacatagggagactctgtctctacaacaaatacaaaaattagctgagcatgagcctgtagtcccatctactcaggaggctgaggtgggaggatctcttaagaggttgaggctgcactgaactgagactgcaccaccgcactccagcccacatgacaaagtgagacccccgtctccaaaaacaacaactaaaaacagaccttcaaagaagagcaggatttagactggcagaagtgaaagttttttgaagcgttaagtctcaggacaagttagaggcagaagaatgcttggagaacaatgagtaatttgtcacagacttataggaatgtagggccctaattgttatgcaaaggaatccacacttgattacacatccaatagggtatcactgaacaattcagtatacttctggtggaagagagaacatttacttattaattttctagtctcatttttttaagagattaaaagctgaatttttctttattatcacaaaatccaatcatacggtttaaaatatttttaaatataaaaacctatagttggccgggtgcagcggctcatgcctgtaatcccagcactttgggaggtcgaggtgggtggatcacaaggtcaggagttcgagaccagcctggccaatatggtgaaacctcgtctctactaaaaatacaaaaaaattagccaggcgtggtggcacatgcctgtaatccaagctacttgggagcctgaggcaggagaattgcttgaatctgggaggcagaggctgcagtgagccgagatcgtgccactgcactccagcctgggtgacagagcaaagctccatctgaaaaaaaaaaaaaaccctatagttacctaaaagaaatgaaagcttatgctcacaaaaagcctcatacaagaaagctcttagttttagtcataataaccccaaaactgaaaacaaccaggatgtccatctataggagactagataaatggatatagtcatacaatgtagtattactgagccaagaaaaaaaaaggaattaactactgatttatccaacaacatggataaatctcaaaaatatcatgcggaataaagaaggcttgcacaaaaaagtaaaatcaagaatgatcccacttacatggattactatgccagacacaactaatctatcgtgggaaaaagttctttggggtatagggactgggactgcctggaaaggagcatgaaagaaactcctggggtgacagtgaagttataaaccttgaaagaggtatgggtttcataggataacaaacgtattaaatggtacaattaagacaagcatttcaagcaatcaattaattacgctggtaccctactcttcatattagaactaattttttttgtttgagacgtagtcttgctctgtcgaccaggctggagtgcaatggcaggatctcggcccactgcaacctccgccttctgggttcaagcgattctcccacctcagcctccccggtagctgggattataggtacccaccatcatgcccggcaaatttttgtagagatggggtttcaccatgttggccacactggtcttgaactcctgacttcaggtgatccgcccatctcggcctcccaaagtgctgggattacaggtgtgaaccactgcacccggcctcagaactaattttaccttaaaattttacctaaaagccaggtgcggtggctcacacctgtaatcccagcactttgggaagcggaggtgggcgaatcacaaggtcaagagatagagaccagagaccagctaattctagcactttaggaggccgaggtgggcagataatcaggtcaggagatcaaggctgtcttggccaacatggtgaaaccccgtctctactgaaatacaaaaaaaattagccaggtgtggtggcacatgcctgtaatcccagctacttgggaggctgaggcaggggaatcgcttgaacctgggaggcggaggttgtggtgagctgagatctcgccactgcactccagcctggcgaaagagcaagactccatctcaaaaaaaaaaaaaaagaaagagaccatcctggtcagcatggtgaaaccccgtctctactaaaattacaaaaattagctgggcttggtggcgtgtgcctgtagtccccgctattcgggaggctgaggtggaagaatcgcttgaacctgggaggtggaggttgcagtgagccaagattgtgccactgcactcctgcctggtgacagagcgagactccgtctcaaaaaaaaaaaaaaatgccgagcatggtggctcatgcctgtaatcccagcactttggggggccgaggcaggcggatcatgaggtcaggagatcgagaccatcctggctaacacggtgaaaccccgtctctactaaaaatacaaaaaaaaattagccggccgtgatggcgggcgcctgtagtcccagctacttgggaagctgaggtaggagaatggtgtgaacccggaaggcggagcttgcagtgagccgagatggcactccagcctgggtgacagagcaagcctcgtctcaaaaaaaaaaaattacctaaagaaccttaaaacagtaaattgtaagtcagtgttatgtaagaggggtgaggtataccgatgtgtacacctacaacatactttgaaatgcatcaagaaaaatttgatggaaaaactttacagagattatcttgggtttgaaaaataaaagaaaacctgatagatacataatataataagatgttaattgtagaatctaggtcgttggtattatataaatgggtgttcacggcacaattctttcaacttttgtgtttatttatttttgagatggagtcttgctctgtcgcccaggctggagtgcagtggcgctgtcttggctcactgtaaacctctgccaccgggtcagcaattctcctgcctcagacactgagtagctgggattacaggtctgtacccaccatgccaagctaatttttgtattttcagcagacatagcgtttcaccatgttggccaggttggtcaagaactcccagcctcaggtgatctgcccaccatggccttccaaagtgctgggattacaggcgtgaggcaccacgcctggccaacttttgtgtttaaaaactgctataacaggccaggtgcagtggctcacacctgtaatcccagcactttggaaggcccaggtgggcagatcacctgaggctgggagttccagaccagactgaccaacacggtgacacctcgtctctactaaaaatacaaaaattaagtgggtgtggtcactcacacctgtagtcacagctacttggcaggctgaggcaggagaatgaacacaggaggcggaggctgcagtgagctgagatcgtgccactgcacttcagcctgggcgacagagtgatactctgtctcaaaaacaaacaagcaaaaaaaaccctgctataacaaaatgctgttttgttgggagaatatataaagtctcccttttctctcttccatttacatagtacccatatatacatctctatcacacacataagtattgttaataatttcatgtatagtctttcagtttgtttatgcatatataagcaaaatcaaataatacattattttttcttttcaaaaagaaattagtatagattctatagattctattctgaattttgtttttttttctcttaatatttcttggagagcttaccattgtcagtacattgagagcatcttcattctgaatagatacgttataatttttttttttttttttttttgagatggagttttgctttgttgcccaggctgaagtgcaatggtgcgatctcggctcaccacaacctccacctcctgggttcaagtgattcccctgcctcagcctcctgagtagctgggattacaggcatgcgccaccatgcctggctaattttgaatttgtagtagagacggggtttctccatgttggtcaggctggtctcgaaatcccgacctcagctgatccgcccgcctcggcctcccaaagtgctgggattacaggcatgagccaccgtgcctggccaattttttttttttaatgtagtcactcagtggacatttaggttccaaactttgctactgcaaaactacaatcaatgtttcaaaggtgattttctttttttttttttgagacagtctcgctctgttgcccaggctggagtgcaatggcacagtctgggctcactgcaacctccacctcccagtttcaagtgattctccctgcctcagcctcccaagtagctgggattacaggcacccgcaaccatgcctgggtaatttttatatttttagtagagatggggtttcgccatgttggccaggccagtctcgagctcctgacctcaggtgatccacccccctcagcctccgaaagtgctgggattagggcgtgagccacggcgcccagcctcaaaggtgaatttctttcttttttttttttttttgaggagtctcgctctgtcgcccaggctgctggagtacagtggcgcaatctcggctcactgcaagctccgcctcccaggttcacgccattctcctgcctcagcctcccgagtagctgggactacaggtgcctgccaccacgcccggctaacttttgtatttttagtagagatgggatttcaccctgtcagccaggatgctctcgatctcttgacctcgtgatccacctgcctcagcctccctaagtgctgggattacaggcgtgagccaccgcgccccgcctcaaaggtgaatttctaaacaaatgcttaattaaaattacaatgttatttactcttttacttcttatatttgacctatttgacccttcaaaaatacaaatgcttcaaatccattaaaatcatacacaggtctgtcagcccattaaatataacacgcagacagccaagtagcaattttttcagcaaaaagctcccacaaaattcgatcacactagttaggctatcgtctatgtcaggcaagccaagcctcataaaactgtatatatctgtagtcaagtaggccaggtaaacattgactctcaacatcattctgttctgtaatattggccaaatatttattgcaaatatcaggccctcaacactgaagataaagtgcactgctattaagtgtccaatatgaagtacaatgagataatcaaatccattttttaattaatttcctttattatagacmaaatgaattactaaatttactaattaaatttaatactttgcttaaacaagtactattcacactttttcatgaaggacctcaatccacagtatttttgtaaaacagaataacaatgttatggcaatgtcaaattgctataaaagtttctaattactctttttttttttttttttttggagacagagtctcactctgtcacccagactggagcagtgcagtggcgcaatcttggctcactgcaacctctgcctcctgggttggagcaactctcctgcctcagcctcctgagtagctggaattacaggtgtgcgtcaccatacctggctaatttttgtatttttagcagagatggggttgcaccatgttggccaggctggtcttgaactcctgacctcaggtgatccacccacctcagcctcttagagtgtggggattacaggcgtgagccactgcgcccggccaattactcattttttgaacttaatgtataacaaacacaaacacatagtttggagataagtgggcaaaccacactttgagtagcactgattcagaccgtaagcaggactaacatttttaagttccttcaattagctagtcataaatcaatccaaacacatcatcgaaatttagaaaaaaaattaatttaccttgggaaaatatttgtataatcccatgtacgcaagttgtaaagtaagaaatggagcaaatatggactgtgaagatagaagataaaattaaatatttccaacataatcattcaaatcacaataaatcaaacagcagctagaaaattccaagcaaaagctgtaagaaaatgttgttattattattttttgagacggagtcttcctctgtcacccaggctgagtgcagtggcacgatcttggttcatggcaacatccacctcccagattcaagcgatgctcgtgcctcagccttctgagtagatgggattacaggcgcccgccaccacacctggctaatttttgtatttttagtagagacagggtttcaccatgttggccagtatggtctagaactcctgacctcgtgatccacccacctcggcctcccaacatgctgggattacaggtatgagacaccgcgcctggcaattgmtttttttttttaagatggagtctcgctctgtcacccaggctggagtgcagtggctcaatctcagctcactgcaacccctgcctccccagtccaagcaattctcctgcctcagcctcccataaaatagtaattttaatggttaaaagtaatcttttttctgcagaagggtgaagaaaataaaatatttgatttcctaacataaaatatgtttctcaagtcatacaattctttcatattcttttagcgtccccaaaactgtcttctctcataaaaacttatcttttaaattatttaaagtattaaatggtgacagatgtttaacacagtaacacagatgcggtaacatctcggtcacccagagggaattaattgatatccaggaagcatacagaaaaggcccagcactcaaaatacgtggcattcttccagctatgcagaaggctgaggcaggaggactgcttgagcccagaagttctagtccagcctggacaccatagcaagatcctatctctaaaacaacaacaacaacaaaactaaatgcttggctgggtgcggcggctcatgcctgtaatcccagcactttgggaggcagagttgggtggatcatgaggtcaggagatggagaccatcctggctaacacggtgaaaccccatctctactaaaaatacaaaaaattagccgtgcgtgttggcacatgcctgtagtcccagctactcgggaggctaaggcaggagaatcgcttgaacccaggaggtggaggttgcagtgagccaagatcacatcactgcactccagcctggcgaaagaaactccacctcaaaaaaaaaaagatttacaaaaactgttttgcttaatgatataaactttaattatctggatatttatgtgcctggtacatatacttaaaatgtctactgaatggaaaaacctcagagcaagacactgaactatgagctatgcttttctgcattctttaatatactataaaacaaaatgactacatcatggtacaaccaaaatggactcattatgatatattaggaaatgctgaaatgtcttctgaaccataggaagattacctcatattcaggaccagaggaactgcattttactatttcaaattatttgaaaattgataatatacagtatatatatgtaaagcacttaaccctttggttaaggactgaaactgccagggtttaatcctagcaccgcttagtagctgtgtgaccttgggcaaatggtttaacctctctgagtcttcatttcccaatggattcacataataccaagttcataagaatgaggattagatgaattaatgtatgcaaaacaatgagaaaggtccgtagaatgaaaaatgggttttagtacagtcatccctcagtatcagcagaggactggtaccaggttcctcctgataccaaaatccatagatgctcaagtcccttatgtaaaacggcacagtaaatataacctactcacttcctcccatatactttaaatcatttctagattttttatgcctaatgcaatgtaaatagttgttatactgtttttatttgtattatttactatttgttattgttgtattgttatttttcccccaaatatatacacatacatatatttttgagacggggtctcactctgtcacccaggctggagtgcagtgccgttatcctggctcactgcaacctccacctcccgggttcaagcgattctcctgcctcagcctcccaagtaactgggattacaggcgtgcaccaccacgcccggctaaatccaaatattttcaatccacaattggttgaatccacatagggtgcagaaccaactgatatggagggccaacagtaattattaggctctgtatttaaccagaacacttcattctatgagatgaatagcaaagttaataatatatcttcaaacagccacatggatctggtagatattaatactggcaatgacttctatgatcaaaagcactcataattattaacattttgcattttccattaagttagttaataatttacagatcttttcttaccaagtatttgcaaacaaaagctctgactccaagagcaagaagagcacatcccaccaatctaaatattcgaaaagagtcaaattcttctgttgtatttccatcctcttgactgggtttttcactaatcagctgtttccttagcttcattgcttcttcgaatctggaaaggtactgctctaggccatggcgggaacccctctggaccgagtccgctgtcaggtcccctctgttccgctgccggagctcaaggttgacatcactactgcactcaggtggtttaatgaacgagtccaatttgtctcccagttgggtcccctttacctcggccacaccaccctgctggtcagttgttcctgtactgactgaatcacccagcactactcgctttgaaacggaaggaaygctgagggagttcagtttatcactgtcctgctgctttgattttgtttgactttcttcttctgagaaaagaaatgtaaaagccttatgtatttattccatactggcaaacaccttacatgtttatgttttaaaatatgctgttgcagctagaactcagcagcctctgcatcaaaataaataaataccgattctgcattaaagaaaagctggtttcggccaggtgccgtggctcacgcctgtaatcccaacactttgggaggctgaggcgggcggatcatgaggtcaagagattgagaccatcctagccaacatggtgaaaccccgtctctactaaaaatacaaaaattagctgggtgtggtggcgtgtgtctgtagtcccagctgcctatagtcccagctactctggctgaggcaggagaatcacttgaaacccggggggaggaggttgcagacactgcgccactacactccatctgcatctgcctggcgacagagygagactccatctcaaaacaaaaaaaagaaaaaagctggattcttcctctacaccctcaaaatgtatcacccaaaatgaatattctgcagaggaaataacccaaactttgtgggtaggagataagattagtagacaaactgggaaagatattcagagatggagcaagctgaaaagaccaactttttatggataatatatcccagatgtatgattgcattgcctgccttagcttatttggttaaaaatataaaatcagtaaagccttttaaaatctatattttaaaattagatttctgaatccagtgccctatgagcatagggtgtggcatatcccaaagctactgtttatgtagtcaggcagccattagtaggcacttcagcagttttaagacactactctggggttttgtttttgtttttgttttaaaaaaaaggccaggcacaatggctcacacctgtaatcctgtaagcccagcacttttggaagccaaggctggtggatcacttgagcccagaagttccagaccagcttaggaaacatagtgagacccccccatctccacacacacaatttttttttaaattagccaggcatggtggtgtacacctgtggtcctagctactccggaggctgaggtagcaggattgcttaagcccaggagtttgaggctgcagtaagctatgatcatgccactgcactccagcctggcctacagagggagaccctgtctcaaaaaataaaacaacctttaaagacataaaattttcaaagcaaaagaacaaaatatagaaagtacctcaggtaagatcataaataatgctttaagaataaatagcccgatagaaaaatgtttcttctattgttctagaagaatttgaaatggttttcttacctctcatttgaactgcctaaaagttcagagctatacacctaaagccttacagaacaaaagtcacaaagatataaggagcttgcgaccagtgactaaaggccaattactaaaggaaacactggaaacttagataacactagggcgcgctaattgctcaattatactcacgtgaaataaattttttttaaagaaaatcattggacatgtgtttgggggaggaaggaggcgctctccttagaaatgcagctccagacatcaatcacaacaatatcccctcatgaggagaggaaactctcaggtgtgcacttcgcacttgctgggtctctgaagaatgctcactctcacttttcccaccttttctagccggcccgtaggtgacagtgttgacggcactgaacacaaacactaggatatgagcacaagagtccctgatacacgtaggatgaactagcgggcagttcagtaaagacaggctgatgtgggcggacaggagttacacagcaaaaggcaaaagaaggtagacgctagagaaggcactgtaaggraaagcacttggaaccttaagaaggaaagccatcttcctaaggggagcagtagacatgacagtctggggatacaacgtgcgcccttcaagaaaggcgaggagtggctaaggaaaaaaggggctgttcaacgtaactgggaagagggagtgagagctctgcaggcagggtggggaaaatctcacggcgaggccccgggaaaattgaggggagcgactaggaacatcctggggttcagggatgagaacttgggatatcaccgaaggggcgggacagagaggaaatcaaagagcaaggcttggtcaaaaaggtcagaggagtggaggtgggagagggaagaatgaccctgaagattcaaggtgatgggcgggagactgaggggaaatcgaggctcttacccgcgccgctcccgggcctgtgaaagcccatgatccggttgatgcgctgttccgagttcatgagcagctttctccgacgcagctccgcccgacgctgggaagccgacagacctgagcccgctgggacccccggcctctccccgccgtcggtagcgacggccatcgactccatcctcccgtccacagtctgggaggggtggcagtggcggtgatgttggccgccgctgcgagggcgatgactagaggccgggccgcagggcgcgcgtccccttcccactatagacccgcccccgagcgcggtcccggagcctgtgagctaagcactcacgcaccgccccacgcgaccaagcgcgaggctctggccgccatcttgagtgagggcagcgctggacgccctcgtgcctccccaactcttctggccctcacccaacagccccctctgctgttcactcggaggtgaagaaaaccagcacccagggccgggagtggtggctcacgcctgtaatcctagcactttggaaggccgaggcgggcggatcacgaggtcacgatttcgagagtagcctggccaacatggtgaccccctcccccctccccccacccgtctctactaaaaatacaaaaacttagccgggcggggtggcgcgcgcctgtaatcccagctactcgggaggctgaggcaggagaatctcttggacccaggaggcggaggttgcagtgagccgagatcgcgccactgttctccagcctgggctacagagcgagactctgtctcgagaaaaaaaaaaagaaagaaaagaaaaccgggagtgggaaagggatggcagtaagtaggtcagcctagatttggtgccaggaagcaaaatggaggttgcagcggcagtcgcttgtttacagacccgcggcctcgcctgtaggcaatgggaatacgtaaccctgggagccgcacttaaagggagccttacgctgggatttgttcttggtgcctgttcctcatccttaacttctctacggcaaagtatacggctgatgtgttcctaggctttcctcgcgttttgtgcgtttttattcaaattagaatttcccattgaaacctttcgtgcacattctatctaaattgccaacactccccattccccttcaccttgttttttctccttgtcgttcatgaccacctcgcatgctaaagatgctccagcctgggcgacagaacgagactccgtctcaaaaaaaaaaaaggaaaagaaaagaaaaaaacaaaaaggccgggagcggtggctcacgtctgtaatcctaactttgggaggccgaggcaggcggatcacctgaggtcaggagttcgagaccagcctggccaatatggcaaaaccccgtctctactaaaaatacaaaaattagcctgacctggtggcatgcacctgtaatcccagctacttgggaggctgaggcaggagaatcgcttgaacctgggaggcagaaattgcagtgagccgagatcatgccactgcactccagcctgggcgacagagggagactccgtctcaaaaatacatatataaaagaaataaataaaataaaatcagaacaaatgactgggcgcggtggctcatgcctgtaattccagcactttgtgagggctgagatgggtggatcacttgaggccaggaattcgagaccagtctggccaacgtggcaaaaccctgactgtactaaaaatacaaaaattagtcgggcttggtggcgtgtgcctgtggtcccagctacttgggaggctaaggtgggaggatcacctgatcctggggaggttgaagctgcagtgagcaatgatcgggccactgcactccagactgggtgacacagtgagaccccatctcaaaaaagttttttcagaaaaaaataatatatttgctatattgtaatggatccagtctggattatagtcatcattaatagcaatacagtcataaaatataattttaagtatgttttcaggcaggaaggagccacaaaggcaaaagagcttagggcccttgaaagtcataatgcagccttggcattcagtaatgacttactaagtgaatgattagatgaatgaaggaattgaatccatcaacccttgctaacagggagcatggccagttcacacctgaggctgaggagggttttgaagcagcttactgggtgggccccctgcaactaagcctgccacacaatcaccctcaaaataaggaagtgggtgaaataccacttagaagataataaaatactatatttatattaatactgaaaaagaagtgaaaacaaaagaaacttcggtttggattcaacaacataaggagctcaaagaatatacagactgaactttcacccttgattggatgaaagttaaatcccagggacatccactagttaataattttaaagtattagaggaagttcttctgcatatctgcacagacatagatctctgagccctagacttccttaaaacaattttacacacaactgaaaataatggaaataactgtcaaatagtaacaaatgtgcagaatttgatgaggcacagccctgatcaatcaagacggttccagaaagggtttgaggagctaaattagaattatagtgttatattcaatgatataagcatcaagcaaattatttccaagtaatatttcattcctccttgaaactgaggaagccgtataactgaacttgaacagaattataaaaaatgtctgggctggcatgtgggaggtccaggcaggaggatcacttgtggcaaggagctcaagactgacctgggcaacatagtgagacccccttctctatttaaaaacaaagaaaagagatcgggaggccaggtgcggtggctcacacctttaatcccagcactttgggaggctgaggtgggtggatcacttgaggtcaggtgttcgaaaccaacctggccaacatgatgaaacccatctccactaaaaatacaaaaattagccaggcatggtggcacacacctgtaatcccagctactcgggagggtgaggcaggagaatcactcaaacccaggaggcagaggttgcagtgagctgagattgcaccactgcactctagcctgggcgacagagtgaaactctgtctcagaaaaacaaaaaaaaagagtccaggcgcagtggctcacacctgtaatcccaacgctttgggaggccaaggtgggaggactgcttaagcttaggagttcaagaccagcctgggtaacatagtgagacctcgtctctagaaaaaaaaaaaaatcaaaaaatttaaaaaaatttaaaacgaggcaggaagtttgctgcaatgagccatgattgcatcactccacaaccacctgggtgatagagctagaccttgtctcaaaagaaaaagagtaaaagaatgaattgatgaaactgcttaaaagaaattcaagaacaattttcagaaattagcaaattacttcctctaaattccataatgagtcaaatttttatttttataaacacagggtcttactctatggcctaggctggagtgcaggggcacaatcatagctcactgcagcctacagccttgaactcctgggctcaagcaatcctcctgcttctgcctcctgagtagctaaggctacaggattgagcccagataattttttttttttttgagatggagtcttgctctgtcgcccaggctggagtgcagtggcgcaatcttggctcactgcaagctccgcctcctgggttcaaaccattctcctgcctcagcctcccaagtagctgagactacaggcgccggccaccacacccggctaattttttttgtatttttagtagagacggggtttcaccgtgttagccaggatggtctcgatctcctgacctcgtgatccgcccgccttggcctcccaaagtgctgggattacaggcatgagccaccgtccccggccgagcccagataattttttaaaaaaaattttttgtagagatggggtctctatgttgctggtcttaaattcctgggctcaaacaatccaatcttctcagcctcccaaagtgctgggattacaggtgtgagcccctggacccagccagaaattttatttcaataattttctcaagtatagttgttaaacacccttaaacactcaaagtttaaaagaaacagagtgaattaacagtttcaataggagacatgtcaatagtcctctccttaatgagaatggagcttagtataacaaactgaaagccaagtaatgaacctcatgaaataaatgtaattttagatggtactgaatattttgttttacagtatttatttatttatttactctgtcgccaaggctagagtgcagtggtgccatctctcggctcagtgcaacctccacctcctgggttcaagctattctcctgcctcagcctcctgagtagctgggattacaggcgcgcaccaccatgcccagctaatttttgtaattttagtagaaatggggtttccgcatgttggccaggctggtctccaactcctgacctcaggtgatccacctgcctcggcctcccaaagtgctgagattacaggcgtgagccaccgcgccgggcctatattaacttttagtatgttataaacactgcaaaacaggccgggcatggtggcacacgcctgtagtcccagctacttgggagactgaggcacgagaatcgcttgaactcaggaggtggaggtggcagtgagccaagatcatgccattgcactccagccagggtgacagagggagactacgtcgcaaaaaaaaaaaaaaaagttaatataaatgtgtggatgttgccgtggtttgggacaaaatcatttggctccttggataatgttactctccgatgttaccccagggtgacactgatgaggatttctgctactctaggagagtggcaatttaaggtttctggcctcccttgctcaggcagtccccatgcttttttttattctttgagacagagtctccctctgttgcccaggctggagtgcagtggctccaacggggctcactgcagccttgacttcccaggctcaactgatcctctcacctagcctcccaagtagctgagaccacaggtacatgccaccacagctggctattttttatttatttatttatttagagacaaagtctcttgctctatcacccaggctggagggcagtggtgcgatctcggctcactgcaacctccacctcccgggttcaagtgattttcctgcctcagcctcccaagtagctgggactacaggcatgtgccagcatgcttggctaattttttgcgtttctaatagagatggggtttcattgtgttagccaggattgtctcaatctcctgaccttgtgatccacccgcctcggcctcccaaagtgctgggattacaggtgtgagccactgcacctggcctattttttatttttaaagacagggtcttgccatgttgcccaggctgttcttgaacttctgagctcaagcaatcctcctgcctcagactcccaaagtgctgggattacaggcatgagctaccacgcttggcctctccaggcttgtgaagccctcctgtacctgctgttttcagcactcctataaagtgaattattttcatgcctcatctcttttgccaaatcattgcacatgagtattatcctgactcaaaacccctaatacttgaaggaagaattcagggagaaagcttccaacacagaccaattggtttgtgctgaccttgccataaccctggctgaattgctaagaatcttatccttttaaatgatactgcagttggatgtcaccacggagaagcacgatttgaggaagtgataattatgacacactgattaatcctgccaaccaatataaagaaatagtccccgttcatgaggacaaacccatgctccaaatcataacatgctgatgataaattagcattctcataatatgtggtaggaactaaaaaaagtctcttgatttataatagtaatcacttaaaacttaacataggtaaaatattcacaaaaaggaaaaaacaaaaacaaaacaaaaaactggctgggcatggtggctcacacctgtaatcccagcactttgataggccgaggctggaggatcacttgagcccagacactcgagaccagcctgggcaacatggtgaaaccccatctctacgaaaactacaaaaaataaaaataaataaaaatagcctgtaatcccagtcacttgggaggctgaggtgggagaatcctttgagcccagcaggtcaaggctgcagcgagttatgatcctgtcaatgcacttactgtgtgacagtgagaccttgtctaaaaaaaaagaaaaaaaaaatgaacatgtagatgctcaatgaataactgtgaaaacttggaattaattcatatttccaatattgagagaaaaataataaatattgattaaatagctaataatatgctattatgcaaacactagcaatgctaaagtagtatgtataatgtataatgcaaaattgaatcttaactatgatttatgagagaatacaaaattcaaatgcattgaacaaagagtggaagggaatagggaacataaaaagacaccttttatgattgtggatggactttctagtttcactaagttatgtctgagcttgttcattcattcatcaattatttgaatgcctaatatatatcagctactaagctagttaagagtgtaagagtgttaaattttcaggtggaaataaattcccaggaaacaatcctctaccatctcagtgtctcacc

SEQ ID NO: 96912 - DNA, 27786 bp, Homo sapiens
agagatagaaaggatggggcagggaggataggctagcgacaggcctatgctagccagactcctgaggagagcttcaccacctctgccaatctgaatcacagcccccaggacccctcaggatcaagagacagaggtctaatctataccagtgagaaaatcatgggcatcaggagttatgggggtccctcctgagacgaagaaccaggaagactggaatttaaatctttgaagttatttccaaatgaggctatccattttaaatatgtattataaagacttaaggcctggcacagtggctcatgcctgtaatcccagcattttgggaggccaaggtggttggattgcttgagcccaggagtttgagaccagcctggacaacatagtgagaccccgtctctttttaaaagataataacaataaataaataagtaaataaataaataaaacttaatagtttaacactgaggcctaaaacagtgcctgacacataggaggctctcaaaaatatctgatgaataaataaacaaagcagaagtaacaaatgccataattcttgaaacactattttcacatttcttccttttttattttattgggaacgtagaaatatgaaagtgctccaagctcgttctagctgctattaaaaaaaaaaaaaaagaaggatgggaggaagaaatatggaagtagcatgggcctctcctgccttctgagtagccctggatgtcagttctagtggtcaagaagagaaggaggggcctcaggccagagaccagacagtcctggccaggtcactgctaaatttgagtgtctgtggatgtgtgcgctggggcagggctaaagctgggccatgagtccaggccccagctgacagatgagtgacagagtatgtctggagagccccagtaactgaatttctgggctgcatgtatgtccgtctccttcttgtcaaccctgcacttttgctcaagccttacctgcaccttatagcagcgtctctctctctcgggctgagaaggaaaggtttttacacccctgcttttgtccaggcacagtgatggtcaggccacggccaagacattctaggtccagggcgtagaatgagcacatggtacagttgctctgcaatccctctgctgctctgcctggaggagctgatttgtaaatggaggcaccttctcctcacagacaccaagaggcaagactaagggaaggctccagctgtcaggagaaactggaaacctgaagacacctgggttgggcctctatttatggactacaggtagacttgggacatctgatgctgggggagactaagggatggccggcaggctgcccgaatcctctggcctgaatgagaagtgggaggggtgaaaggatgggggtctccttgaggcagaggtgaggctgtgatgcttttgcaagctgccttcctgaggccccagttgcacaaggctccatcacatgggcctcgctgccaccacaaacagcctgttctgtcacttccctgctggggctgcgctgagccacctctggctctcccacctgtcagctgccttccccctcccaccccccccacccccaccgtgtgagatgccactcctcccaacacctttctacacccaggcctcagggccagggcctctctgggcccagctaggtaaacctgtccccgccctgctgcctggcaacccctttgttgggtcccagagcagactggttttctctgtgaaaacagagaaagagcaggtctgacaggggtgctgatggggactgcaggtccagctgagacacatctgtccctggggcaaggcacatggcacaaaggcaccaacacagggtctaaaaccccagacctaccacttgaaactgtgtgagcgtgtggtggtcacacacctcccccaggctcagtttcctgaagagagttggttctgctcttgtgtccgccctggaatctggctcagggccagtaactgggtcccagttggcagagccagctttgtccctgtttggatcctcagagactgaccccctctggagcctccagcatctcagcccctagagaggtgtggcagcttggagaatccccaccacactccaaggttagttgaccaggtctgggctggacatagagcaggcactcaataagtgtttgttgagggattgaatggcacaaaactagagctgggaaacgccctttgccacaggcacgccctcccctgtgtgttctgctgaaccaaccacggctccaggaccagttttgttgcctcctgactgagtcctgtccttccaggatatgctgggcatcagcccccagcccacctcacaggctgtactgtctcagaccttccttttggatgttgcctggtgcccatgcctgtggctgcctctaccccttgcagagcccttgacccctgcctacagtgggcctgccttaactccctgtcactctaaggcgcagttctagccctgcaggagacccacgctgccccctctatccagctgtgcccaccacagactgcttcctctccaccattcgagttcctggccttgaccagcaggcttctaagagagcagacatctgggtggagctggaccagacaggtcacactgaaatgaaggcatctaaagttctctctggctgtttgctgaggccctggagtggtcagtactgtggactgggcattccaggaagatggaactcccaagcaaggctttagatccccttggaatccaggctcttggctggggagagggggctgggccttgaaggagagatgtcttggcctccaggagctgagccagaatggagcagactctacctagagacctgaggccaccaggccagggaggagcgggtcagcagctgagctctctggctagcccccagggcctcacgggaaggtatcctcaaatatgggctgcctcatcagctccaccgcacctccccactcagggctacatcaattctgggcactctcctggattgtcctccaggttgacctcacccttagcctgaggttgttcttgtcccaatccttccctcttattctaggctcaggcccaacagcattcccaagggtgtctgctcctgctggagcctgccagccctgcctgcccattgaggaaagagcacagtgacttctcctgaccttggacagacctggctgcatacagaaggcctgggcatcgtgccctgagccactgggtgtggcctcgaaggcaacagaagcagaattcttcaccttcctaagcccccttatgccctccctgcgtccctctgggtcatgtccaaagggtaagctaagataataattcctgtaactgtggtgttgttaatagcaaatgttttttaatgccttgtgtgtgccaagttctctgcggggtgctggagagacacaaataaataagacagacacagcctctgcccttatggatgatacctggacccatccctgagtactcaatacgtacttatgcagagaagaagaatgcatgaaataagcagtctgattattcccagcagcacagacacctgatgggtgtgcagtaaatacgtgaaggccactagggcaggggtgatgtgtgacctggccaccacacatccccaccctgaagagggcttccagaccctgtgactgccttatgacttggtattccagcatgatagggtctcagcaatacagcaatctccaaggaccaaggccattacaggggaaaaggaaatctgagggcttccttaaagaactttcgggagagctggagaagccatagaatctgcagcttgtctgacctgctgcctagaactcagggtaccttatgagtgggtttacagcatggcccctaagaagggccacccccaaactccaggtacagaacctgacctggcatctcccctgtgggaaggcacagtcagaagtaagcctctgatgttctcttaagtcagggatgtcaacatgagctcatgtgagggaatgactggcctggacccggatcctgcatcattccaatctgtccagatgctgcccaatgaaatggggaagtttatggaccagattctaaaaaattcatccagagtccccaccccacctccacctccaaacttgtgatagaagcctttggagatggattacactgcccagagactcaggggccaggaaggtcatattcaggaggaccacttcacattcccccggacagaagtaaacgggtaatgaaggaatttcaggatggaggcaaggagtgtaggcagtctttgggatgtgaaatcgggggaaacaagcaatgtatgaagaggagtttcaggaattcactttgggatacattgggtggaagcttccacagacccttgaggatcccttccccccagaaaaggtctgcactgtttacattcactaggactcttggagcccagctgacaggcctctgaccacaagccatgctgtacaccaaaccctcaggacagccagtgataagtgatggctgccccttactctctaccccatttagtagggtctaagtcctggggagcttctggcctacagacctcagagagacaatgcagtgaccagctctcctgctggcccttccacctttcttcacttgggatccaagtctgcaaggggctgagcagaaacctcctccaccacaaagtgatggagaacagcccaatggctggtgctctaatggattcagacaccgcacccccccccacacacacaccccaaatacactcccatataaacaccgctaccacacaccacttgtttctctcccagctgaacagatagcagcatcttgcctcctacagaggcacccacattctactctgaagggcccctcccttccttggactgccctaggtttgtgcttctcaagcagttctcctctttgcgggttgtcagagacccagtggacacatttcatcccaccacctgtgaggagcccaagagcagggtccttatcacagcttgactaaaaggacacataaggttaaggatttgggctaaatgagagacctccacagagtctggaaaagtaaaaggtgtctccctgatgtagccagatagaagtgccgagagaaccagagggaggttggtggtgccatggcatctgcattggctgttcaagtacatccccggaggataatggttgggaatggagagaagaccttggagagaaaagggcccaaagtgaagcgctgcatatatttcttccctttacactgcacagccacgaccccagccgctccagctgctactttctcaggagacctggggaaacaaatctcctggcaaaggacgaggggagggggctgtgcagacagggaggtggcctgcgaggagcctgcaagcagcaagagaaggcctgaatgttctggggaagcagggacaccttgcttccagatacaagtcagggaccacctcttccaggaagccttactggcctccacaaactagtctgaggacctttctgtgtccactcccacgctcggcgctgcctgctgtcgttttgggtctgcgtccccggcccagtgctgcgcaagcccctggttcatagggttcttggttcagagggctcctcacacggcaggatgggccgcaggtgtgccagtcgggcccatgaggaggtatctgagctggggcagccccatcccccaagtgggccctccatccctcctcgggctggagcaccgcccctaaaagcgacttcaaagggccggtgtcgacagctgggtttgggtccgcggcctgcagatccaaggcccgagcaggatccaggccgtcggggccgtccgaacgcggggatctctgagagctgagtgggggtgccgggttgccggcagccggggctgagggcgggtcctcagagccccccgaagtgggagggtcgggctggccgcggggccaatccaggcgcacagggagcgggggcgggggctgggccgagtggggacaggggcgggcgggccgggggcggggcgcggcgtccaggcggcggcggcggckgcggcggcggcggctcctcctcagagtccggctcaggctccggctgcggctccagcccgcgatgccccattccgtgaccctgcgcgggccttcgccctggggcttccgcctggtgggcggccgggacttcagcgcgcccctcaccatctcacgggtgagtctggcggctgcgtggcggcagggcggtcccatgtctgagaccgggttctcgcggtccgcccgggacccagatcccctgtgtatccgaggcttgaaggcggagggttggcctgggcgccccgcatgctgtagaggcggcttccaggcagaggcaggcagccccagccgccctcctcccacgctgggcctgtctgcccgatcccgcgaagaatctcccaagagttcacgcacccgcctccccgctggcctcatctgggggagccactgtggacccgggaaggacccgcggagatgggccaggggtctagacagctctacagaggcccagaaactcttcagactcaccccctgcctgaagatctggggcaaaatgatttagagccccccttcccctatcaggggtccctgccggcagagcttggtgacccagggaggtctggggtcctcgctgaatctgagaagacagaggtccatccacttcccactttgggcgtgagtcagtctctcattcacgacctcagtcaccctaaggggaagtgaccaggaggaattttggcttccaggggaaagggagacttaactgtgaggttgtgagacccctccccacaagatgacacaaagccgggggccaggacagcctcaggccygttcctcaagtttcccagggccctgccttgcccacagagaaggaaaaggagccggcacagccctggagcgtggctagtctgaggatagaggagtggaggaggtgactcaggccctgttckagggggtgcctgtctaggggagacaggatcctggcccagcctcgacatcctcgtgtctggagggccaaaagagaggactcagaccctgcccttgggggtccccagcctaagggacagaagaggagagaacccaggccctgcccttggcggctctcagtctggaaggagcagaggagataacctgaaaccatctgacggccatcccttgctcccacacaggctgatcttgtctttgggggcctgtgtcagaggcacagagaagcaccttcccccaccctactgccacctcttgccatgggggctgggccaagccggctgggctttaagagacttctgtccagttcttgggagggggtgggcaccaggtggagcgtggaatcatggaatcccgtttctgggggccagggtgacaggcaggcccagctgtcctaggaggcttcccacatctgccctcactgccaggtccctggggccgagtgaggtgggccttcaacacatcccagagcctttcatctcctctttcctataggattcctgctgtgtgtgtgtgtgtgtgtgtgtgtgtgtgtacgcaagcctgtgtctgcttgtgtgtgtcatgctgtgtgtccgctgagggggctggtggggacactaagcgggctggccaggcaccctgggcgtgaggccgctgacaggctcagtggcggcggctgacggctgcaggcggcagggagctgagacatctgttgcccacgcggctgcctgccctccgaggaaaggcctccacacgtcacagctgcggctgcggcagcagcagcagcaacagccttgtttggagctgactggggatgcaggccccaggcaggcagtctgggagaaggtttgccaggaagagcctcctttgtcccccaaagtcacgcggcagcagctcaggcccaaggagccaggatggctgaggttgggtttgggtgggatctggggagatttacagcgctggggaggcacaggccacagcttgcctagcaggtacctctggggcaggtctacagggactgaagatatgtgggagtgtcttcaccagtggggctcaagatccagcccctcccttgcttccaggacctcccctacgcgggacctggtagggagggacagcctcacacagacagggaggaggctatcrgcccggcagggctgggggcttgcaatctcagcccatgaagcctccaggagtcccaagaacatcatccggggctccttccccacaagctataatgatggctggccttggccaagcatccagggtgtgccaggccctaccctaatgggtgttggtaacagctccctccagtccctgtagtgagcaccaccttatgcccagcctcctgtgggggctttacatgccctgtttttctcaaatagtccttacaacagcctttagaagtaaggactccctctggccttacatagatggagacccaggcacagagaggctaatgtaatcaaccyagagaagcagagtggagacaggaggaatccaggcagtctgcagtttgctgtgactgtgtaggacaatgtggcacctggttctgacttggactcccagcccaccacatctaggctgggtggagcaggggctgggaatgcagccactaccggtaaggggctgattcatgccctcaccgcccacctgacttcactgttcctgtctctgttccttctttctgtttatcctgtgcttaggagctagacggatcggcctgaattccactctgtcctgtgacttcccgcttagagccctccatggttcccagccacccaggagaaatgccagcttcccacccgggtgtacaagactctgcaatatctgatccctgcctcttctctgacttcatctctcccactctcccctcactcatgatgctccggccatacaaccttccttcttctttctctccagatatgccattatacatgctggtccttctgcctggaacactatctctccctcagatactctcttttcccttaccccctttggaagaaaaatgcaggtgttaagagcatakttttaaatttggaatcaggtggcctggattgaaatcttgattcagtcttttatcaattaactatccttctgtacytctctggacctccgtttcctgatctaggaaatgggcttgccttcaggattaatgagataatgcatgtaaaggtgactgggagagtcacaatttcttggcctcacgccctctctgaccagaactcccctagctcaatagagctggcagcatcccagccaccactgctttcaagaaacttcctccgcccacagaagcctgaatgtaccccttgtgctggctgagtcatcctgccgcagttagccgccccctgaagaaagactcctctccagtgtggggactggggcatggcatccctcccccaagcttctttctcttcatctgtaaaatagggatgagaacagcctctgcctcaccaggtggttgaggggttgctgtgagctagttatgggtaaagcatagagcccaggccctggcacarggcaggtatccatgaaggggaggaggcagaggatggccttgaggggagggtgggatggtgccaagtgggtgtctcccccaggatgacaggcttgcacaggtgcccaggccctacaagtgaacattaatgatgggctagttggctgagggtgtcatgcttcagaagaacgtttccttgaggcagcctacttcagggcaggtcagcttgggcagtgccaacaccaggcctccagccaaggagctgccagcacctcagctttgtccactcactactgagacctggctgaactgagcctagctgggcttccaggagttcccaccagtaggagctcccacccaaaagaatggggtcactggcagcttttgaaccagctgggcactggctggagaggctgggtaagaaatatatttctaaaggctatgttggggtcaaggcagggtgaggggtgctccatggcctggattcccctgagttgcttacttagatatctctgtgagtctaactccaccccccattctagccttcttcagttgaccagcattgtaagagcttccrggtgtgaacactgcttgaccccgaggggtcaatagtggcactgaggtagcctgagttcctgtcctgcaggggaagtagaggtagaattctgacccccaaacgcaggctgtcagctggaactggatggccctggacttgctcagggaggtgatgttcagaccttcccattttaattataatgaagtattaacatgaacagtgtagggggaaaaggtggtcatgggagcacactgggtagtgagatcccagagaggctcccagaggaagtggcctctatgctgagatctgaaggatgaggatgtgggagtcaaaggaatgttccaggtggagggagcagcttttgcagaagtgtagaggtgagtgatatatggtgcctgtgagcaccccatagacattcacatggtctggacagagtgtgggtgtggaggtggggatgagagttgaaatcaagcaagtaggaaggcaaggtcactaagggtttgaatattaggtcaaggtgtgtagtctgtctggttggggccttgtctgtgtagggtatctgtgatatgtccatgctgtgtatgtatctgtgagcacctatgtctccatgtgtctctgtgtcccctgcatgtccttgggcacatacgcaggctgcaagaacaacatccatttgtcccagccctgaggaagcccttctygtatatcctcatgccctgccaggcctccaggtgctggagttggaggtgtttccagcaaggctgcagccaggctacatggggacctcaaccagccactcggcttgcccatccacaggccatgctggtagcaggccacactggctaggttctgaggttggaggaggcctagggcacagcttgcagcaagaccatatcatgactgtgcccagccatctggcttgtctgctcgcaggtccatgctggcagcaaggctgcattggctgccctgtgcccaggagacctgatccaggccatcaatggtgagagcacagagctcatgacacacctggaggcacagaaccgcatcaagggctgccacgatcacctcacactgtctgtgagcaggtatgcacaggtgggctgggctgggaggatggaaggacgaggtgggcagttatgggcagctggcattttgggtgagcccagcttcacacagcctctctgcctcagctcctgggtgccccatccaggaacagtcccaaggagtagcactttcatgggggcctggcagatactgtttagagttatagcttaagaagggaagaaatccccttttaacttagactagaagtgtgttggggcacttatggcaagtgttgcaggcaactgaaataagaccttgaatagcctctggggcatttgtttcattcctttcccctcccctgagtgaccagcttgatgaccatttcaaagtagtttcttgtgcaacacctcatttaaccctcatttaccaacttaaaaaagggctactatagtccccacttcacagatgagacaagtgaggctcagaaaggttagatggtgcttaaagtcacacagagagggagtggggtagcaaaatttgattttggggctctctcctaagactacagacccttaacttggctgctgactactcctaccagcccctcagctgccctgccacagctgtcgccaccgtggcccacacctctgccctggttaaatctggatttgggaaaagttcccactaaggactgtgtaatgctttgcagccaatcaagaaggggaggacagggggttaccaagcccatctgtgctccataaatgatcctgggatagaaggtccactgggggtgggggtggggggacccagccttgctcaggtcctgggtctttactcagctctgagaagcagttggcytaagcctggctgagtgggatctccccactcccctgcccaccttgatccacagaagtcgggcataacttatcagctctgccgtgttcactgctgaggggayttccatgaccccctgtggaagtacgtgggcaaagcctccccaaaccacaacacagctaaccatgcctctgagctggcagggtgggaggtaagccactggcttggagcctttaaacatggtggagaggcctgtgaggtcagccctgtttgtgcttggccctggcacacggtgaggatgctccatctttggagttcagcaaagctggtcctcatccagcctctggagccttaggtgcccagatgacctctatgagcccggggtttcctttcccattaayggatcacattcatcaccctcctccagactgagatacaggctggatgggggaaatgtcagcattgctctgcccatgagtgacctctgaagcttccccacttggctgggatcctggcccctgactcacctccagccttgactctgtgtggctgaacaagggcagccctagtggtagtggagtagtggggaggagtgcctcagagggggcctgagtcaggagcttctcagagtgtatgatgtcagcggagggtggtggggtggaggtccccctccttctttccttccttccttccttccttccccagtcctttgttccaaaccaggcatggatggagccagaggtccactgacctgttccactctgagcatttcagccccaaaatgtcactggccatggagcagatgagagcacattctctactattacagagctgggttgagaattatgctcataattttacccataaaagagagagagggagagataactatgctgtgctccagaaagtgatttaatctcttgagcccataacttcctcaaccaaaaatatggaccatcttgcgctctggacattgagtgatgatgtaccaggcctgctcagtcagagtgaaaacctgagtcctgccctgcagccccctcacacatgcagactctgggggatcaagacatgagggccaccttgactttctgagccaacatttcttctcctggacacttgcccacctgcaagctttctgactctgctccctatcttgcctgctatgccaggacctatgcctggcccccaacgacactcctccccgcccccaccacacacacccacacagcaagggctctgcagtaaatcagcctgttgagctggctggagtgagctaccctgtgctctcactcccagggttctaccccagaccagcttccctatctgccctcttgtgtacagagagctctaatccccccaccaactcccccacagaatgaaaagtgtatcaaaggcccagcttccccactgggcttcttttgctttgagcccaaagccaggcatccaacaatccaagcaaaatcacacttcctgggcatgttctataggtccaggacctttctgacatcaactccaacactgaggccactgatagagtccctgttgtccatcacatgtggcccaaggtacctttgcacagcctaccctttgcctgtcattttgtttaaagagcccagcctgggatgggggttgacacatgattaagcccttcattctgatctgatgcattgggccacattaatggctctgggtactttgtgcccttcgaccttagacgtcaggcttgtactgctcttctgggcagaacttcagggaagttgaaggccaaatagccacacaagatgtcccagctttatcccagaggagttctgagtagatagaggccacagttagagctgtgagttagggtacccacttgggagcctggttgagggggctagagacagggactatggggctggtgttgccctggggcagcagagctctaataccaaaggcctggagtagagaggtagcctccaagggactaaggaatgggcagaggcgaggaagtgcagagtgagtatggaccataggcatagatagattattaaaaccctcaactgaagggggcagaagaggcaggggcaagctgctaggtcagtaatgagaccttgagaagcctcaggaggcttcgtggggtgagttggagggcattattcccctttggtctaaccagcctcacctcatacccacctgccagtccagggtccatgccccttcctggcctgccttctcacagggctactgagtgacagggctgggccttaggcacgtagcctctcggcctgcctgccctgcttatggcaggtttatgatgtttttctccctcctgagtggtgtttggcttttggtttctatggcgaagcaggaatttcctaatggcctgtttcccatctgggctgggcagactcagtgatgactctgccggcagcagcagcaggaggaaagacacacccctcagagcctccattccacctaccccagagccgacrgacgcctgaccccacaccccaccagaggctgtagatgcccagaggatgcgtggataggcttctagctggtcaatgtgtgaggcctggcttgcagtgctataagctgggcctctttgagctgagcttctgtaggccacgaagagggtggaagattagggaagacacagggcttctcctgcagcctctccaggaaccagactagagagggattgggcagccgatggggacagaagcatatagccctaccccaggaggatggcagctagagttgtggctcattgccacaacagtcaccattgtggtacaggggaaagcactggagtggtgttcttctacctgcagggcacagcccagagcccagcccctcttgatcctggctcccaggcatggtgggcgtggtaggagacatatctgaccatcacaatttctgccacaggcctgagggyaggagctggcccagtgcccctgatgacagcaaggctcaggcacacaggatccacatcgatcctgagatccaggtatgtacagacactgcctggcctggcctggctcagagtgagcccagggcagaggggccagcatgcaggttcacctgcactgaatgtcctcactggggctctcagatacccaagacagagactgaagcagaagttttctctggaccacatccataccccatcccatgttcctcagatgatgagcacctggtgtgggctctgtctctactccgggcaatcctggattctggaccaaggtgcctatgatgtccaggatctgggctaggccttggtttgcggctatcacacagccagctggagttcactctggtgctcagtgatgccagaccagaaagaagtcactgtgcttgcagcgggggagattggtggcagtctcaggctgtggagtgacctcaggctatgggacactcctctgagtgccctatccaagcctgaagttctctcctggccatcctgtggtgcttctagcagaacttaggctgcaggcctgtctgcccagtcacctttctgtgtgtgatagaagtcatatctctggtcctgtcctcaagaagagtgagggggtcaggctrttctagggccttgttttgccatggcataaggagtagccaagtggggatgactgaggtatccagagccatctctgggccacagagtttgggcaaggagactgggatggtctgtgatggagccagaaccatgggacccagcatgtgggaccattgcctcctgggcctgcctttgtccaccctctcaacatgaaagaaaaggggccaaggcagggagaggcttcactgaaccagagggaaggatgtgccccagcttctccctcactatctaccccaatcccatcttgctctattccctaccctgcctggctggcatccctggagccagatgcttaccaccttccaggcagtgcccattctggcaggggaaaggcacttagaagttctgggctaggggaagccaggggccaaaggagcccagagtagtcacatgactcagacaaggagtcaaggagtgcttcctggaggaaggggtattgaagccaagacctgaagggctaggaatggtaaggcaggcaaaggggtatagggagaggaagtgtggcccagaggtgaggtcttgcaccacaagttcagagaaaagaaaggtccaggggaagggaggacaagatggaaggagtgagaggacagaggtgagagatgaggtggtggagcagggccacagaaaggctcttgggcttctctatcctggacctcagctgttcttacagggattcatggccacatctgtgtctcagaaacttgctctgatggccccatggaccccagaccttaggggtaggggtacatgttgccatagacaaatgagccaggtttgccacaggccaggcagaggggagcagcagggtgtgggcctcaagctcatgcatgaggcccagcctccctcagaggtagcagtgccaggatgacgtggtggggagggggttcagtcttccaggagaggctcagggccggtgggcctgggaggctggcgactgtagagcagctccccctgcccccacacttgttctcattgactcccttgaagaccaggctgccagtggctcagactggagaaggagggagtttccacaagcaccagggcagcccctcagctgctgccccacttttgtacttaaaaggtcatgggctccatgggtggtgacaaaaacacccccaccccacccctgcagggctgagtccttgctaacacagacacagggcccattgtccccatgctgctcccaccctctgcctgagtgggggtgttggggagggggtggagctagctggagccatcgaggaggaggaaaccacagttggccctaggaccagcacaaggtgccctggcacacatccccgagtgggatgggacagggccagctggaacttcaggcccaccttccctgtggggcgataggagaacctccttctctcaggcctcttgtgggaacacasgaggcacttggcctagcccagggtggaggaaggatagtaactyattactatccttctgggttagtagggttttctggaaggagtggcaattatgctcagaaccasgtgatggggagaarcaagtcaggtggagcaggcagtccttgcacactcagcctgtsctccccagaccagcagagagctagaactgagcctctakgagatggcacctgctcatctggactcagcgcctgcctccatccaagttgagtgtcccaaagcaggtagttacccccatcctgctgaaaaatccactgaggcttcaacaaccaagtgggcagcaggctggttctcagagcagaggagcatatggtacgaggtgtaccacccacagagggggaaaatacaggactgggggcccaggaattcccctgacagccattcatccaacaagtatgtgctttatgccaggcactatgcaattgtcttayttcatctccacaaggaacctgatgtggaaagcatcacattccccagctcatagataaagaaacaggttcagagaggtgaagagacttgcccagttaggggataaccctgggactcaaactaaaactgaggtagccatgtgtgtcctagccacagagttcaggcctagagaggcagctgcatgggtgaccgtgggaggggcagtggctctgatggccctgcagtggacccctgcaccctgctgggtaggggtgagtgagggcctccttcctcccagtcccagtccctccaactcctccctcccaccaaagcctctgcccggaggctgagccccacccccactggccacagcccatctggtccccattagaggtcagccctgcctgcatgcytgcccgacagacacacgtgtgagagcgctcacgtttctcaggggcttttgttgggcctgatgtggataggggttttcctgttgctgctgcattgatgggggccacctgggcagcaagaccctcctgtttgtctgttggggtgggggaaatggaggggggcccacccaactgctggtctgcctgttccccaggttcccaccctacaaaaagcagggggtactcagggcagaaccccacaggctcaactatgcctcagagcttcctaagtccaaaccagggttcttcccactacgataggcatcctttcctgtccacactgggctctctgaccacactgtagagcagaggaggtttacacgtcactcccaggctgaggctaagacctaccccatggcctggcctcagacatcatcctaaaatcaggctgctctggctactagcccagtctcagctatggaggccactatggccattcccagggtgaccagtgctggctccaagtctctgtaaccatgcgcatgtagttagttgtatgtagggagattggtaggtgcatatgtgttgtccttatgtgtgtgtgtgtgkctttaaagcataattgtgagagtgtgcatgcccctgtttacattgctgtggggtgcttgtgtgcacttgcaagctgggaactgcacagctctggactctgcagggacaaagatccccagtccccactcagacccmcacacacagagatactgccctctcctcatggctgagggggcaggttcaggacactcccacccaaaatgtttcagccatgggcaccaggctggctgtggggtagtggggcagagagccttgagccctagcctggtctctgcccctcatctgctgtgcctgcagaaggctactcattgtggcctggaaagcaggaaatgggggacaggtgtaggcccagaaggggctgasctcacaatggcactcttgagcytcagcctgcccaaagggccttggacacatgacagtcaaggaccctttctgactgtaggacaggagttacgttttttgagttcccagccatgggcctacccagtacccaccacagttcaggaaggtgagaaggcttggcaccagggccacctctgccaggaggccacatactctgctgtagccacacagaccttaggcttcttgggataggcctgccccagtactgtcccttcctgagtggtggtgggcagaaccactgcagggctcacaagcccaggctgagtctcagctgcccaggtttttgtgtctgactttccaaggacgtttctcatttctgcaggggcataaccagtccccaggcccagcccttccccagaaatcccttccctggctgagcaccacaggccagagatgccgaagcagaggaagccaactgacatccaccacctggcacagcacagcagggtgggggtggggtgaacaaggaatggctggaggccagagggtctcccagtgccttaggcctctctctaataggacggcagcccaacaaccagcaggcggccctcaggcaccgggactgggccagaagatggcagaccaagcctgggatctccatatggacaaccccctygctttccagtccctcacaatggcagcagcgaggccaccctgccagcccagatgagcaccctgcatgtgtctccaccccccaggtagcacagagatgccttcggtgccatgcccagaacccatcttaacccttgatccctcaaatctcacccagtcccactctgacccctgacacttgatccttgggtcttagctggttgcattctgactcataagccttaccagaccccaartccacagggtgaaggctggaactgcatcccttcctcctctatttctttctccctcccagcgctgacccagccagaggcctcccgcggagccgggactgcagartcgacctgggctccgaggtgtacaggatgctgcgggagccrgccgagcccgtggccgcggagcccaagcagtcaggctccttccgctacttgcagggcatgctagaggccggcgagggcggtaagacgcctgccacctgtccccatctgccttcccactccctgcagtgcccaggttgccccctagcgaccccacgtcccgcctcgcagtcacctgccctcttcggtctctgcggcccggtcscacgcccttgctacracyttgctacgccctggcttccygattccctctccaccccctgtcgctgcccctcaccccacgcccgccaaacccgttccccagtctcgggtgccgatggcccgyctggcgcccaaccaaacaccccgcagaaatggagttctgacctcctcaccccgttcatgccayctacgctccgggtttcaggggattggccygggcctggcggcccccggaacctcaagcccacggccagcaagctgggcgctccgctgagcggcctgcaggggctgcccgagtgcacgcgctgckgccacggcatcgtgtgagtaaccgcccccgctgcccctcccggaccctagccttccagggccctggatgcgggcgcagtcgtgaacccatcagtcactcgacgctgtcctgtctcgttccccccatcaggggyaccatcgtcaaggcacgggacaagctctaccatcccgagtgcttcatgtgcagtgactgcggcctgaacctcaagcagcgtggttacttctttctggacgagcggctctactgtgagagccacgccaaggckcgcgwgaagccgcccgagggctacgacgtggtggcggtgtaccccaatgccaaggtggaactcgtytgagctgggaccctgctcccacscctgcttyttaaggtccctgctcggccggtgtaaatatgtttcaccctgtccctctaataaagctcctctgctccaccttgaacctgtcacctggcctgccaccctcctgcgcaggccatgcatggctcccgagtacagtagtatctgcttaggtgccaggcatgtcctaggctctgggtgcagtagtgagcaggacgggtaccatgctgccctgaagggggccacagcctgggtggaaggcagacctgaatcacaacgggccagctctagtaatacgaaggtgaggtctgggatgctgcgtgcggcgcgacgacaggaggtatgacctgggtggggtcagggaaagtsttagctgagaactaagagatgagggaggcacaaactctgcacgggggaactgtgtgtgcaaaggtgagctgggggcgagaaaggcctctgtggccgtcatcggcactagcgggttgggggtggtggtggggtgctggcagcctcaggagcgatcgctcccctggagagggtgattgagtgtggagatcaccggggccgccgcgggccgtctgcacttctgttccaggtttttctggcattttctgttccaggtttcttccacccacgagcactttattctcctccgagacccccttttcttccccttcctctctcccccaccagggggcgcgcttaaatttccagacagagaccagaaggaaggtttagaaagaaaagaacacttgcccagggcagctttgccctccaagaggctccctcctgtctctaagtcaattccacccctcctcgaagtcccggcttccacccctctcctcagagtcccggcgtttacctcgtggtgkgtttgccttgggcctttcatgccccggctgcacacatcgtctgtgaattgtggctgttcactcccgaggatgtgtcctagactccgggtcgcgtggatctaccctctagtttacttgctcgggagaagaaactgactcgttttatttagtgcctatttagcgagcccagagtaacgtacatttgtgctgttttcaattttgtgctatcgcaaatcacaaaaaaactgttatcaattcacattcatcatcagcacgagacccatttccttgtgctcctgccagctcaggatattatgtttcttttttcatttttgccagtctgttaagtaaaatgtcatatgcgtttgttttaatttgcatttctctgattaccagtgatgaacattcagtttttgagcatttatggtgtgtttgctgggtgcctagcactaagggaacagagtggtcctcactctcaaaagagcagttcttgtgtaagttaccccaaacccttcatgatttttttccaaggcttatttaacttcttcttaatgattggtaggaacttttcctaattttgtacgaatctttgttactggattctggtcatctgatctatttccctgttaatgtataattactactgtgttggagtttaatagccaatctctcctccttgttggtcatttacaaacctgtcaaagctattcctctacatttccagttgtcagaagttgagactgcatgcctcaggctctggaaaagcaaacctctgaactgtgaccaggttgccctgaatctagggactcacttgggaagaactggcattagtcttttcctccagagaggactgtgatctgcacttcctgtgcatttattcagatgttgtgtctgtcttcgcttaagtttttattttcctttcttctcatagatcttctgttcatggttaaatttgtgctagagattccctcttaaggctccttttgcctcctcccttccctgaaggagcacagttcagggcaatgggcaggtgctgatagagcagtgaggcaaggtggcgtcctggtcctgctggtgaccccagatcatgtctggcccttgtctccttttgcttcccaaggggtcagactgtgtgcgttgaggccctgagggcgccccaccgtagcgctgcgcaggtgtgcacgcacacacgctccctgcagccacacccaaatagggtggggtggtggaggagtctgcccttgcctgcccaccctgcctccgctgacttggtcccagccccacccagtcataggtgggagaggagaggatgactggcacccaggaaagcagggaagcattattaagcacaggagtgggtggaaaaataccgggagccatgggccctggcccccacctctcactcccactcacccgcagaaactcgactctcccactggccaccacagatccactagccgctggtactcaccttaatcccatgacatgcaataaccccttcccccaacagaaactaccacccaagaggctccctgccaccataggctaccccgagatcaacagctccaccccttcagggttgcagcaactacagcagcccctgcctgggcatcctggttgggggtggcttggagggcagctaaggggagtggcattcagagctgacagcctgatttgtcctttccccagcttcaaggcccagcctctacccagtcccccagcccacctcgtctgcccaggggccctgagtgtagtagaccatgaaaagcttgggacagggtcctcataggacaaggtttgtatggcccagggtgccagtactgagacaggggacatcagagtctctctccaggagggggaaccagatccaggatccccaattcacagtgctccaggctccagcctacctggctagaaccaactttcactgttgtccccaaacctgctacatccctcgaaccccagggcccagttccttacctcaggggctttcagaccaaagacatggatatcatcctctacaccctcatgccagccataacatcctacccagcactgtgtctaggattttgcctcccaagcatttttagacccatttcagggcagctgaaggaatctctcattcctttgcttcaactcttccagggccctcaggatggagtccctggtcctcctcctaacatttaaagtctccctgacctcagggccctcaggatggagttcctggtcctctgcctagcgttttaaagcctctctgacctcggggccctcaggatggagtccctggtcctcccactagcatttaaagcctctctgacctcgggctgctgactactttgtctcacctcctctgctacagcagacagtccagtccagcatcctctgagctagtccaccttttcatagccctcagacctctgaagctcaaaatgcctttcttcttttgtcatggctcagcaaactcctactcactcttcaaggcccaactctactgccccctcccctagagcaaagcctcggccctgccatccccagggagagttaatagtttccatccacatgccctccatcccatcccttccagttttgcctggtgcctctggcacaacctgttatctccttggtcagaccctggctcagatttacctctgtcctgcccagcctccacccaggccaggaactgggaggtacaggggtcctggagaagcacccaccctcactcaggcacacaagcacacacacccactcacacatacactgggcttcccttcctcccactacctttcacctcacctccaagcatcctgcctgagttctcagtgggaggtaagtcttggagcaggggtcttcaatccccaggccatagaccatggcctgctagaaattgggttgcacagcaggaggtgagtggcttgcaagcgagtgaagcttcatctgtatttacagccgctcactattgcttgcattaccacctgagctccatctcctgtcagatcaacagtggcattagattctctaattctaggattctaggagtagggattctaggattctaggattccaggagtatgaaccctattgtgagctgtgcaagcaagggatctaggctgtacattccttatgagaatctaacgtctgatgatctgtcactgtctcccatcacccccagatgggaccatctagttgcaggaaaacaagctcagggcttccttcaccatacattatggtgagtcatgtaattatttcattatatattacaatgtaataataataggaataaagtgcacaataagtgtaatgtgtttgaatcatcctgaaaccatccctgccctccatccatggaaaagttgtctttcacaaaaccagtccctggtgccgaaaaggttggggactgctgtcctggagggcacctgctccctcctgcatcctcaacctcaactcactcagtcaactaaatatttattaaaaggtcatgcacagtggctcacgcctgtaatcccagcactttgggaggccaaggtgggggggatcacttgaggccaggagttcaagaccagtctggccaacatggcaaaaccccgtctctgctaaaaatacaaaaattatcccggtgtggtggcaatcacctgtagtcccagctgctcaggaggctgaggcaggagacttgcttgaacccaggacgtggaggttgcagtgagccaagatcacgccactgcactccagcgtgggtgacagagcaagactctgtctcaaaaaacaaaaatacctattaagaaccttctatatgccaggcattgtgttgcaccctaggaaaacattttgaacgaacatgtaaaataactacaggctataagcagtgctatcaaggaaataaagaaggcattacagtagagcataagggattctcttcatatatggaatctggaaaggcctcacagataaggtaacatttgggcagagaactgaggtggtaagatatcatctgtgcaggtatctggggggattacattccaggcagagggcacaggaaatcctaaggccctaggcaagcagtgactgaagtagtataagtgaggtggctggaagtagtagatgaggtcgtcagagagatgtgagggagacaaggctgtgttggcccttgtgagccattgttccatggatagcaggactatgcaaacccaaaggccgagagagctgagaagccaaagaaagaggttgacaaatccattttctcagagagaaatatataagagggacttacgaacagaagtgatgtctcgagtggctgcaagactgaatcctcacaccaaccagccttccagaaagtatcctttatatagcaagctcttagggtaaaacatgtgcagctggtcccgtcttcagactttcttgccaagactcgtgaccactggagaggttaaataagcatctttatgaagagttttctattctacaggcattgtttaaagatcttgctgatgaatatcttggcatctaggggtcaaacattggtcattacggtggttttggatcaagtggcctggaacagtggcccacacctgtaatcccagcactttgggaggccaaggcgggaggatctttcaaggccaggagtttgagactaacctgggcaacatagcgagaccccctctctagaaaaaataaaaatgaaaaaaaaaatagccagctgtggcggcatgcacctatagtccaaactactcagaaggctgaggtgggaggaccccttgagcccaggagttcgaggctgcagtgagctatgatcttgccactgcactcgagcctaggcaacagagtgagaccctgttaaaaaaaaaaaaaagcatcattcttgccacgcaacaggctgttctcctacagccatggtaaggactttgacttttactctgagatgaaaagccagaggagcggcatgacctggaattatgttttaactaggatcacattgtctgctgtatggagaataggccctaaggggcaaaggtagacgcagtaaaaccagttagcaagcatgactgcgttcatccctaactaattccaaactagcccactctccccagtccagacgccactgtctcatgctgaacagtgtaagggcctctgccttgtctccctgtctcctgcctggcccctccctcaatcctttctctacataacagctaaaggaggtttttcaagtgcaattccctgtcaatcttgcctattatagtttccatggctcctcactgctcttaggacagagtctaaattccaaatcccagctcacagggccacatgaggtacacagcccctgctggcctctgtggacaacttgtgcctctgtaactctcattgtgcttatctgtaagttcagccccatcaaactctcctcaagactcttgcaggcttccttgaccctccaaggaggttgaaacacaaatggagtcctttctggttctctgagtgacaagctttgttatttgatactttcctcctagagaaccaaagaaaggggtgaaggtaggcggagcccagatgcagcttcaagccagccctcccttcatggccaaggactcagcccctctagggggtgtgctagcttggccctgggctcacagcccttgaactgctgagttggatgggtgggagcagtgttgtgacttgcaccacaccatgatgcccagaagcctgggctgtgggccctgagtccctctgccccacctggggagtgccccacctcccctccacctctgggtgcccctgtccagctacgtgcactccagtgctatcctggacaactcattcttacccaacttcttgtcttgcaccccaggccgacccctgacttgcttttcatgtaacttcctggtttatcattttctcacagaataatctgtctttctaacaacattcccacagcacctctgaatggaggtggaacctctaaaaaggtttaagggtagtgaagaggtttctctaataagcaagcactgtcctcctgtgtcccctctaccacaagtgggaaactatttgggtccctacagaaaccaaacctcaactttgctagtgtctgacatagatccatttgtggctggaatgcagagactagaaatcccaggagagactgctagagacctcactgggtcctgcagggtctggagtcggtctcagccatgtgggctcagaaaccgcattaaccagcccttaagtgggtctgtcaggcccggtgagccaagctcagaggctgatgcaccacccccgacacccacgcgcgcgcgcgcgcacacacacacacacacacacacacacaccagcttcactgacaatggctgcagtgcaagaacactcagctgccatccagggtgttcttggtctgtaatt

SEQ ID NO: 96913 - DNA, 14219 bp, Homo sapiens
aaaacgtatgtgggtgttatggtagaggaatgtgcaaaatgtggagtggggacccatggcgagagccatctttaatatcattggcttgtcaaatgggcagttctaagggagcttggccttacctgctctggggaattgcaggttgccacataacaaagcatttctgtgtgggtacagataaggtggctgtgtctgtgagaaagcctgggaaaatgcaaaggaaaactatgtctgcatagcagaggcaatactgtcacaccactaatccaagctgaagaaactcaattgctgagttctaactttttactttacttgtaaattgtattcatgatgatttgtttataaatcaaaaactttaaatggacctatatatttcagtatatcatggaagtttttcgtataattcttgtagatgcttttgtaaagagaaaacattcctttttttcaatattaatttcatataagattacactgattaaacaattttccttataaatctgatttgtaaatgttatttgcttaaaacaaggtatagatggaaaactgaaataagaaatatgacagccattaagcacttatcaagtgtttactatataccacaccttttacaaaaacactgcttaattatcacaacagccttgtgatatatgtattattattattactatttcataaataggaaatcttttcattagggctctgagcgttttcattactcagcagaagttatatagccagcacacaaaattgttcagtttctaagaccatatatgctctttcaactgtgactgtggaagtacataattatcagagtgcttacagtcactttaggcgagataagatttgtgaagtaaacaattatccctctgtagacaggtcattttagacaaaaagactatgaagcaatgtgcgtatataacttaaaatctggaagccatctccagagagtttcatagtgtaggaaaagtgattcttttgccaggtaactgcatatcaaatctttatcagttctgaacatgaactttagccagaggaggacacagaaagactgactagcttcctgttgttccactagcaatcttatttttctccattaaataatcaatcaaacatttcttaagcacaggctttggagttagtcagacctgggttggaaattcacctctgccacttactagctctgtgatctcaggcaagttattcatcctttccatgcccctcatctataacatgggtgtaataatactttcctcaagaggttgttgtaatatagatgaaggacctagcacaatgacttaaaggtcacaaatcccaataaatggaagtgatgataatctgctgtggatgtgtaggctttatctcctatccttgagaaaacacatttgaagagacagaaattaggagtgtagaaagtttaatatcaataaaaatgataaatagcaggggtttttgtaataatgccaacaatgtcaatggcaaaagaatgagggttttagattaaatggtctccagctgctttcaactttaccagtacatgatttttaatgagttctacaggtgataagtgctagagaaattcagaggatggagagaaaattgtcagcctgaatagtcagcggtttcttcatggaggaggcagtcttgatctgggtcttaaaaatgaacaggcttcgcagagttaagaggaaagaaggcatttcaggcaggcataatagcactaaacagaaatacaacggtgtattagagcaaaacatattcttggacagtagatacaccaatttaattctaagtttagtgtttgggaaggaaaatggcaggaaacaaacataaaaacccacaaagattgtgcaggggctaaaaagccagactaatgagtttgaactctttttttttttttttttttttttgagacggagtctcactctgttgcccaggctggagtgcagtggtgcgatcttggctcactgcaagctccgcctcccaggttgacgccattctcctgcctcagcctcccgagtagctgggactacaggcacctgcaaccacgcctggctaattttttgtatttttagtagagacggggtttttcagtagagacggggtttcactgtgttagccaggatggtctcgatctcctgacctcgtgatccgcccgccttggcctcccaaagtgctgggattacaggcgtgagccaccgcgccgggcctgaaatgattcttgaagaaaatgggggtgcttttgaaggtttacgaatctgagtgacaaaagcaaacaatttcttccatgccccaggttttcctcagcaccaggagaggggcttggatcctgaatcgtgtaggggactacggatatcctgctgatgtgttgttctcttctcgacttacacattttatatggaagatctgtggccaatcattagcaaacaaatatttggaaaaaaagataaaccaaaggtttgaccatgaaatgtttggcctgaagcctaaacacaggtatgttcccaggatgggagtgcagggatagtggccaaagcacaagaataaggactcttcacactggctaatagtaaagccacctctacccatacattaagaaaacccacagtggctgggcatggtggctcacgcctgtaatcccagcactctgggaggcggaggcgggtggatcacctgagctcaggagtttgagaccatcctggccaacacggtgaaaccccatctctactaaaaacacaaaattagccaggtgtggtggcacctgtctgtagtcccagctattcaggaggctgaggcaggagaatcacctgagccctggaggcagaggttgcagtgagctgagattgcaccactgcactccagcctgggcaacagactctgtctcaaaaagaaaaaaaaaaaaaaaagaaaagaaaaagaaaagaaagcctatagactcatagaatctgaaatcagatttctaacttgtacccacagatgtccaagatctattggtctgtgggtttttaatctagaattctctttggcagtaacccttttctcattcccccaggtatcagttctttttgcatgatacccaacaacaaaatgatagctgaggacagtgcgtcatttactcattgagtacctgttatgagccaggcatcatacatgggcatgaaatacagagagaagacataatagtaatagtaatagaaataacactcacctttctgaggactttctataagataagcacagtgctaaatgagttacatgcagtatctcacttaatcctgacaatagccctataagttggtactatttttgtttcacagtgaggaggtctatgcaaacctaccccaaaggctgaggaagctgagaggctgaagaaagaagctgacagattcagtttcttagaaacatttcatagggacttatgaacagaagccatgtctgtctcaggcagtggtgagacaagatggtagatccccataccattacctcctgacccagggatgatataccacaggggaggggcacacatacttcagagcgaatgggtaggagtttgccctaagggtgggatttacagtaagtacatactattaaacaacagattaactggaaatctcagaggtattcccggaaccagggttgatcagaagtcaatatggtagattaacttctaagatggagttgctttggcctccacaatttttgatctacattttacaaatataaaaactgagatgtagagaaactaagtaattttcccgagggcaacagaaataataaatggcagactcaaaaaatagatcttaccttaaatactctaatgagaagaaagaggacagattataatgaagaaatacatacagtgttatgaaagtacaaaggatggggtcctcagagaaccagggagggaaaacatttctagaggctgattttaaatttattttccctccaactttttatttttgaaaatgttcagatctacagaaaagttgcaaaataataagtacaatgagcacccatatatccttcacctggattcacctgttaagtttgctatatttgcttcctttccccatctctgtagataggtccatacatatagagcatacatacacaagtacatttttttctgaaaccatttgagtacgttgcagtcattaagacactttaaatacttcagtgtatattgtataagaaaaagggcattctcctacataaccatcatataattatcacacgtgggaaatttaacattgataaaatacattaatacattggcaatatccccagttgccccaatagtattttttatagctttaaaaaaatctttttaaatctagtatcctgtcaggtaatcaatcacaccattacatttagttgtcatgtctctttaatctctctttttatatatatatatttttattatactttaagttctagggtacatgtgcacaacgtgcaggtttgttatatatgtatatatgtgccatgttggtgtgctgcacccattaacttgtcatttacatcagatatatctcctaatgctatgcttccccactcttcccaccccacaacaggccctggtgtgtgatgttccccttcctgtgtccaagtgttctcattgttcagttcccacctatgagtgagaacatgcagtgtttggttttttgtccttgcgatagtttgctgagaatgatggtttctagcttcatccatgtctctacaaaggacatgaactcatcattttttatggctgcatagtattccatggtgtatatgtgccacattttcttaatccagtctatcattgttggacatttgggttggttccaagtccttgctattgtgaatagtgccgcaataaacatacgtgtgcatgtgtctttatagcatcatgatttataatcctttgggtatatacccagtaatgggatggttgggtcaaatggtatttctagttctttttgaggaatcgccacactgtcttccacaatggttgaactagtttacagtcccaccaacagtgtaaaagtgttcctatttctccacatcctctccagcacctgttgtttcctgactttttaatgatcgccattctaactggtgtgagatggtaactcattgtggttttgatttgcatttctctgatggccagtgatgatgagcattttttcatgtgtctgttggctgcataaatgtcttcttttgagaagtgtctgttcatatccttcacccactttttgatggggttgtttgtttttttcttgtaaatttgtatgagttctttgtagattctggatattagccctttgtcagatgagtagattgcaaaaattttctcccattttataggttgcctgttcactttgatggtagtttcttttgctgtgcagaagctctttagtttaattagatcccatttgtcaattttggcttttgttgccatggcttttggtgttttagacatgaagtccttgcccatgcctatgtcctgaatggtattgcctaggttttcttctagggtttttatggttttaggtctaacatttaagtctttaatccattttgaattaatttttgtataaggtgtaaggaagggatcaagtttcagctttgtacatacggctagccagttttcccagcaccatttgttaaatagggaatcctttccccatttcttgtttttgtcaggtttgtcaaagatcaaatagttgtagatatgtggtattatttctgagggctctgttctgttccattggtctatataagaaataattctctctttgacatgggctttctttttaagaacccaaggcattgttttgtagagagtctctaaatttagacttgcataatttttttcctttattatattcaggttaaatgtttttgacacatatactacataggacatgttgatcttagtgggtcacatcaagaaccacattatgtcagtttatctcacagtaataatgctaaatttgaccacttagataaggtggtatagataccatcaagtttctccactataaagatattttttcccgttgaagttaatcagtggggtgacatttggagactgtgtttcctaaaaacctttcacctaattattttagcatgcatgtttttggtggttgcaaaataaattgaggctttgttgaataataggagatagccaaacaaatagagcaagggtatagcattctaattataaagacaaagtcttggaacagcaaaaaatacattatgctccaggacttgcatgtagtctggtatggctggactatatagcaaagatggaagagtgactgaatgtatctccaggttcatcaggcatgaaaacctttggttcctccgcggtcttctgagcggtcacgtgaacggcttcctgcaggctggccatggcgcttcaagttcccaaggctccgggcttcgcccagatgctcaaggagggagcgaaacacttttcagaattagaagaggctgtgtatagaaacatacaagcttgcaaggagcttgcccaaaccactcgtacagcatatggacgaaawggaatgaaaaaaatggttatcaactacttggagaagttgtttgtgacaaatgatgcagcgactattttaagagaactagaagtacagcatcctgctgcaaaaatgactgtaatggcttctcatatgcaagagcaagaagttggagatggcacaaacattgttctggtatttgctggagctctcctggaattagctgaagaacttctgaggattggcctgtcagtttcagaggtcatagaaggttatgaaatagcttgcagaaaagctcatgagattcttcctaatttggtacgttgttctgcaaaaaaccttcgagatgttgatgaagtctcatctctacttcgtacctctgtaatgtgtaaacaatatggtaatgaagtatttctggccaagcttattgttcaggcatgcgtatctatttttcctgattctggccatttcaaagttgataacatcagagtttgtaaaattctgggctgtggtatcacttcctcttcagtattgcatggcatggtttttaagaaggaaacagaaggtgatgtacatctgtcaaagatgcaaaaatagcagtgtactcttgtccttttgatggcatgataacagaaactaagggaacagtgttgataaagactgatgaagaattgatgaatttaagtaagggagaagaaaatctcatggatgcataagtcaaagctattgctgatactggtgcaaatgttgtagtaacaggtggcaaagtggcagacatggctcttcattatgcaaacaaatataatatgatgttagtgaagctaaactcaaaatgggatgtcygaagactctgtaaaacagttggtgctacagctcttcctagattgacacctcctgtccttgaagaaatgggacactgagacagtgtttacctctcagaagttggagatactcaggtggtggtttttaagcatgaaaaggaagatggcatcatttctaccatagtacttcggggctctacagacaatctgatggatgacatagaaagggcagtagatgatggtgttaatactttcaaagttcttacaagggataaacgtcttgtacccagaggtggagcaacagaaattgaattagccaaacagatcacatcatatggagagacatgtcctggacttgaacagtacgctattaagaagtttgctgaggcgtttgaagctattccccgtgcactggcagaaatactctggagaaaactctggagttaaggccaatgaagtaatctctaaactttatgcagtacctcaagaaggaaataaaaatgttggattagatactgaggctgtagtccctgctgtaacggacatgttggaagctggtgttctagatacttacctgggaaaacactggtctatcaaactcgctgctaatgctgcagtcactgtacttagagtgggtcaggtaatcatggcaaaaccagatggtgggcccaagcctccaagtgggaagaaagactgggatgatgaccaaaatgattgaaattggcttaatttttactgtaggtgaaggctgtatttgtagtagtattctaagaatcgcgtgatgttttcttattctccttacattaagaggtattttgtgtttgtattcttggctggatgttataataaacatattgttactgtcaaaaaaaaaaaaaaaggaaacctttggtctactaaataaaaagtatggaatgaagacagtccaaagccattcaaagatttaggcaagtgagtaacataatcatacctacattttagaaagaccattttgaaaatggtgtgggagtgggatgagacaggaggtcctaaagacaattgtatcatctggttgagataacaaggagtagataaaactatcttggggatgttaagaggagaaagggaaaaggcttggtgaccagatatataactcatggttttgtgggttgggcaactatatggatggatggtggtactgctggtgaaaaggagtaggtttggagaaaaagatgaaatcatgaggttggaatgcagaacacaatcgacctagtgtcaaagcataactaaatgcaacaaaccagtagtggtaatttaaacatataaaattcctgaggccaggacagctctgtctgaagatgagttaatatagtattcaggcattaagactactttttaggccaggtgctgtggctcacgcctgtaatcccagcactttgggaggctgaagtgggaggatcacgaggtcaggagttcgagaccagcttggccaacatggtgaaaccctgtctctactaaaaatacaaaaattagccaggcatggtggcaggtgcctgtagtccaagctactcgggaggctgagacagcagaatcacttgaacctgggaggtggaggttgcagtgagccaagatcatgccactgcactccagcttcggcaaaagagtgagactctgtctcaaaaaaaaaaaaaaaaaaaaaaagactgctttttagaaagctccacgatactagaaaccagccttattattattaaaagtaatggcaaaaaaataagcaattacttttgcaccaacccaatgtttccagtatccgtatcctacgctgtccctaggaaacaataacaagcccgaagtataccaagataattcactgaaaacaactttgagataaattctaaaatcctaggctgtgtatcattggacaagtcacataacttttctaggcctcaattccctcatttataaaacctggataatgacacctattctgcttccttcatagagttttgtgagagtcaagttaatgcatgtaaaagcaacttataaactgtaaattgctacatacatgtaatttatcatacagtttggaaaacagtggcctaaacttagctcttgagcctttgaaactggaaatgagactgaacagaatgttgacagcttagttctgtcagacttcttggtatgagaatacaaactattgacctgtggccttatcatatcacacacagaatattattgttacttgagaaatcatatatgcactcctcaaacaacactcttccttcactcctccaacactctccctttcagtgcatccagggtccaacttcagatctgatcttgatctgtgccaacctagtataaattagaccttttccaaacttcatgcatagaccaaggggaagattattggcatcctgtttacctccaccaaagcaaaattttacttatgtggtactgatttctctttctctcatttctccacttgatctttgtcacgactcacagagctctgagtcagcatccaaccttaaatgatgacctgccaaatcgtatcatttctggcttggtgaaagtgaaaggaaatgtgaaggaattcacggagacagctgccatatttgaggatggctccagggaggatgacattgatgctgttatctttgccacaggctatagctttgactttccatttctggaagattccgtcaaagtggtcaaaaacaagatatccctgtataaaaaggtcttccctcctaacctggaaaggccaactcttgcaatcataggcttgattcagcccttaggagccattatgcccatttcagagctccaaggacgctgggccactcaggtatttaaaggtaagtgaccatgcaaatagactacttaattacttggtgatatgtttacctctgtttaggtacttgtttttaaatagctagagatagcatgtatgattacaacagtgcctagcacaaagttagtacagaaaaatatatttttgagtgaatctaaagtagcaatttataaccatggacatacatcatacctgggaaatttttccaagctatgcatgctttgacaccatccttgctgatgcttatttagttagtctggggtggggcagtcataacatctttgagaaaaatattccccagtaattccaatgtgtactccaaattagaatttactcatctagattttaggcaactggcatatatttctgaagtaaaatagttttatcttctttcattatagataaaaataaaatatagaaatagtatgactttatttcggccgaaaattaagacctggttgcagactagtcaatattgtaggatattcaatcccccaaattctcacttttctccttttatgtcccctctttcagttttggctaggaatatatgaaaaaaaaaaggggaataggtttcatatgagtcagtagaatgatatagcttccaaagaaataattaaatctagcatcattaaaaaactataatgttctagaacattacaactgttgttctctaaactggccagaccacacctaatgatacattttaaaagtgaagctggagtgcgtttaataaggagagagagaaaaattttttaagggatttgaaaacatgccatctgaagtacaactgaaaaagccggagagagatttagcctggagaagataaacttcaggagagatatgagaatttccttcaaatatctgaagggaaggcacatggaagaaggattagatttactcagtatagcttcaaagggtcaaaccagaatcaaggagtgaaatcttgagggttacacatcagcttaccattaagaaaaaaatccaaaacctttttcctatcagccaatgccatttcatgatggaaccagctgcctctgaaattctaagcagaaaaggaaaaggatgccaaatgactgaatgctcactgggccggggcaggagagggggaaggtatggagtagattcaagcctcaggatagagagaaacaagatgatgtttaagggtccttctaaagaagaaattcactgattctatggttgttataacaaaatttgctattgttactagcatttaattaaaactactcagagttcctgttggaattacaccttttttgttttcactagtgaaaatcttcacagttgcagagaaaaaaagaaccaatggtattacagttgatagttcaacaacctttctaaatttccccaaatttctattacttccagtcctatccagcagattatgtactacctgagagaactatacaagtagtcaaacgcaaatagcccattaagttggcctaattctagtcatattaaagtgatcttttaattgggtcaattacataagcggagaacagttcattaaaacaggccacagcatcttagtatactttaagcaactgggactcttttccaagaccaagtgaattcttgagaggaaatagagaaaatgagtatttgcaagagtctgcattatggttatgagattatgggatcttagggaaaatgtacaaaaagcccagcttcctatgctagcagaagcctagtgctaattcctccagcttttttctaacacctggaaggaagaaatcttcagaattctctaactttaccagacttccaacaggaactctgggttttttattctgtccatggccaatctgtctgcctcccacattcttgcctttctcttccctgaattatcccttcactatgccaattttaaaccctttggattagcttgtttttcccatttttttcatgtctgcccaacaaagcctgcctccttccttgtctgttccctaccaagccccattttccttcttcttctgttctctggaattattgttctcttgtcaagaaaatattctactcttttctagaacactgaatttacttccttgccttgactgaaatgaaacatagtttctgttttgattgcgtcttttgcagcccttgcaagtgttttattttcactcagcaactttctttccttcaaaactatatcaagttacaccaaatctctggatcacaagaagtcattatgtcataggctggcattaaagttcctccacaaattggatacaacctccaatttcaggcccatctttctttcttttttttttttttttttttttttgagatgcagtctcgctctgtcgcccaggctggagtgcagtggcgctatctcggcccactgcaagttccaccttctgggttcaggccattctactgcctcagcctccccagtagctgggactacaggcgcccgccaccatgcccggctagtttttttgtgtttttaatacagacggggtttcaccatgttagccaggatggtctccatctcttgacctcgtgatccgcctgcctcagcctcccaaagtgctgggattacaggcatgagtcactgtacccggcctcaggcccatctttcactagtctttaccatacttcctacaatactctagatgcactggatgacgtacccactaagcagcaaacacagcaggtacccttgtaccctgtgcttttgcttccactgtgctttcttcttgatatgccctccttttactttttatttctataggaaaagtctatgcatatttcttccctccctttgtaatatagtgatagctccttaagtaaaggactcatgtttatttgcctttgtattgcaagcctagaccactgcctagcacataagaggtatctaataaacatctattctaagaaatgtcagtttagccttgaggtaaattaaattctaaattctgatgtagaaacttcttatttgaggatctcagcttatgggctaccttagccaatttccagttatgttaaaagcctgaactggactgaaattgcagaatgggagccagatctcttttctctcataacattagctatacactgaaatatgcaggagcaagtcaggattacacagatacaacctgctttaggctgacagcagactgaaggcctaccaccacagaactctaattcagactgtcttccttcccaccttgtcttggaacccttggaagatctctgaacttcagttcctcactgttcttcaacattcttcagataacatatactgaccttttagtatgtaccaggccttctgctaggggctggagaagcaaatatgaccatacagaaaatccctatctttctggaatgcagagccaagcaaggaagactgtgttagcccattctcatgctgctataaagaactgcctgaggctgagtagtttctaaaggaaagaggtttaattcactcacagttctgcatggctggggaggcctcaggaaacttacaatcatggcagaaggaacttcttcacagggtggcaggagagagaatgagtgctgagtgaaagggaaagccccgtataaaaccatcagatctcgtgagaactcactcagtatcatgagaacagcatgagcagtatgagagtaaccaccccatgattaaatcacctcccaccaggcccctcccatgacacatggggattgtgggacccaaaattcaagataagatttgggtggggacacagccaaaccatatcaaagacagacaagtaaacagacgcttaatgatttgttcattcagcagatatttaactatatcctaaacaagtgctccagtagcaatgcagaagagctgccatgagagcagtgggcaataagtacccaattctccctacaactacataggaatttactaaaaggacaaggaaatattgaccatagaggggaaataatcactactgtttatgcaaagttagatgaaagtgacagaacaaatagagttctgggaactgcaagtagttcagaatgctggtaaagtgttataggaatgaaggaaaatgaaac

SEQ ID NO: 96914 - DNA, 126147 bp, Homo sapiens
cctgggcaacacagggagacctcgtctctacaaaaatttttgaaaattagctagccatggtggcgtatgcctatagtcccatctacttgcagcagaagtgggaagatcactgagcccaggagcctgaggttgcaatgagccatgatcctgccactgcactccagcctcattgacagagcaagacactgtctctttaaaactttaaaatattaattataataccatgggcaaccactaataaaataactaaaattatatattttaagagaaatgaaaggtaattaaaatgttacactataaaatatctatttaacacaaaagcattcaagaatcaaggaattgaggaatacaatggacataatacatatagaaaacaaatagcacaatagcaaaaaataattctatcttatcagtaattatattaaagtaagtggatcaaactgtcaaactagaaggaagagatttggagaatggatttttttaaacacagcacaattatatgctatttacaatagacacttaagatttaaagacacaaataaatggaacataaaaggatggaaaagatacaccagcaataaccagaagagctggagtagctatattaatgccaggcaaaattgacaaaatattttaagataaaaattattattagggcaaagaaggatattttataattataaaagtgtcagttaatcaagaagatataaaaataattaaagtgtatgtacctaacaacacagccccaaaatgcatgaagcaaaaatacaccgaattaaaggaagagactattcaaacttaatagttggacgcttcaataaaaaggagaatagaaaaacaatctgccagggtcatgatagtgccagctctcaaatctgggtctagggtaaaagagaaataaaactaaaacctgtccgaaaaaaattcaatcacagtgaacctgactgggaaaggagtagaagagagggaagagccagtatccaggcagctggggaacccaaaacaattccccttagggctactccctccctggtatctcctgatgtctgacctgaccctcccctccattaagaatagatgtcactttcctccgttctcctccactctcctccactcactgctacttctcccactccacatcaacaaactgagtcccaaaagcttcttaaatatcagccctatggcgctcagagctcggaaatgctgaaagtccttcagtaccagatgccaacttagagaggacaaaggagtaggaaagactgagcagtgacccctacatccatgtgccactatcctatagcacatttgagactattctgaagagcaagttaaactcacataaaatagaaatttttatcctaaaaaatatttcatatgaaacatttatggaactgaaaaagtactatacttcaatctggagcaaaatgactttggctctcactctgaaaataaatgtttaaatcatacttgatggaacaaagtcagctgaaactatgcacattggattcaccaggagacatgtgtacacagtgggctgcctctcctacataaaaaggtcttcatggatatacaatgggtcctcatgaaactgattttgccacagattttggggaactgagagcttttttcttcctccaggagggcacaacttccttctattttccagtttttgtgctctacctctttaattttacttaaaaagaatgaccctgaaaaacacattagtaattactagatgccagaaaatgatccttctagcataaaattggaacatggaactattttatcagtgttaactagacctgaattatcaaatttcaaacaatattataataccaaaagctgattttagattatattacagctcatttcatagagcaccaaggaagtggaagaaaatataaatgtgcttcttaacctgtgtgacaaacctacctcaatgattcaagtgaaagttgtggattcacatgttcgaggcacataaaaaaataatcttgtatgttttaatatctaactcaaggactatcatccagcatctctcatgctgtgctcattcacacactacagaaaggtaactcctctttggcagagctatgaagtatatctaaattaaacaggctaatcaagtgactggattatgtgtaaacctcctcaaataaaatagtataaaaaaatatatcatggtagagtttattattgtcacattatcatagtaaccactaggaatttagtcagttaaaaatatgtcaaaacccagcctacaaaatgggaaaaaatatttgcaaactatgcatccgacaaaggtctaatatccagcatctataaggaacttaaacaaatttacaagaaaaataccccattaaaaagtgggcaatgaacatgaacagacacttttcaaaagaggacttactgcagccaacaagcatatgaaaaaatgctccacatcactaatcattagagaaatggcaatcaaaaccacaatgagataccatctcacaccagttgaaagggcttttaataaaaagtcaaaaaataacagatgctggcaaggttgcagagaaaggggaatgctgatacactgctggtgggaatgtaaattaattcagccattgtgcaaagcaatgtggtgattccccaaggaatttaaaacagaattaccaattgacccaacaaccccattattgagtacatacccaaagaaatagaaatcattctaccataaagacacatgcacacgtatgtttatcgcaacactattcgcaatagcaaagacatggaatcaacctaaatgccaatcaacagtacactggataaagaaaatgtggtacatatacaccatgggataccacacattcataaaaaagaacaagatcacatcctttgcagcaacaaggatggagctggaggccatcatcctaaacaaactaatacaggaacagaaaaccaaatgccacatgttctcacttacaagtgagaattaaccaaggagaacacatgggcacaaagtggggaacaacagacacatgggcctacttgagggtggagggtggaaggaaggagaggatcaaaacactacccatcggatattatgcttattacttgggtgatgaaataatctgtaccccaaacccccatgacacgcagtttacctatataacaagcctgcacatgtgccccgagcctaaaataaaagtttttttaagtcaaaaccatcttcattctttgtcttctttacaaaaatatatctgaaaaaatacatcctgtgaagtagtgctctaaagttgtcggagatattgatttattacttcctttactaaaataataccttatatttacttaattaaaatatataaaacctccataactggcatttacgttcagagaaatcgctctaaataaaacatctgccaggaactaaaagcattttaaagtggcttggcactaacactgtcattatcatcactattacaagggacagtgtcagattacatgtatggccacgaggaggtgctaataccctgtggcttcatcaccaaaaagaaagtcatcagagctgcaaaacctgggcctgttattgcagagtctggtaaaaacaaaaaccccacagagagcagagtaacctgctggcctctcacaggggaccgagtgaaggatgctctacaatccagggaaaggggtgataagccaggggaaagctggcctgcctacctgttcttctcacagaggtgcctctttaaaaatacatctgatgaaatactgtaatttctaaatgtttggacattgttataattatcaaattaatcattgatacagtagtcattccaatttagcttcttgtccatcactacaattctgaagaataaaatgtctgcccagaaataagaatgtggagtcagaagaggctttattactagaaatatgaaatcaaaatgaaattgcagagctgttccaaaacaaaaatgtaaaggccctttcacttactggccctttctattgaaaacaagaaggaatttaagagtagtgttattgttgttaacgttttcactgtgagacaatttgagggatttactttgttatcatacatttgacatcgtctcaactcctgttccaatcacagaaatgcctccaaataaaatacctgccagtaattaaaaacacattattatataattatcattattccttcaaagggggtgggaggagttattagtgcagtccttgtgatttttctctaagtttgaaactatttcaaaataaacttctttaaattgcatatccctttcttgaaatacagttaaatgaaaagcctaccaatagttaaacctttaatgttatgagggataatattatcattactagtaaatagggttaaccccaaacaatggaaactggtttgtttctaggcagaatgctggatcccagcaaccagggaggaaacaggtcatttgtctgcagtcgccattctgtgaaatccactcggtagcaacagtcaatggatctcccagtggaattgcttatcacctagcaatgtattggttgtaaataatccagtcacaaatgtattctcttcaatttacatatacttgtggctctaacaaagagaagtcatcattctctagtgtgcaaatgaacacagcaagaagcacgattggatgagtttgtttttctttctaagctggggcatgtgaatccacacattatcacatgaaacagtgatatgcattaaacagaaatttaaaaacacatttatatgtttattcttcccgggttctccatgaaataagcagtaattgaatcctgatatctgcttttcatatatgtttttaaagtgataattcagatttaatagcaccaataacaaaacagtgccatgttccagttttacgctagagggatcatccaccagcatttattaattactaatgtcttttcttgacattcttctcttcaagtaaaattacagaactacagaagaaaacctgagaattggagcaagtgttctcttggagaacaaagccctcagatcctacaaaattagttttatgaagatatacagtaactgtcttggtcttttttttctgttgtttataagagaattcctgaaactgggtaatttataaagagaagaaacttatttcttacagttgtggagctgaggaatccaaggtcaaggggccacatctggtgagatccttcctgcaggtgaggactgtctgaaaagtcctgaggcaaggcagggcctcacctggcgaggcagtcgtctgtgctagctcaggtgtctcttgcccctttttttatttttatttttttattttttttttgagacggagtcccgctctgtctcccaggctggagtgcagtggcacgatcccggctctctgcaagctccgcctcccgggttcacgccattctcctgcctcagcctcctgagtagctgggaccacaggcgcccgccaccatgcccggctaattttttgtatttttagttcaggcagggtttcgccatgttagccaggatggtctcgatctcctgacgtcgtgatccgcctgcctcggcctcccaaagtgctgggattacaggcgtgagccaccgcgcccagccgtctcttgcccttcttataagccacctgtcccacttccatgatagcctattcatctgttaatccatgaatggataattcattcaagagggcagacccctcatgatccaatcacttcttaaagggcccacttctcaatactgccacattggggatttagtttcaacatcagttttggaagggacatccgaaacacagcagtaaccaatgagaaaatttgctgctaggagaggcagcccccgtgtactggggagagtgactcacttattcaacctgcatgtcaaatgaatgtgatcgcaaacattcacacacacacacacacacacacacacacacacacacacacacacgtacatacagtcccattggatccaatagtacactgtcatcttaccgtttcatcatgaatggtttaaacatttattttcagggtaaaagttaaaattgtcctaaatcatctacttttttagtacagtgaacgtttcatgcaaattgtttttatgacggaaatttctgtttcacatcagtttcatttcctgtttggtatgttctcaaatgtgccatagcacatgaatgtggggtcactgctcagcctttcctacctactcaccctcgccaaggtggcatctggtagtgagggaggctcagcactttccagtctcaaaccctgggactcaagcagtttctgggaatgatacgatgtattcctttcttaaggcggctgcaacaaagcaccctaaactgggtggcttaaaacaacaggaatttattctctcagagtggtaggggctggaagtctgaatcaagatgycagcagggccaggctccctcctcgcttgctgtcaccagcagcccttggtgttcttggcttgcagctgcataactcctgtctttaactccatcatcacgcggtatttccccctcctgtgtctccgccacgtcatttccctgcttcttgtaagaacgccagttacatcggatgaggacccatcttaatgacctaacaatgttgtcacaaattttaaaagttgaaaactcccaggcagtgactaatgggcaaacagccaaagctgaagaatttagagaggagaaaacagtaggaggaataatayatgatagagtgttaactggattgcttctgrccaaaagtagagataaagggtcaggcatggtgatttgcacctctagtccaagcactttaggaggctgaggtgagaggattgcytgagcccaagaattcgagaccagcctgggcaacatggctaaaccctgtctctaccaaaaatacaaaacattagcccgatgcggtggcacattcctgtagttccagcttctcgggaggctgaggtgggagaattgcttgagcctgggaaattgaggctgcagagagctgtgatcgtgccacagcactgcattctgggtgatgggartgagatcctgccaaaaaaaaaaagataaggcattattttctgagatcagcaaagatagtttcttctacatttatgcccgtcctaggaaggacataggatgagtacagagttcacaggatttcacagataataaggaaaaagatacgaccttggagtggcagtaacaaacaatgagttttattcggacagtgctttagcaggatcacaggtgaggagaagtccctcacagcatgagaccttccagagttgagggcacagagccagaaaagaaagaggacaagagtactctggcagagagcaggcagacaggaagggaggaaagagggagggagggagggtaggaacgaaagaaggaaggaaagaaggaaggaaggaacgaaggagggaaggaaggaagggagggagggagggaggaggtaggggagagagggaatgaaaggaaaaatggaaggaaaggaagagaggaaggagggagggagggaagaaaagaaggaaggaaggagggagggagggatggaaggaggaagggaaaagaaaggaagaatggaaggaaagagggaaagaaagaagggagggaagggaaaggaagggaagggaagggaaggcaagggaggggaagggaaggcaatgcaacagctccagtggaaaattcaagtcctccttcaactgcatccaaaaataataatttttactagatacctgatgtagagaaggcataccctgcccagatacagkagaatctcccaaaagtggatgacaagatcagccatgactgtgaagagatggacacctacaaaatacaaaccaaaatgctttcagaaaaatttgaaagaatcacaggttattatcaaagcagcttatttcccatgacagaaaatcccatgacaatgagttgagagctctgttggctaagacacatctttgtatcttaagaaaaggaaatgcgggccagacactgtggctcacgcctgtaatcccagcactttgggaggccgaggtgggtggatcgcaaggtcaggagttcaagaccagcctggccagcatggtgaaaccccttctctactaaaaatacaaaaataaaaataaaaaactagccaggcatggtggcacatgcctgtagttccagcttcttgggaggctgaggcaggagaattgtttgaacctggcaggcagaggttgtagtgagccgagattgtgccactgcactccagcctgggtgacagagcgagactccacctwaaaaaaaaaaaaaaaaaaaaaaaaagaaaagaaaagaaaaggaaatgcaacttgttgactaggtagtgtgaagataaaataaaaaagaaaacgcatatctgacaccaaaaaaaaatgaagaaaatgtaaggttttcaaaaatatacttatgtccctggtgttgcaaatggggtatttggcagaaggaccaccagggcatcctccggatgtccacatccccaaagaaagaggagcaccttctaccataaaaaagaataagatcccatcatttgcaacaatatggatggaaccagaggtcgtcatggtaagtgaaataagccaggcacagaaagacaaacattgcatgttctcacttaatgtggaatctaaaaatcaaaataattgaactcatggacacagaaagtagaaagatggttaccagaagctgcgaagctagtggggagttgaggggaggtggcgaaggttaatggttacaaaaaaaatagaattaataaggcttacttttgattgggtgactatactaaataacaacttaattgtacattttaaagtaaagagtgcaattatattgtttataactcaaaagataaatgcttgaggggatggataccccattctccatgatgtgcttatttcacattgcatgtttttatcaaaacatctcatgtatcccataaatttatacaactattatgtactcacaaaaaaatttataaaataaattaaaaattaaaaagtattttaaagaggaacaccaagctgtgactcatgggagacccagcattcctcccaaggtcaggatcccaggagaaagaggcctccctcaggtcaactccaccctgactcaacagatccttcacaaggtccacaaagagcatgacctgatgctcctggtgctggctgccacagctcaggaccttccttctattcaacatgaccactagaccacagttccactggtccaggccctggtcctccacctcctccccttgtcagacctcagatgtttagagagtcttaaagggacaggtcctaagaaaagaaacctctgctcttcccctgttccagaaatccaggacacaattgcctaggaatccttttcaccagggagcttccctggctggacacatcctccccattctcctctggccacaagaaatgttggacaccaagcactgtccactcagcctgaaaacgaaagtgagtcacccctggatagatcccacctcccactgagcatgctactacacaaccacaaccacaagagcccttttcctctgctctacaataattttcatattttctattttagttttattgccagtgagtgattatatcatgtataagatgaaaaaagacaggattctgcttcataatgtgctctgcctgtagattatttcaataacaacactaataaattaattacttccattttattctatttgtaagtagcataattacagttttatgttgtttttagcaaagcctctaaaataattcaggaaaacagcaactattttattccaacttactttttaaataattttatttgtttctctattggttttattgccataatttaatgtattaataattacacatctcgaaagaagacctgataggattacaatgtttaggattgcagttttaaaatgtgcatgatgtaaatgcaaattatatttaaccctgagagcacaagcttccttctcaccccaaactcccttggggtgtmcaccgggaagccaccttaaccttgactctgaagggtgtctcaagtgggtttacaggtcaaagccaacactcttcagtgaggaccagccccagacaaaattatgtgaacacttttcgaggatccctgattctcttccctgttctgtgtcctctctgccccatcacaagcctggactgagagttggaaggaccacaaaggctaagtaatcaaccctttccctatctcctccctgaactgtctcacctttacgactgtgaggccaatgtcagcatttaaaaaccataaataagaccatgggccatgctgctcaaagccctccagtgcctacaacttacactgagactcaaatctatgctctcctggcccatgaggttgtccatgccctggtccttgcaggtgtatacctacccaagcacctcctgtgactccactgaccacgattttgtccagttagcatggcaggctcactaagtctcagaattttgcactgggcatttcctctgccgagaatacctttacaccacatatgtggtggctgcctccttcatttagataccaactctaatcacgtcttcttaaagtgccctttcctgaccactgtagcttagtgatggtgcttcctcatccctctctgatatggttaggctctgtgatcccacccaaatctcatcttgaatcccccttgtaatccccataaccccatgtgttaagagagagaccaggtggaggtcattgattcatgggtgcagtttcccccatactgttctcatgatagtaagtgagttctcacgagatccgatggttttataagtggtagttcttcctgtattcactatccctcctgccaccttgtgaagaaggtgccttgcttcccgttcaccttccaccatgattgtaagcttcctgaggcctccccagccatgcagaactcagagtcaattaaacctctttcttttataaattactcagtcttgagmagttctttatagcagtatgagaacgaactaacacattttctattcctttggtccgatttattacctcatagcactcatcctttctgaatcatcatatttctgtgtttattccttgtgtattttctgcatcatcctctgcaccatatgggctggtgtggcagagagattatcttactccctctgggtagcacaagacagccactcattaatgcagtttatatagaaggcaggggaagctcaagtttgtgggaaaagaggaaagaggtgttaaggaaaaagacatggtaggatagccactggcctcctgcaccacagtgttgagcagggaagacctttggtgcttttgtgttaatggaaaagctactggtcctcagaggctgagattatttcactgacttggattgtccttaacaatacaaaggacctgcaagtgcttaacaatcagctcttccctgggtgtcatcgataatattccttaggcccacaactcacaaaacacaggattcctctccccatcccatttataaaactggactcggggttggaaaagacctcagacaccaagctgccagccttcctgtgttgccccctctgatatggtttggctctgtgtccccacccagatctcatctcaaattgtaatccccatgtgttgagggaggtaagtgattggattataggggcagttttccccatgctgttcttgtgatagtgaatagattctcactagatccaatggttttataaatggtagtttttcctacactcatacatactctctctcacctgctaccatgtaagaagtgcctgcttccccttccaccatgattgtaagtttcctgagaacttcccagacccagacatgcagaactgtaagtcaattaaacctctttcctttatgaattacccagtctcaggtatgtctttatagcagcataagaacagactaatatacccttcttccttctggatgacaccacccagtcaatccactaacagatgggtctgatgaccatggactgactagaactctggcttccttcagggcagggccaagatagttggcccagaggcacagaccagagtgtaggcccaatttcccatgactgaccctatgaaactgagttatgttaccactgctgcatagcagggctgccgtgagacttaaacacagtattgggttttccaggtgccttcaattcagattctgcagctggaagtgagccagactttcaagaatctgagagtttccaggcagagactctcgctccttcctgttccctctcctcatcaagtgacacacttgtcccactagtatcagtcagggtttatttttccccatcccgaactatctccccaccccatctcacctacataaccatgcatccagcataatttttcaataaaatacatgagatcatgagaccacggttctcaaagccctcccgtgtctccaacttgactgaaactcaaatctgtgctcctaactctcctcaacgataccttacatgccctagttcttgagtgtgtctgcccaagcccatcctatctgaccactgaccttacctctgtttccctaacataccaaactccctttcatctaaggaccctgcactatttcctctgccaagaacacctttcccagataggcgagtggctgcctctttcatttagacacgagctctgctcctattttctgaagtgccctttcctggccaccacagactagtgatgtgcttactgtatccctctttaccttcaccctatttatggcctcgtagtgctcatcctctctaaaatcattttgtttccatggttttccctcatgtattgtctgcattgcccgctcaactgtaaaggttgttaaggcagaaggtttatctcagtcaccactgagtcctctctcctgccttgcacatgggaggcactcattaaggctttgggaaagygagcaagaaatggacaagtgaatccagtgagaagacctctgagatctcagacctgcccacacatcagagtaaggctgttcagggcctcccagggcaggacccatagacctgggggtacctccttggcacctacctaggctcccaactgcctgaacattccttgagacactctggctttttcctagagtctgtaccaccctcatatgtgggtttctcactggctcctttgtgtccagcccctgccagtgagtctcaagattctatgtcagtggggatcatggggatgaatggtaaggccagttgcaggtaaaagaggaagaagatgcttaaaaaaagatagatggttgggtagcaaatcgcttgctgaaccacagttgagcagcaaagagcttaagggtttttgtgtttaagaaaaggcctctgaaccccagggatcgaggccatttgactggtttgggtaattcctagtgacgaggccgccatgcagaggcatttatcagctcttgcctgattgtgtttgcaaatatttgtgaggcacccaatgcctgaagcacagagtgtcatataaacttacgcaatgttttgtttatcccagttaacttcccatatggttaatctctactacaggaattacattcaaacatgaggaagctggctttcaaacaagctctgaatcacacaacttggagaagtggttgacagctcaggtgcggagccagatgcctgggaactagtctcattctgcaccttacctgctgtgtaccttggacctgttacctaattaacatttgggttccttgactttctcatctctaaaataaatgaaagtcgtacaggctaaatgaaatgaattcattttaaactcttagcacatgttaaaccctgtgtgatttgctgtttttagcatcatattcttttttattgattgattgatatggagtttcgctcttgttgcccasgtgagagtgcaatgccgcaatctcggctcactgcaacctttggctcactgcaacctccgcctcctgggttcaagtgattctcmygcctcagcmtcccaagtagctggaattacaggcatgcaccaccacasctggctaattttgtattttttagtggagacggggtttctccaggttggtcaggctggtcttgaactcccgacctcaggtgatccttccacctcggcctcccaaagtgctgggattacaggcatgagccaccacgcccagccagcatcatattctaaggtgatgataaacttggcattgaatccaggacctctgctcccacatctttttcactttccatgatctgaaaatttgctgttctttaagctgtgttcacctggtacactgtttggaaacatggagattatgagggactttcatggtgagaaattgtaaatatcattcgcttgaagaagggtccctagtgattgtgagtatgcatctgctttgaccagttgtgtgcaggttggaagcatagaccatgcctttcaaggggcagatccaagccccagtgggcacaggggaagggaagggctcagcgggaagtcttgaacgccagatggcaaaaacacccccagggctctggaaaattaagggtaaaggggcatttcaggctcactgtgagtgataaagaaatgcaggcaaagtcactaattcgtgcaaccccaattagaacgccaagggcatactttctgggtattggcaaaacgtggagctcactgtcagaataaatgggagggtataattaagggaatgttggaaataaagaaaaattcagggcttctctggaataacagctgaaacccagtgagtgctcaaatccagtaactcatgtcaccaccgtctgagtatcatataatgccatcatttgactctgagcctcttttagtgttcagaatgcagtgattttttctgcctcacaactggccatgggaatgctgcagaactttacagagacaactcactgctcggtgtgggaacttgataggattataattttcagatgatgctctgtaactgtagattttttcgatgtgacttatttgtgcttccatattattacattcgtagagagtagcagagtgacagtattttgtggttgctaagaagtccatgaaaagagtccagaaacagaattttattttgtctttcttctaaaatgatttagactttcttccctcttctgctatgtatcatggctagtatttcagtagggacaggattttggttgactccctttaacaaggccctataacaagaaccttagaaagaattttacatgagtagtttcacaactagaaagatttggaatgcatggctctgttcattcattgcgattcaccttaggattgaggtgaaattagcacctagattacagtgggattggaagtcaagaaaggaagcttgttcagtgaaaactacatactattgtagccattcctggtgcatttggctccaattcgaggctacgaagctgcagcctagaggtcactttgaacttgcgcatagcagtgctgaatctgcaactgccccagtgtgtcccgcatgcatacacacggtgctcctatggaccttactcagcagtggctcttgatcagcacattatggatccatgccccacacaccatgaacacaccccacagtgccatgtttcccatccggttgggcctgaggagggctgcagcccctgttgtagtttggagaggatcttccttcttgatggcccgctagtcggtgttgaagtcctccaagctgcagctcctaagggacaacagtgtagatgagccatgtagacacctctgaatgttgaaacttggtgtattagtcagggttcttcagagagactgaaccagtagggtggatggatggatggattgattgaggagagagaggatatttgttagggcaattgggtaatatgattatggaggctgagaaatcccatgacaggtcgtctgtaagctggggaccctggaatactccaggaagctcagtccaagcccaaaggcctcagaaccagagaagctaatggtgtagctctcagtccaaagccaaagacctgagaacccatggcgtcactggcataagtcctggagttcaaaggctggggagcctggagttcagatatctgaggcaggaaaggaaataaaataagtggagagagagatcaactcttcttttctctgtttttggtctactggggtccccatcctattggatggtgcctgcctacactgagggcaagtcttcccccacttaattcactcagacacatatgctaatctcttctggaaacaccctcactttaggtattccttcatccagtcaagttgacacctaaaattaaccatcacacactagggatggaggacatggctttgcggcctcacaaccttttttctaaggaggcctggtcccttatattgggaaatgaactttagaaaccaacaagcgagtaccagctgtgctcattactactgaggtgtcattgtttccagaactttttaatagacaaagctattaaataaacacacacacacacayacacacacatatacacacattatgaattcgtactaataaccctaattccagtcaataccctgggactggtgctctcttccctctttcatatctgtatcttctttttccaataaaggggccctatttcccaacaactggaatatatttaatcatgcactaatttatataatacatataaaagacatttcagtggctcacatctgtaataccagcactttgggaggccaaggtgggcagatcacaacgtcaggagtttgagaccagcctggccaacattgtgaaaccccgtctctactaaaaawacaaaaattagccaggcatggtggcgggcacctgtaatcccacctatttgggaggctgatgcaggagaatcgcttgaacccrcgaggtggaggttgcagtgagccgagatcatkccattgtactccagcctgagcgacaaaagtaagacttmatctcaaaaaacaaaaacaaaacaaaaaaaacacttcagaattgctacattcataccccttcaaaaaacacatctatcaagtgtccttaggaattcttgaggttttttttttttttcattcaagaaacattaatgatttaccaagaaccaggcgctgtaagaggtgtctgctttatctcatgacactcaggtaaacactgaagtcattatttttattgcacagataggaaagcaggctgggagaggtgaaattaagtcctgtggccctgagtaggcagtaacagcattcataatgtcagactcagatctcgtaactgtaaatagcatcctcaccactcttccccggctgccctctctgttagcttcccagcaggggcttcagaaagctgaaggaaagcagcctcaaattggacttcataaaaggctgcattgtgatggttttcttagaagccagggtttggctttacagtgttagaaattcaatatctgaccattccacttgtccagggtgaccaaatgctagaaacagtcattcttcctctgttgtagccaggtgcacgcatatcaaagattaggcaccagaaaatgaacattaattaccaaagtgtggcttgcagggcacaagacccaaacaaaaaaaaggttggttgatcttgaggaatgtgggatctggactattctggagcctgttggttgattcctgttgcccaagaaaaaccctctccaataacttttcaataactagacacttacttacaatggtcaggtttcatctctgcctgcctgagacagctccagaggacacaccacaccaaattctgttctttgtctactcctccttttattaccagggcagccctggagatatagctgagaaagcttattattttcttaaacaatagatagctaagaaagctcattattttttcttaaacatgttttttttttctattctctttatttataggtgtgtttgcttaaaagaactccagatgccccagggggctgcaggagcttcaggacccttccccagttaccaaaggacaataaatcagctcaaggctggggcaaactggaaccagcaactgcttgttacctttagatcattaacatgtcctcataatactaaactccccacccayaggagaaaatcaccaccattttctgaatgtacctggtatgaaaaggcatgtttatgagatgcaccttcatgtctggggttcctctcttcacatgattacatacctccccaccccacatctaactcctcacaattccccagcttcccatctctagtggagaagctgtttttattttattgattgattgattgattgattgagacggagtcccactctgtcacccagactggagtatagtggcacacctcagctcactgcaacctccacctcccrggttcaagtgactctcatgcctcagcctcccgagtagctgggattacaggcacccgccaccacacctggtctgttttttttttttttttttttttggcagagagggggtttccccatgttggccaggctgrtctcgaactcctgacctcaggtgatccgctcgcttcggcctcccaaagtgcttggattacaagtgtgagccactgcacccagccggagaagctgtctttagagcaaaagctctctccttctccattctccaataggaataaaatctacttgcctttacccaacctctcccgmaattgaatgttctttctttgcaacagatactgagtagggaaagaactcagtttatcaatgacattttcccttcctctttctcctttttggccatccttcctccttccctttcctttttttcctcttcctcattctttttagattccatggtggctatgtcacttctgtttgtatttgtcccttccagattttttaaaacagattttttcctaatcttaaattctggagaggctcattaatacacactgacttgtgacacctgagaaacattctaatttatgttagcgatgagcagggatttcaagggaagagagtgtaactgcccaatgggttcaccttgcctgctgcctagatagagctaatttatsaagatgggggaattgcaacagagaaagagtaattcacgcacagccggctgtgtgggagaccatagttttattattactcaaatctgtctccctgagctttggagatcaaaatttttaaggataatttggtagaggggcagggcaccagtgagctaggagtgctgattggtcaggtcagagatggaatcataggcagtcaaagctgtcttacactgagtcagttcccgggtggtggccacaaaatcagatgagcctgtttatcgatctgggtgatgccacctgatccatcaagtacagggtctgcaaaatatctcaagcgcttttcttgactgtacaatactgatgttattcccaaaagcaacttgggaagggtcagaatcttatagcctccagcwgcatgactcctaaaccataatttctaatattgtggctaattcgttagtcctacgaaggcaatctagtcctcaggcaagacagaggtttgttttgagaaagagctgttatcttctttgttttaaactgagtttctcccagtgttagtttggcctatgcccaggaatgaacaagcacagcgtggaggttacaagcaagatggagttggttaggtcacatctcttttgctgtcttagttataattttgcaatggctgtgtcaagagtagtgtctcttgattgggtgtcctctactttttctgatccatatttcttatcttcagttaaatgatatctttcattattcttgaaggatatataataatttctcagggaattctggtaggaggggtgaaattggtcacttgtaattagaagtagtagtgggagaaagaagattgacagtggaagaggcatggtacaaatatctcctaaattagctcttgtgaatggagaagggaatatttataatttctagtaagagtgtagctgaacccagatttggccacccactgctggaaaattcagataacaagcaccaggatggtaaaaagaatgtgacttttatttcaaaacctagctgaacggaagcagtacagactcctgccttaaaggaactgcttcagctttctggacagaaagcaggggctttaaagggggatttggtgtgaatggcatgcagggtaggggacaaggagatgcggggtctacatgacttgctttaatgtcttatctatcagatggtctggctgatgccatcgtgggcagagctaggttgtaaattgaccattgtctcgagtcaatctgctgggggcaggggagagtcacagagagtgtctggtttggttcaacatttggtcctcagaatttctaagcaaacatataattagataaacatgccatgcagggagtgcctggtagagagaaggtaaaggttataattgcatccctaaagaactaacaggtgaacacacagggaaaaagagaaaacataaaaataatttttgggaaaatggaggctggtcacagtggctcacgcctgtaatcccaggactttgggaggctgaggtgaggaaatcacctgaggtcaggagttcgaaaccagcctggctaacatgacaaaaccctgtctctactaaaatacaaaaattagctrggcatgrtggcgggtgcctgtaatcccagctacttgagaggctgaggcaggagaatcccttgaacctgggaggcagaggttgcagtgagccgagatcatagcattccactccagcctgggtaacagagtgagactctgtcttaaaaaaaaaaagaaaagaaagaaaagaaaaaaaagacagaaaaagaaaaagaaaaattgggtactcggttacaactccttactgtcaaattccattcaattgctatgggatttgggtgtcatattcattttgactactttctgctgaaagggggtatagctatagggcatcgaaatggaatctgcttgcctggagttggaaatattctcaagcttacagcagaatcttgctgaagcattatggtgaggggacccaagggtttctgtggacatttgtcttgcatccccatacagagtgtataacagcaataaaagccacagaagctggacaggtcactgtgcagaatataaattatataatagatataagtcttccttgcactaggaagccgactacataatagggtcctgatagggggcatctgtaacagaaatatagaaatctattgcatgcatagcttgagttataatgtgagaataatatggtattatatataatactcagccttaattaatgcacaagtactgccctgggcggcagtcaggctatctaaagccctatgacttaacaacattatgggattagacatggcattagtttgcttgtgcatgtcttgtaggactgaggatatgtttctggagtcatctgggaagtacacacagcatttagtcttaattatagtgcacggtcccaactgtaaattgtaccctgagttcctggggggatatgacaacaggttgattaaatatacatatttaacaagttataggagaagttataaatattcatgaaggtggtcctgacacatgtgtattgaacaaatataacatatgactcatgtttattttgggattgagacttactatttaaacgtatttctattaggccttttatgtcaaaaaggcttttcaggacataaaggcatgcaggtgtgacttttctgtaaactagacagaactggtccatggtcagtggtcttttatcaggagaaagttactgacattagttccttgtctaactaaagccgtacttatggctggaggaacaggggctgagaattagtcatcttattttaaggccagtacttatttgactgctagagaagagaaagtttgtggcaactgtaaacatagtttacttttttaagggtaggagtgtgtgacttccccttgcctagcatggtcttaggtcttgtttataatgtggtattttattgttctaaagagtctgttttgcagccttgtagtttttatttcaatattaatgctaatcagctgtgcctgaattcaaaaaagtgagggaaggtttagcaaggagtgtctgaccatcccccacaccaccatcacttctcatcatggcctgaactagtttttcaagttttttaggtggggaggttcccctttggccaagaaggagttaaggcaaactaaaaatggcctgagaagaactccatacttctatatttgagtccttgtgaaggaactgtaacctaacttaatagttagacaagattgaaaacctaacttaggagtatgcatctgtaacagtagatgagtcttggccaatcccagcagccatacttcaamsactcatacgctgctgagtgttcaaactgtgttcaaataattcaaatgccaacctgtaaccaatccagctgtttctgtatctcacttccaatttctgtgtgtcacttccctttttttgtctgtaaatttcttctgaccataaggcatccctggagtctctcagaatttgctataattgtagggctgcctgattcacaaatcattcattgctcaattaaactccattaaatttaaatcacctgaagtttttcttttaacaagggaaagcccattcagtcaggggggtttcagatttttgttttgttttgttttgtttcgagagagggtaccactctgtcatccaagctggagtgtagtgacatgatcatggctcactgcagtcttgacctcctcagctcaagcaatcctcacatctcggtctcctgagtagctgggaccacaggtgcataccactatggccagctcttttttttggggggktgggggggcagagacagaatctcactatgttgcccaggccggtcttgaactcctggttcaagtgatcctcctgcctcagcctcccaaagtgctgtgattacaagcatgagccaccaaacccagcccagcctgaatttttttttcagtttctattcccctcttttgtcaagatatgccagaggcagtaccaatggccaagcttttattttgtcttctattgatgctgcagtggtgtgctaccttccctgtgtagcatatcatgtccctcagcaggacccctgtggccaagagacttaagagtcaaaagacttatcaccaattaaatgttctaggccagttggaaatggaggtgggaaggcactcattacccttaaaaccccttttatgcaatgtaagagccaaaaactaaaagcaaaaaggccaggttataaaattggcgtatctataaattttatgcattgaactattgtaatcttggcttgtaacaagtagctgtacaaaacataagcattttcgtttagctattcaggtacctgtgtgcccattcttgatttggagggtctgaattaattttttccctcaagatcagcccttaaaatctcacacatccaccttttccacaatcctccctgggcttggaaggattgaatagtttcacattttggaggtaagataaaaccttttaaaaattaccaacattttaaacaaaaaggtcataaaccttgcctagttccaagaatgacaggaaaggaagcccacaggtagctaaatatttaaattatattatttcacatacaggcaaaattattaagcaaatcttaattttttggatacagacccttccctatgtctcatgaaagcagtttactttgtcacctttgcccaggtttaaagatgaggcttcagttgacttgagtttggtgtcagatactggcaggagttggtgccttctttagaaatgatacgtgtatccagaagtcaaagctctttaaattaacagcacaaggattagctgatagcaccttgatgaggactttttcaaggggttggaggtggtgatactggagttcatgacctgactggaagctgtaaaaatattttataaccttgcagtgattcattggtaaaactttgctaaaccccagcaataagtcagtaatttaatttaggattcaattttgaagacgtctatcaaagacgttaaaaagattaaaacatatgctcaaaacagaaccacaggttcttgtaaaacaatagttattcatttatccaaagtgataattaaaagactttaaaggcaatacagaaggttacatgggtataaaaactaattctttcaaatctcaggggatttttaagcaattaaaaacttaaagacaacatatgaggccaggtgtagtggctcatgcctgtaatcccggcactttgggaggccaaggtgggtggattatgagatcagaagatcaagaccatcctggctaacatggtgaaaccccatctttactaaaactacaaaaaattagccaggcgtggtggcacacayctgtagtcccagctactcaggaggctgaggagaatcgcttgaactcgggagacggaggttgcagtgagccgagatcacaccactgcactycagcctgggtgacagagtgagactctgtctcaaaaaaaaaaaaaaaaaaaaaaagacaccatgtgaactatcttgataaaatgtaaaatcttatctttaacccagttaccaaaaaggcaaagaaaaaaaccttcttcagtgtgactgcttctcctcatgggaagccagtttagataatctggaagacaaacttgatttaaaaactacttggagttaattggacacagaaagaatgtgttcaagtttatgaatatagcagggaaatacatgactcttagtaattgcatgagaagtttcctgattatattgaaaattgagacacatcaagaaaagccaagcgtatagaatcaagttatgctagaggaaaacattgattttatggacctctaagataaaaatatttcagcatcaggccacaacaacagttggaaccagaggagaaaatttacaggagctgatgaaaaagttgaaggaggaagttatcatctcagaccattttaaggggcaaaaaaagctgaaagcagtgaaacaacaggtgaacttttaagatactaatctgagaagtttttttwaaaaaaaataggttgtagaattgaaacacaaaatttcttgtaatcttataaagggcaaatcaatatcttaagaaaatgttgctttaacrtaggggaatgttctttagaaagggtattataaataattccctgttaattagagctaaattaatcacatacaaaattccttttttaaactccccttcatgaactttatcacaacttacaaagaccatctgtkacatgcttggactttctgacttgccctatgctacctctttcttaaataaccagccattttactttaggacaagaatttaccatacaagattgtttctcagataaaagtactcattttctttacaatcttccttaccaaaaasacatcttcatatccctatctttcttcacatctctctcccctacttactggtaactatctaccttgtttcataaataacmttttcaaatccataattcaaatcaactcttagataagttttgaattagacaaaattattctttttctcaataagaacacatcttctttgacatattttacataaatctgggaagcaagaaaccctgaactccctaatgaatattaacattttataaatgacaactatttcacatataataactgtttcttaattggaaatgacccagatatccgataagcatcctaaatgcttttaagattttaaactatataaaaagttcatttacaagcatttatctaatttacatgtactcaattcttccatttttaatagcgtatctagactacttctgaaaactgaactgttacacaaaggtaattatattcatttgttctcttattgttgtaaagaaatacctgagactgggtgatttctaaagaaaagagatttaattggctcarggttctgcaggctstacagraagcatgatgctggcatccgcttggcttctagggaggactcaggaaacttataatcatggcagaaggcaaagggggagcaggcacattacatggccagagcacaggaaagagagagagcgaggagaagccacacacttttaaatgcccagatctcatgagaactaactgtcataaggacagaaccaagcagttggtgctaaaccatttgtgagaaacctacccccacgatcaaatcacctcttacccagctctacctccaatactgggcattacatttcaacatgagatttgggtggggacacatatccaaactatatcagtagtcattatttaaatttgctcctctgttcaccatttttaaagcctgtgaacataagatgtttatctaaggacaacaagttaaacatccaggcattttgtcaataactaagaagatttaactgttttcattgaacaaataatacyaaattagtcttattcatcaaaaaaaatcacataaagattattctggttttggctgggtttatagtcttataacatttatatatcaaaccctgacatcttaatatatgacaatacaaaacaatttggtcaataaactcagacaaaaatatgtgttgacaattatgaagacatatctatttttatctcaccaatattcttaaaactaagttttatttatcaaggattactaaattcacatgaacttgaaaagcatttggacttaatttatgagtacttacttacttataagccaacttagtagcatgctgaacacgaaatacaatatatgtacatacacataaatgtatctaaacacatatatacacacacaaaggtccaatagcttttactttggaattctagctaaaaatacaaactcaccattttataaaagatagctagatccacattattctttgatgaaattgaaacttgtttaaatggctgaactttgtttgccacaatatataatccaatgaaaactgtgaaccagggggtggagccaagatggccaaataggatcagctccagtctacagctcccagcatgagygaggcagaagaygaatgatttctgcatttccaactgaggcaccgggtgcatctcactggggattgttggacagtgggtgcaggygagtaagtgcagtgcaccgagcctgagccaaagcagggcraggcattgcctcacccaggaagcacaaggggtcggggaattctctttcctaggggtgacggatggcacctggaaaatcgggtcactcctaccctaatactgcgcttttccaatggtcttagcaaatggcatgccaggagattatatcccaygcatggccaatggagcctcgctcattgctagcacagcagtctgagatcaaactgcaaggtggcagcaagggtgggggaggggcacaygccattgctgaggtttcagtaggtagacaaaacatctgggaagctccaactaggtggagcccactgcagctcaaggaggcctgcctgtctctgtagactccacctctgggggcagggcatagccaaacaaaaggcagcagaaacctctgcagacttaaatgtccctgtctgaaagctttgaagatagtagtggttctcccagcatgcagctggagatctgagaatggacagattgcctcctcaagtgggtccctgacccctgagtagcctaactgggagataccccccagtaggggcagactgacacctcacacggccaggtatgcctccgagacaaaacttccagaggaacgatcaggcaacaacatttgctgctcaccaatatccactgttctgcagcgtccactgctgatacccaggcaaacagggactgcagtggacctctggcaaactccaacagacctgtagctgagggtcctgactggtagaaggaaaactaagaaacagaaaggacatccacaccaaaaccccacctgtacgtcaccatcatcaaagacgaaggtagacaaaaccacaaagatggggaaaaaacagcagaaaaaccggaaactcaaaaaatcagagcccctctcctcctccaaaggaacgcagctcctcaccagcaatggaacaaagckggatggagaatgactttgacragttgagagaagaaggcttcagacaatcaaactactccaagctaaaggaggaagttcgaacccatggcaaagaagttaaaaaccttgaaaaaaaagattagatgaatggctaactagaataaccaatgcagaggagtccttaaaggacctgatggagctgaaaaccatggcagragaactacgtgatgaatgcacaagcctcagtagccgattcaatcaactggaagaaagggcatcagtgatggaagatcaaatgaatgaaataaagcgagaagagaagtttagagaaaaaagaataaaaagaaatgaacaaagcatccaagaaatatgggactatgtgaaaagaccaaatctacgtctgattggtgtacctgaaggtcacagggagaatggaaccaagttggaaaacactctgcaggatattatccaggagaacttccccaatctagcaaggcaggccaacattcacattcaggaaatacagagaacaccacaaagatactcctcgagaagagctactccaagacacataattgtcagattcaccaaagttgaaatgaaggaaaaaatgtgaagggcagccagaaagaaaggtcgggttacccacaaagggaagcccatcagactaacagcggatctctcggcagaaactctacaagccagaagagagtgggggccaatattcaatactcttaaagaaaagaattttcaaccagaatttcatatccagccaaactaagcttcataagtgaaggagaaataaaatcctytacagacaagcaaatgctgagagattttgtcaccaccaggcctgccctaaaagagctcctgaaggaagcactwaacatggaaaggaaaaactggtaccagccactgcaaaaacatgctcaattgttaagaccatcgaggctaggaagaaactgcatcaactaacgagcaaaataaccagctaayatcataatgacaggatcaaattcacacataacaatattaaccttaaatgtaaatgggctaaatgctccaattaaaagacacacactggcaaattggataaagagtcaagacccgtcagtgtgctgtattcaggaaacacatctcacatgcagagacacacataggctcaaaataaagcgatggaggaagatctaccaagcaaatggaaaacaaaaaaaggcaggggttgcaatcctagtctctgataaaacagactttaaaccaacaaagatcaaaagagacaaagaaggccattayataatggtaaagggatcaaytcaacaagaagagctaactatcctaaatatatatgcacccaatacaggagcacgcagattcataaagcaagtacttagtgacctacaaagagacttagactcccacacaataataatgggagattttaacaccccactgtcaacattagacagatgaatgagacagaaagttaacaaggatatccaagaattgaactcagctctgcaccagatggacctaatagacatctatagaactctccaccccaaatcaacagaatatacattcttttcagcaccacacctattccaaaattgaccacataattggaagtaaagcactcctcagcaaatgtaaaagaacagaaattataacaaactgtctctcagaccacagtgcaatcaaactagaactcaggattaagaaactcactcaaaaccactcaactacatggaaactgaacaacctgctgctgaatgactattgggtacgtaacaaaataaaggcagaaataaagatgttctttgaaaccaacgagaacaaagacacaacataccagaatctctgggacacattcaaagcagtgtgtagaaggaaatttatagcactgaaagcccacaagagaaagcaggaragatctaaattgacaccctaacatcacaatgaaaagaactagagaagcaagagcaaacacattcaaaagctagcagaaggcaagaaataactaagatcagagcagaactgaaggaaatagagacacaaaaaaaccttcaaaaaatcaatgaatccaggacctggttttttgaaaagatcaacaaaattgatagactgctagcaagactaataaagaagaaaagagagaagaatcaaatagacgcaataaaaaatgataaaggggatatcaccactgatcccacagaaatacaaactaccatcagagaatactataaacacctctacacaagtaaactagaaaatctgaaagaaatggataaattcctggacacatacaccctcccaagactaaaccaggaagaagttgaatctctgaatagaccaataacaggctctgaaattgaggcaataattaatagcttaccaaccaaaaagagtccaggaccagatggattcacagccgaattctaccagaggtacaaggaggagctggtaccattctttctgaaactattccaatcaatagaaaaagagggaatcctccctaactcattttatgaggccagcatcatcctgataccaaagcctggcagagacacaacaaacaaaagagaattttagaccaatatccctaatgaacattgatgcaaaaatcctcaataaaatactggcaaaccaaatccagcagcacatcaaaaagctcatccaccatgatcaagtggacttcatgcctgggatgcaaggctgcttcaacatatgcaaatcaataaacgtaatccagcatacaaacagaatcaatgacaaaaaccatatgatctcaatagatgcagaaaaggtctttgacaaaattcaacagtccttcatgctaaaaactctcaataaattaggtattgatggtacgtatctcaaaataataagagctatttatgacaaacccacagccaatatcatactgaatggacaaaagctggaagcattccctttgaaaactggcaaaagacagggatgccctctctcaccactcctattcaacatagtgttggaagttctggccagggcaatcaggcaggagaaagaaataaagggtattcaattaggaaaagaggaagtcaagttgtccctgtttgcagatgacatgattgtgtatctagaaaaccccatcgtctcagcccaaaatctccttaagctgataarcaacttcagcaaagtctcaggatacaaaatcaatgtgcaaaaatcacaagcattcttatacaccaataacagacaaacagagagccaaatcatgagtaaactcccattcacaattgcttcaaagagaataaaatacctaggaatccaacttacaagggatgtgaaggacctcttcaaggagaactacaaaccactgctcaatgaaataaaagaggatacaaacaaayggaagaacattccatgctcatggataggaagaatcaatatggtgaaaatggccatactacccaaggtaatttatagattcaatgccatccccatcaagctaccaatgaatttcttcacagaattggaaaaaactactttaaagttcatatggaaccaaaaaagarcccatattgtcaagtcaatcctaagccaaaagaacaaagctggaggcatcacgctacctgacttcaaactatackacaaggctacagtaaccaaaacagcatggtaccagtaccaaaacagagatatagaccaatggaacagaacagagccctcagaaataatgccgcatatctacaactatctgatctttgacaaacctgacaaaaaacaagaaatggggaaaggattccctatttaataaatggtgctgggaaaactggctagccataygtagaaagctgaaaccggatcccttccttacaccttatactaaaattaattcaagatggattaaagatttaaatgttagacctaaaaccatgaaaaccctagaagaaaacgtaggcaataccatttgggacataggcatgggcaaggacttcatgtctaaaataccaaaagccatggcaacaaaagccaaaattgacaaatgggatctaattaaactaaagagcttctgcacagcaaaagaaactaccatcagagtgaacaggcaacctacagaatgggagaaaatttttgcaacctactcatctgacaaagggctgatatccagaatctacaatgaactcaaacagatttacaagaaaaaaacaaacaaccccatcaacaagtgggtgaaggatatgaacagacacttcccaaaagaagacatttatgcagccaaaagacacatgaaaaaatgatcatcatcactgaccatcagagaaatgcaaatcaaaaccacaatgagataycatctcacaccagttagaatggcgatcattccaaagtcaggaaacaacaggtgctggagaggatgtggagaaataggaacacttttacactgttggtgggactataaactagttcaaccattgtggaagtcagtgtggcgattcctcagggatctagaacyagaaatrccatttgacccagccatcccattactgggtatatgcccaaaggattataaatcatgctgctataaagacacacgcacacgtatgtttattgcggcactattcacaatagcaaagacttcgaaccaagccagatgtccaacaatgatagactggattaagaaaatgtggcacatatacaccatggaatactrtgcagccataaaaaatgatgagttcatgtcctttgtagggacatggatgaagctggaaaccatcattctcagcaaactatcgcaaggacaaaaaaccaaacatcgcatgttctcactcataggtgggaattaaacaatgagaacacatggacacaggaaagggaacatcacacactgggacctgttttggggtagggggaggggggagggatagcattaggagatatacctaatgttaaatgacgagttaatgggtgcagcacaccaacttggcacatgcatatatatgtaacaaacctgcacgttgtgcacatgtaccctgaawcttaaagtataattaaaaaaaaaaaaaaagaaaaaagaaaactgtgaaccaaaatttgggtaaggccaaggcaggaggattacttgagataggagttcaagactggcctgagcaacgtagcaagaaccccatctctacgaacaattttttaaaactatctgagcatggtggcacacatctgtagtcctagctacttggaaggttgaggcagaaggactgcttgagcccaggagatggaggctggagtgagctatggccatgccactgcactctagcccgggcaatgaagtgataccctgtctcaaaaaataaataaataaataaaacaaaatttgagtaaagcagtctctatggcagtttgttttttttaaagtctcttttattcttttatttttctttccgtttcaaacaaatttccaatgtttacattccatttagagcacaaataatgagtcttatctcagcaccagcaactcagtaacagcagattcaaagcagacagtaaagaaaagagaggaagatagagagctttagaagactctgtttaactctgcagttagttacgggctaaccatttgagctctgaatttttcttgctataatttgcccatccgtttaaaacatgcattaaaaaygggtcataatatgtaactagctggaatcccaaagaggatgagagtatgaagttcctggcaggcctcagcaaaggagccaggctttaaaggaagggaaaagaagagaaagaaagaaaaggagatttatgagccttaaagccactaagtggtgtgtgggcggtaccttcaccactcccatttatctcccatcaggaagagccacagtatcctagacctgcacggtgtgggatgaatccctcccacctccgtaaatcactggtcaaggtaaacagagctaagggtgcctttggccaagaagattaaggctgtaggtggctctctgagataatcaggaagataaagtgaaaaggaaaggaagcaattagggcctatacacaaaggtcatacaaatggagtatacacaaaggcatgaacaaatggagtgcttccaaacagatccccagttaagaggctgggtttagtcctaaatctcctgcctcagttccaaatagctcttccagatgaccgagtccaaaccaagccatgcctcaagggtgattcacatacaaacacaaatgcagaaaaagctcaaatgttgtttctggcagccaaatctaaatagaacagagccacagcaacactccaaaagaggcagggggtggtcaggtacactccaacttgctcacccagttccaaagtttgccttcttcagagttcattttctttgtaccaacgaagctttgaaagccgcaggcatcatgccaggaagtgaaagacagtttcccaaaaacaaaagcatcttggcagcttcagagaaattcctaatgttccagccatggggtcagctagccataagcagctggtgttcacaggcagccatatgccctctccagtagaaaccagaccagcaagctcaggcccctggaacacacaacagtccctgtatgggccaccaaaattgtaactgaatgcaggttcagcttcttgtaaatttagataacaagcatgaggtggtaaaagaaagtgacttctattccagagcttagctgaggggaaacagtacaggctcctcccttaaggaaaccacttcatcttttggggcaaaaagcaggggctttaaaggggggcatgtcatgaatggcatgcaggggaggggcacgaggaggtgcagggtctatgtgactggcttctattcttagctaggggatggtctgcctggcaccatctggccagaactaggttgtaaactgaccattgtctctatgcattctcctggtcgggaggagttccagagggtgcctggtttggttcaacatttggtcattagaatttctaagcaaacatttagtaagataaacttgccatgcaggaagtgcctggtggagagaaggtaaaggttatcattgcatccctaaggagcttaagtaagaggtgaacacacaagaaaaaaagaaatggtaaaggtatttttttaagaaagtagggtacttggttacaagagtaaaacatatatatgagtaaatagttgaactcaatgaaaatatcttcctacatctaaaaatcttatatccatggaggccctttaagaacaaagattccacgttgtcatggtatcttgtatttattggaatcctgtgttgccttggttttgtattctttgaattctacctccaaagtgatggtctctggtcactataagttttttatttctttaactactgcattttttttcatagaaatttctctaaaatgggaacttcttgctcgaagttacagccaggtatttcctgagtaattttcttgatcctagtcttttaactgtcaagccattgtaatcctggttttgtttgcagggttacttttgtaattgttaactcatttgctactttacatcgcaattgcatttgggtttctgattaaaaagtatatattgtcacataaatatttcatttattagaagacaaaactgccctgacagccaataaatagtaatcactttaatggtacttttaagataaaatgagaaatgttcaactatatcttcttaggtctcattaacgatattttaaaaataaaataataataataataataataacaaccatccaactatgaattgcattaatttcttttttttttttttttttttttttttttgagacagagtcttgctctgtcgcccaggctggaatacaatggcatggtctcgactcactgcaacctctgcctcccrrgttcaagtgattctcctgcctcagcctcccaagtagctgggattacaggcacccrccactacactaggctaattttttgtgtttttagtagagacagggtttcaccatgttggccaggctggtctcgaactcctgacgtcaggtgatccacccgcctcagcctcccaaagtgctgggattacaggygtgagccaccatgcctggcctaaaaaatttttatgatagacagaaaaataaattcttggtaagtcagtgaagtttgtaaatggggactttgacttttgacaaatttattttgaacaaatagatttaagacaatatattgattcagcaattatgatagaagtggttttctagtgcagatgactaggctgatacaatacacttctctgtaagattcagttattttatttattttttattttttatttttattttttgagatgaagtcttgctcttgtactccaggctggagttcaatggcgtgatctcggctcactgcaacctccggctcccgggttcaagcgattctcytgcctcagcctcctgagtagcagggattattacaggtgcctgccaccacgcccggcaggcaactgtatttttagtagagagggggtttcatcatgttggccaggatggtgttgaattcctgacctcaggttatcctcccatctcggccttccaaagtgatgggattacaggcgtgagctaccacgcccggccatgattcaattataaggaccatgacattttatcttattatcacaatcatcatctgcaaaatcaaaaccaaattcatatagatctacttcaatctgagaaagctgattgaaaaattaaatacaattaaaaataatatcaagctagtaatatgcgatttgatttatctgcttttgctgactttaagttgtcttaagacgttagattctgtgaccactttttaaatttaaaaaattgtattgttgtaatgaattccatatagcagaattttaagtgatattgatctgcatatcattttcctcccctggatagtgttaaccacacaaaaaataataatgtatgtaataatatatgtatatgatcttgtaagtataccaatgcaggatgacctggctctaggcgcggttctgctgcatacttagaactgggatctgggagtaaaccatgagcttctctgtgggtttgattattcgcctgacacagaaagaaaggagaggaatcactggctttaaacttcctataataaaagaaaattgtgggggcatgcagtggctcacacctgtaatcccaacactttgggaggccaaggcgggcggatcacytgaggtcaggagttcaagaccagcctggccaaygtggcaaaatcccgtctctactaaatatacaaaaattagcagggcatggtggtacatgcctgtaatcccagctactcgggaggctgaggcaggagaatcgcttgaacccagtaggcagagattgcggtgagctgagatcacgccctgcattccagcctaggtgcagagtgagactccctctcaaaaataaaataaaatacaattgtgccctttaaacaacaatcgaaattccatattttaaaaggatggccaggtgtggtggtgcacacctgtagtcccagctactgaagcagggggatcactatgtttgtgcttgtgaatagccactgtactccaccctgggcaatatagcaagacccccatctcaaaaaaaacaaagaaaaaactaaaaagaataaaggagcagggagtagaatagtggttgccaggggctggggtgtgggaggaatggggagatgttagccagaaggtataaagtttcagttagatgaataaattctggagacctattgtaccacatggttaatgataatatattgtatacttaaaaattgctcctgcaggccaggcgcagtggctcacgcctgtaatccgaggactttgggaggccgaggcgggtggatcacgaggtcaggagatcgagaccatcctggctaacacagtgaaaccacgtctctactaaaaatacaaaaaagtagctgggcgtgctggtgggygcctgtagtcccagctgctcgggaggctgaggcaggagaatggcatgaacccgggtggcggaggttgcagtgagccgagatcgcgtcactgcactccagcctgggctacagagcaagactccatctgaaaaaaaaaaaaaaatttgctcctgtaatcccagcactttgggaggctgaggcaggcggatcacaaggtcaggagatcaagaccatcctggccaacatggtgaggctccatctctactaaaaatacaaaaattagcagggtttagtggcatacaactgttgtcccagctactcaggaggctgaggcaggagaatcacttgaacccgggaggcggaagttgcagtgagaagagatcaagccactgcactccagcatggtgacagagcgagattccatctcaaaaaaaaaaaaaaaattgctaagagaccagatcttaaatgttctcaccacaaaaaaaagaaaaaatgacaagtatstgagatgacaatatgttaattggctggattgaaatcatttcacaatacacacatatatcaaaacatcatgtatgccatatacatatacaattttatttgtcaattatgccttaatctgtgagtaaaaatgataaaggcatggccaggcgtgatggctcacatctgtaatcgtggcacttggagaggctgaggcgggcagattatttgaggccaggagtccaataccagcctgaccaacatagagaaaccctgtctctaacacaaatacaaaaaaaaattagctgggtatggtggcacatgcctgtagtcccacctactcgggaggctgatctatccttgtcttttttgacagtaaaatatgtgtcattgtcaaaaaatagaatggcatatagtgtccccaagttctacacttcacttataaagcaatgcatttctaagccatgattgtactttaaagattccctgttgtgcaaaaagtaacacaaatgatgatttttcttttttaggctgtcatgatttggggaagaaaaaaagaaatttcctagagaaggttaaaaactagtagataaatttgattataatttcaattattttattcccatagcatatataaaacagtataaattgaagtatactattaatatttgattaattgtgatcatgggctgtcacttatttaaatgcagggatatacagataaaattagttgaataggtagcttcattgtctgggtgatttagcccttgaaaatgttttctcctaattatagctgttgctttagatatttaacagttgaactgctgagtaaagattatgagtctttaccactttttttttttttttttttttgagacrkagtctcgctctgtcacccaggctggagtgtaatggtgctgtcttggctcactgcaacctctgcctcccaggttcaagtgattctcctgcctcagcctcctgagtagctaggattacaggcatctgctaccatgcctggctaatttttgtagttttagtagagacggggtttcaccaggttggccaggctggtctcaaactcctggccataggtgatgcacccgccttggcctcccaaagtgctgggattacaggcgtgagccactgctcctaaccattaccacactttattcgctgtggagtgagttccttgatcaaagtcaaggctatgaggataaataagacattcctaagtccacaatagtaattctgatgaaatgttacatgcaggaaaggtaaatctgtctccagattatctattccaataagaacaatgcagtgacccttccacaaaggaagtggtccagcgtaattcatctgtccctatgttagcactctaagtgggtcactcagtgtccgtcgctgctgcgggttaactttggcactcagctggggctgtccaatggcaatgtttgccacatcgtgccatggactaccagtgccctctttaccactggaactggagtccttatataaatagaagacgtatataactttaaatatacctatttttagttgtatatttataaacatacatatctctgtaaggttctgttcttacagaaccacctccaataccaaggtctttatcattcagggttcaatcagagaaacaatcagtagtgttctgaagtcaaatcccatagtgaactagtgagctatataaaacgtatgtgcgtgtgtttatactataaatatataaatacatatacatacatacatatacatactcgtacatatatagagggacatatatgtgccttagtccatttaggctgctataacaaaatattatagaccagctactttataaacaacagaaatttatttctcacagttctggagattgggaagtacaatcaggtttggtgtctggtgagggcccatttcctcctagacagccgtcttctcactttaacctcacatggcagaaggatcacagaggtctcaaccctccctccccctctctgctctctttgataaaggcactaatccctttcaagaggactttgcccccgtgactcaatcacttcctaaaggccccacctcctaataccattaccttggtggggaggatattgacctatgaattttgaggctacataaacattcagatcatagcaatatagaactcacttctataattgtaggggctggataggcaagaataaagtctgtagggcaagccctttggaaaaccagtcagaaacgcctgaggcagcagctgagcatgggtgggaaattttttaattttcatataaataagatagggtctccctgtgttgcccaggctggtcttgaactccaaggctcaagtgattctcctgcctcagcctcccaaagtgcggggattacaggcacgagacaccacgcccatccagatgtgctttcccgcttccctccagaaaaacctcacctttgctcttaagccctttcactgattgaattgaacccactcagtttatccaaaatattctcatttactgaaagtcaactgattatataacctaatcacatctacaaaataccttcacagcaacatgaataaaacagcctagattcatgttttattgaaaaaatagggagtgtaaagcagccaagttgacacatagatagcaccatcgcaatgatgaaaagacgtgggtttcagaagagccgaggaaaacaaaaaatacagagtaaggtaaggacattcttataatgtagaaactaatgtagccaaatcaaaataattaaacaagagtcatatttgaaaaggtgttattaaagagaaaaaatcacctagtacgatctgtacttccacttaatctaattacttcaagtttctttctgcaggtgttaaatatttaatgaggggattaaattgaaagctatttaagaaaggggcgggtcatcttgaccctatataaagcctgtgtctttaggagctgctcagttgcttgctgatctcagttgcttgctggtctccgtgaagtccaggtcttctaccccaagatgaatttggacggcacttcaggtggtaagttcccatcagctttttctcttacaatgctacttcccttgctttttctcaatagtgtgtcaaagtttaaagcacaaacacagaggtacagattgttggagcagcagctgtttttcaccggtaaattgtgttagggcattcatgggtactttgaagttggactcttgaatttcaaatgtaaaatggcagccgtgagtcccatacaaggatcatctacctaaagtcaacactttaagtggagaaaagaatgtatgaactacctaatgcatcctgtagaattttattaagatgtattactttccattacaaagtaccagttcttgtgtatctttcttaacctcaattgttccacaagttttacctctttcattaattttcattaattttcctcttccctactgcttcctcttttggtaattttgtacattttcagtaaattctttctttggaaacttaggtcatcgattataattttctaatatgtacatttaagtgtttatccaatttagtatgactggctgtatgcctaaagtaaaaatacagagtaataataaaacaaggaggccaaagcagggggatcaattgaacccaggagtttgaaaccagcccaggcaacatagcaaggttgcctaaaaaaaaaaaaaaaaaaaaaaaaaaaaagacgccgggcacggtggctcactcctgtaatcccagcactttgtgaggctgaggcgggtggatcacgaggtcaggatattgagaccatcctggctaacacrgtgaaaccccgtctctactaaaaatacaaaaaattagcagggtgtggtggcgggcgcctgtagtccyagctacttgggaggctgaggcaggagaatggcgtgaacccgggaggcrgagcttgcagtgagccgagatggtgccgctgcactccagcctgggcgacagagcgagagtccgtctcaaaaaaaaaaaaraaagaggaagccacagtggtgcctatgtgtagtcccagctactacaaaagttgaggtgcaagaatagcttgaacccagtaggcggagattgcagtgagctgagagcacgccactgcattccagcctaggcgacagagggagactgtctcaaaaataaagaaaaaaagaaagttttttttattattatactttaagttttagggtacatgtgcacaatgtgcaggttagttacatatatatacatgtgccatgttggtgtgctgcacccattaactcgtcatttaacattaggcacatctcctaatgctatccctcccccctcccccgaccccacaacaggcccgggtgtgtgatgttccccttcctgtgtccatgtgttctcactgttcaatttccacctatgagtgagaacaagcggtgtttggttttttgtccttgtgatagtttgctgagaatgatggtttccagcttcatccatgtccctacaaaggacatgaactcatcattttttatggctgcatagtattctgtggtatatatgtgccacattttcttaatccagtctatcattgttggacatttggcttggttccaagtctttgctattgtgaatagtgctgctataaacatacgtgtgcatgtgtctttatagcagcatgatttataatcctttgggtatatacccagtaatgggatggctgggtcaaatggcatttctagttctagatccctgaggaatcgccacactgacttccacaatggttgaactactttacagtcccaccaacagtataaaagtgttcctatttctccamatcctctccagcacctgttgtttcctgactttggaatgatcgccattctaactggtgtgagatggtatctcattgtggttttgatttgcatttctctgatggccagtgatgatgagcattttttcatttgtcttttggctgcataaatgtcttcttttgagaagtgtctgttcatatccttcacccacttgttgatggggttgtttgtttttttcttgtaaatttgtttgagttcattgtagattctggatattagccctttgtcagatggatagattgcaaaaattttctcccattctgtaggttgcctgttcactctgatggtagttccttttactgtgcagaagctctttagtttaattagatcccatttgtcaattttggctttcgttgccattgcttttggtgttttagacatgaagtccttgcccatgcctatgtcctgaatggtattgcctaggttttcttctagggtttttatggttttaggtctaacatttaagtgtttaatccatcttgaattaatttttgtataaagtgtaaggaagggatccagtttcagctttctacttatggctagccaactttcccagcaccatttattaaatagggaatcctttccccatttcttgtttgtgtcaagtttgtcaaagatcagatggttgtagatatgtggcattatttctgagggctctcttttgttgcattggtctatacctctgttttggtaccagtaccatgctgttttggtaccagtaccatgctgttttggttactgtagccttgtagtatagtttgaagtcaggtagcatgatgcctccagctttgttcttttggcttaggattgacttggcaatgtgggctcttttttggttccatatgaactttaaagtagttttttccaattctgtgaagaaagtcattggtagcttgatggggatggcattgaatctataaattaccttgggtagtatggccatttttatgatattgattcttcctacccatgagcatggaatgttcttccatttgtttgtatcctcttttatttcattgagcagtggtttgtagttctccttgaagaggtccttcacatcccttgtaagttgaattcctaggtattttattctctttgaagcaactgcaaatgggagttcactcatgatttggctctctgtttgtctgttattggtgtataagaatgcttgtgatttttgcacattgattttgtatcctgagactttgctgaagttgcttatcagcttaaggagattttgggctgagacgatggggttttctagatatacaatcatgtcatctgcaaacagggacaatttgacttcctcttttcctaattgaataccctttatttctttctcctgcctgattgccctggccagaacttccaacactacattgaataggagtggtgagagagggcatccctgtcttgtgccagttttcaaagggaatgcttccagtttttgcccattcagtatgatattggctgtgggtttgtcataattagctcttattattttgagatacatcccatcaatacctaatttattgagagtttttagcatgaaggagtgttgaattttgtcaaaggccttttctgcgtctattgagataatcatgtggtttttgtcattggttctgtttatatgctggattacgtttattgattttcgtaygttgaaccagccttgcatcccagggatgaagcccacttgatcatggtggatgagctttttcatgtgctgctggattcagtttgctagtattttattgaggatttttgcatcaatgttcatcagggatattggtctaaaattctctttttgttgtgtctctgccaggctttggtatcaggatgatactggcctcataaaatgagttagggaggattccctctttttctattgattggaatagtttcagaaagaatgttactagctcttccttgcacctctggtagaattcggctgtgaatccgtctggtcctggactttttttggttggtaagctattattgcctcaatttcagagcctgttattggtctattcagagattcagcttcttcctggtttagtcttgggagggtgtatgtgtctaggaatttatccatttcttctagattttctagtttacttgtgtagaggtgtttatagtattctctgatggtagtttgtatttctgtgggatcagtgatgatatcccctttatcactttttattgtgtctatttgattcttctctcttttcttctttattagtcttgctagcaatctatcaattttattgatcttttcaaaaagccaggtcctggattcattgatttttttgaaggtttttttgtgtctctatttccttcagttctgctctgatcttagttatttcttgccttctgctagcttttgaatgtgtttcctcttgcttctctagttcttttcattgtgatgttagggtgtcaattttagatctttcctgctttctcttgtgggcatttagtgctctaaatttccctctacacactgctttgaatgtgtcccagagattctggtatgttgdgtctttgttctcattggtttcaaagaacatctttgtttctgccttcatttcgttttgtacccagtagtcattcaggagcaggttgttcagtttccatgtaattgagcagttttgagtgagtttcttaatcctgagttctagtttgattgcactgtggtctgagagacagtttgttataatttctgttctttcacatttgctgaggagtgctttacttccagctaatgtggtcaattttggaataggtgtggtgtggtgctgagaagaatgtatattctgttgatttggggtggagagttctgtagatgtctattaggtccgcttggtgcagagctgagttcaattcttggatatccttgttaactttctgtctcattgatctgtctaatgttgacagtgggatattaaagtctcccattattattctgtgggagtctaagtctctttgtaggtctctaaggacttgctttatgaatctgsgtgctcctgtattgggtgcatatatatttaggatagttagcttttcttgttgaattgatccctttgccattatgtaatggccttctttgtctcttttgatctttgttggtttaaagtctgttttatccgagactaggattgcaacccctgcctttttttgttttccatttgcttggtagaacttcctccatccctttattttgagcctatgtgtgtctctgcacgtgagatgtgtttcctgaatacagcacactgatgggtcttgactctttatccaatttgccagtgtgtgtcttttaattggagcatttagcccatttacatttaaggttaatattgttatgtgtgaatttgatcctgtcattatgatgttagctggttattttgccccttagttgatgcagtttcttcctagcctcgatggtcttaacaattgagcatgtttttgcagtggctggtaccagtttttcctttccatgttaagtgcttccttcaggagctcttttagggcaggcctggtggtgacaaaatctctcagcatttgcttgtctgtagaggattttatttctccttcacttatgaagcttagtttggctggatatgaaattctggttgaaaattcttttctttaagaatattgaatattggcccccactctcttctggcttgtagagtttctgctgagagatccgctgttagtctgataggcttccctttgtgggtaacccgacctttctctctggctgcccttcccattttttccttcatttcaactttggtgaatctgacaattatgtgtcttggagttgctcttcttgaggagtatctttgtggtgttytctgtatttcctgaatgtgaatgttggcctgccttgctagattggggaagttctcctggataatatcctgcagagtgttttccaacttggttccattctctctgtgactttcaggtccaccaatcagacgtagatttggtcttttcacatagtcccatatttcttggaggctttgtttgtttctttttattcttttttctctaaacttctcttcttgcttcattgcattcctttgatcttccatcactgatgccctttcttccagttgatcgaatcggctactgaggcttgtgcattcgtcatgtagttctcgtgccgtggttttcagctccatcaggtcctttaacgacttccctgctttggttattctacttagccattcatctaattttttttcaaggtttttaacttctttgccatgggttcaaacttcctcctttagctcggagtagtttgatcgtctgaagccttcttctctcaactcgtcaaagtcattctccatccagctttgttcaattgctggtgaggagctgcgttcctttggaggaggagaggcactctgatttttagagtttccggtttttctgttctgttttttccccatctttgtggttttgtctacctttggtctttgatgatggtgacrtacagatggggttttagtgtggatgtcctttctgtttgttagttttccttctaacagtcaggaccctcagctacaggtctgttggagtttgccggaggtccactccagaccctgtttgactgggtatcagcagcagaggctgcagaacagcagatattggtgagcagcaaatgttgctgcctgatcgttcctctagaagttttgtctcggaggagtacccggccgtgtgaggtgtcagtctgcccctactggggggtgtctcccagttaggctactcaggggtcagggacccacttgaggaggcagtctgtccgttctcagatctccagctgcgtgctgggagaaccgctactctcttcaaagctgtcagacagggacatttaagtctgaagatgattctgctgccttttatttggctgttccctgcccccggaggtggagtctagagaggcaggcaggcctcyttgagctgcrgtgggctccacccagtttgagcttcctggcagctttttttacctaagcaagcctgggtaatgacaggcgcccctcctccaggctcgctgccaccctgcagtttgatctcacactgctgtgctagcagtgagcgaggctccatgggcgtaggaccctctgagccaggcgcagcatataatctcctggtgtgccgtttgctaagaccatyggaaaagcgcartattagggtgggagtgacctgattttcctggtgccgtctgtcacccctttctttcactaggaaagggaattccctgaccccttgcacttcccaagtgaggcgatgcctcaccctgcttcggctcatgctcggtgccctgcacccactctcctgtacccacttcccaacactccccagtgagatgaacccagtacctcagttggaaatggagaaatcacctgtcttctgtgttgctcacrctgggagctgtagactgtagctgttcctatttggccatcttggctcaaaagaaatatttaattgaaatatagcatgcatgccaaaaatagcaaatatttatacatgtttaatttaactaatgttcacaaatcaactacactcgtggaactcagcactcagataaagaaaacttagtggcacccagaggcctctgttcgctcactttcaggctcccgattccattccctcagtagcccatgtcctgccttccaatcagtatagatcagtttttcctgttttaccttacggtgatgaaataataaaatattcttctgcaattagttctaattttaaatataaattctcaaatccagatagtaaatatgttaggctgtgtcgaccctagacacattggagcctcaactactaagcctgctgttgtggcttgaaaacagccataggcaatgcataagtgaatgaatgtgatggtgtttcgataaaactctatttacaaaaacaggcaactgggtggatctggcccataggcctagagttagccaattcctgctttcatttgtaattttattattgtgagtagctatgaggtcacacgtggatttcatcttgggaaggggagggaatctatggtgctaacactgttgggaactcttctttggtctggttattaccaatattctctaatgcccttctcgctacttatacttttgtcaggtttcccagctgaagaggatcatcataatgaagaaagacaaacaaagaataaaagaaaaacaaaacaccgacataaattttctgaagaattactgcaggaacttaaggaaatatttggagagaactgttatcccgattacacaactaggaaaacactggccatcaaatttgattgtccggtaaatgtgatagatgtaagttcaagacctcatatgtatatttcctagatttttttttttttagacaaggtctcactcctatcacacaggcagatgcacagtggcatgatcacggctcactgcagcctccattttccaggctcaggtgattcccccacctcagtcccctgagtagctgggactacaggcacacaccaccccgccaggctttgtatgttttgtaaaaaatggggtctcaccatgttgcccaggctggtcttgaactcctggggtcaagagatctacccacctcagcatcccaaagtcctggggttacaagcgtgagtcaccacatccagctgttccatataaaattaaagggcaataagtacagatggaggtagaatgcaggggattggataggaaggtacagaattcgaagaaatgggaaagtgcaatcaaaatacatatgtatatacagttaatcctccatctccactgggtccacatgcacagatttaactaaccacaaatgaaaaatatttggaaagttaaaaaatgaaaataagatgggcgctgtggctgaygcttccagccctgatcataccactgcattccagcctgtgtgacagaatgagaccctgtttcaaaaaaaatgtgagaggaggttgcaggtgtgggggtggggagcaaataacaatacaaaaattttaaaatgatacaaatgttaaaacaatacagaataagaaatatttatgtagcatttgtgttatattaggtatcaggtattgtaagtcatctagagatggtttaaagcatatgagagaatgtgcatagtatatatgcaaatactacaccgttttatatatatgagggcctgagacatcctcaaacgttggtatccataaccagtttgagagaaaattgtacacatgcacataacaatatgaaaaatgtaaagaattaagcagtatatagcatttcatcgcataagaaaatagtattatgtacttgtgaaaatacagtgagtatgtattgtaaaaactagactgcagtgaggcaaatttggaagcagtggatgagttgatgctgctgtagttagtggtggtgacggtggtttgggccagcttgctagctgtgcaggtggatggtactaatgagactgtagatgtttgagatggagctgacaaagtttactatgtgtgggttatgctgtgaaaggtaaggtggactcaaaggttacttggacgtttgacttaagtctatggaagatgaaagttgccttttactaaggaggggacctagggagggacaggtgtgtcagagaaatcaaagtttacattttggacacatgaagtttcatatgtcagataaacatccaagtggaaacactaagtgaacagttgaatatgcaattctgaagggttgggagagcacttagctaagatataaatctgagagttgtctactaatgaactgactgttgggtgggtagcccctagtagcttcaggatgaaagctggaaagatccaggcaggattagaaaattgagactttcaaccccaccctccaacttctggagaggaggtggagctgaaggttaagttgatcaccaatagccaatggcttaatcaatcatgaccatacaataaagcctccagaaaaaaaacaaagacactgagtttgaagagggtccagatacttgaacgtgtggaagttcctggaggtggcttatccagggagggcaggaaagctctgcatcccttcccccatatctcaccctatgcatctcttcatctgtatcttttgtaatatcctttctaatcaactggtaaacctaagtgtttcacttagttctgtgagccactctggcaagttaatcaaacccagagaggaggtcagcaggagccctgacctgaagccagtcagccaaaagtttcagaagcccagacttgcaactggcatctgaaggaggggcagacttgcaggactgagccctcgacctgtgggatctgacagtatttccaggtacatagtgtcagaattgaattgaaggacacccacctggtgtgcactacagaactgactgtttgcctggtgtgtggaaaaacacatttgctcacacaagcctttctctgttgattgttgtggtgtgagagcagaggaaaaatgtttttttttttccctcagagagtcatacaacaaatagatggtcaagaagttattcaaacaattgcactctttagttgtaacccgtgaaccaatgcatgtcagaattatgtacatataagaaacagaaatgtgggccagatgtggtggctcatgcctgtaatcccakcactttgggaggctgaggcgggcagatcacctgaggtcaggagttcgagaccagcctggccaacatagcgaaaccccgtctctactaaaaatacaaaaaaaattagccgggcatggtggtgctcctgtaattccagctactcgggaggctgaggtaggaaaatcacttgaatccaggaggcggaggttgcagtgagctgagatcacaccattgcactccagccagggcaacaagagcaaaactctgtccaaaaaaaaaaaagtgaagaaaaggaacagaaatgtgtatgtcagaaaatacaccactaattctccttggcgggagagtatgagtaaagtagcagggttgtgtgaactatgcatgactaggtgggacagctgggagcctcttctgtagcacagagtgggtctcttagtgaacatgcaggagaacattgcaaatgggtcacaaacaggttggggagagattctgggaagccaaggttcacatgtaaaccatggtgtcaatgtctccagtgaaggaggttatggttctagaaatgcgcaatgcatgacctgtgttatcacatgtacctctaggacagattgcctttattatttatatgytttaatktcagcaggcaagtcagggactctgcttggaagaggcttaaatagaaaaatcctcctacattaaggaatgcatataagaatatattcagataagtagagtcaataaaacaatattatcttttctctctagaattggttccagaataaaagagccagacttccacctgcagaaagacgcagaatatttgttcttcagaaaaagcatgattttccagtccaagcccattcatttttaagctgccaggagacccaggctgcagctyacaactatgccaccaagcagagcctctctggtgcccagagggctctgatgagaagagctggttgctcccatctggagaaacagtggattcccagtcaagaaatgggctataattgtttctctttggagaaccaagagactcccagtcaacaggtgggcccccagtgctcttatctggagaaaccagggattcccagtcaacaggtgggttcccagtgctcctatctggagaaactagggattcccagtcaacaggtggcctcccagagttcctatctggtcacaggcactgaaaagcatccaggctgtgctatggggtatggaggtgacacaggaagtgggcattctggaagtgggcattctactgcctatcattttctcagctacaactctgcagaatgccttcatcctcccccatcttctgtgccatattttcatggagaaaggactgaaaccaaggaaagccagcatgcaagtcctttccttttggattacgctcaaggtgcatatggggtgaagaaagaccattgtctttgctcattctgtctctcactgctgggacaacagcagcagaatgattggcagtatcacctgcagcagcaccaacagcctcagaattacttagaggggatgatgttgcaggaacagctcccaatggactcgggtccttgggatctagggaagcagtggtcctcggctcagtcacagctgcagagtcaactgcctcagaataatggaaagccgttgtgctctcaactgcagcacatgtctctccaaatagctgccgactcacccctkctgcctctggggcaagatatgcaggaaagggcttcagagcaacccaggacccaaatgcagcaactttaagttgaagagtggacaagggtctgcagyagggaaccaaggatgcaactctgcaaagtagtgctaagtgtcagagaaacacagtcgcaggtcaggcccacrgtcacccacacagtagcacaaggcagagcccttaccagaagcctccacattaagaaaagaaagaaagaaagaaagaaaaaagccaggtgacattgtttgagcccaggagttcaagaaaagcctgggcaacatggtgagtccctgtctctataaaaaaactttttaaaaaattagctgggcatgatggtgtgctcctgtggtcccagctactcaggaggctgaggtgggaggatcacttgagcccagcagtttgagaccagccagggcaatattggaagatcccatctctacagaaaaataaaaaaaaataaaaaatttagccaggcatagtggcttgtgcctatggtcccagctacttcagaggctgaagtgaaaggatcacttgaacctcagaggtggaggctgcagtgagccgtgatcattccactacactccagccggggtgacagagtaagaccctgtctatgaaaaattaaaaagaagaagaaaaataagactgtctacaggaaggctccatgagctcttggtcccttctcatacagaagcggtgtccacatgtgttacagctcctgagctcctgaccatatagtttacagtggccttgaaaagactgactccatagaatatggattgaaaaaccaacgagcacaaagattgcaggagcactgctcaaatcacatcatgcaaagtctaatgacattttgccttcagaagaaggaggctcttgcccagcccttcaggcattgttcccctgagaggcaatatagccaacaagaacagagtaaccacaaagccccacagcagtgacaattggatgggggattctaaaggctactcttgcaaaactctctcctccatggaccagagcagtatctgcaggttgtgaagcgtggcctaccaggacccagctgtatctcctcagcagccagccccaccgaagaagctctgcctgtgaagggtgctgcagcaacatcagcctggcctttgcacatctcaaagtcagcccagtataaaggcaggagcttttaattgaaaggcatttaaagacacagtacataaagccaggcacaatggctcacacctgtaatcttagcactttgggaagccagggcaggaagatctctctgagcccagggattcaagaccagcctgggtaccatggcaagatcttgtctctagaaaaaggaagaaaaaaaaaaccatgcaagaggacctgaaaatcctcaggaagatgctgtgctgaagcagcccccaccagccctcttagctgacagctgctgcccaggaatccagagtgttgtgaccaagtcatctagggatgtgatgccaaggccaacaaacatctgaaatacccaggtgagtctctgaatgccaggtgctgacctgatttttttttagaaaagatcaagtgtctttgaacctctaggtctttttaatagttttgagctttgacatgtagaattatttctcaaagattccagagttttgtcaaataaagcatatattgtaatattaattaggcaacttgctttaaaagctgaaatttcccaccaattctctctctatttgatgtgtcctacatagaaattcttccaagtgttccaaagaatatacagctatagaaacacagtatatcaagttgactgatgaagaatcaaaataaagtataaagtaataagctagcacagttaataagaatgaactagatctatagatacatgtgagatttatgaggcacaatgtttcattcttttttccagagcaggagtggatatttatttaaaagggctttagaacaggaaagaaaggaaagtaagtttggaagaaacctaagttgggacatgaaggtcaagtgtggtctttaaccttgatcttaggactttataggctgaccccttttccatgattcttctcttagggcagtctgtccacatgtgcagtgccttccttctgcttgaaaaataagcacacaaagtgtgtttaggaagttgtatatgtaccaatctgaggtttttcttcccctttctggtggagtgtccccaggacatattccactgttttgtctcttgatgcacatgccmtggaagttgctcctccctggcatctgcattcaattaacactttagtgtaacaggtatggaccatcagaaaatggcctctccctggccctggcagccagtttatcacctttacagaggcgatgtgatacttgctgaaccatcacctgactttcctagggggtgggggagagccctctcctgcctggctcatgcctgtctaactacctgtaaaattttccccctcaagagcccaagacctcagatctttgaaggaaattagacaaagttcagtcttctgtaactgcttcccactgacaaaggggctgtggtggttctgcaggtcttggcctcttgctagctgtcagggcagcagggtgactccatgggttggtgaaagtggtatctagcaaggtctaagggagacaggggcaggagtttgccttcctgtcccactgatgggcagtctaggggtcccatgtagaggggtgcctcttgaatattgagaggacagtatcccacactgatctgaagcttgatggcctgaaggcaacaggagacaaatcatgttactagatttagaagacatggaccaaagtaaaataagggaatgaggacagctccaaaaaattgaggctgccaacacacccaggtaactggtggccatggtcctgcctgctaagacttgggctgccaacttatttcagtgtgcccagaactcgaatattggtgcagatttctaaataacccatctcctttgtttcttctgacctgcagcgagggatcgctggttggttcacagaaataagcagggttaggctaaaatgcagacaaaaacttaaaaacaactaatgacgttagaatgtaatagtaggtgtaccataaattgtgaaacataggttttctctttacaatcctcctttttattaaaatcaggataggaatgatttgtttgcaaaataaactttagtcttattatatttggcctgattgtttgcataaagtgcagcaaggataattatttttacataggcttttaaaattggcttcgatggaactccgttccataagaaatctcagataagacattttaaaagccaagcacagccatgggtttgtaccctcaaatacctgtgaggagggtagatttctctcctctgaggtctctagaaaacttggggcacctgggcctgttagacagtgacattctttactcaccacaggttaggtccctgtacagggactgtgtagacaagttatgaggcctgactccccaagggacttgtattggcactataagtcaagcttgattccttaaaggaaagcatgccattccagtcaaagccctggtaaaacagccagtttctcccatggtgtactgttgcaaaagaaaacattctaattgcacttatgccaataactatattgccacgcattaagaatactcacaaatagtttccaaattctggagaaatcaggtaaagagaaacaaatatgtgaaatttttgttcacaggagtatactgaattgtgaaaagctgtagtaaatagctcaaaagaaaagttttcttggctctgaaaaacaaagattttgcaaaaagtcaaaaagattacttcactcttctattagttcagtccattcagttaactctcattctgcttgatattcatgaacatttacactgtaatatatgtatccgcttggctatctgcttttaattaagctgacttttaaccatagcgctcttaaaaaaatgctcttacatctcttattaccctactttatccaggccaaacgaacaatatttctggcctttgaacattatcaaaagtaacctcacaggtgaaaccaataagtcttaactaaggttatgacttaaccatgagcatatgaggtatttttaaagaggtggtaaggagtttttaaaacatttaaagtctccagaggtagctcagagaaaggaaaattcaagaagggaagtcagaagtcattcatggaggggcagagaatacggtgatttttaccattcctacaactggtttgcatagagagagagaggcctgaagtctgactggtaaaaatttttatgcttttgccggcatgccaggcttctgggttccctttccctgatgagccctagtgaccctggagtcctgtgaagggggcgcagataaagaggttatctgcatactgcagaagttatctcccctctcacagggatgctaagattgctgcctggaccttcactgaccatgctgtcctgggtggtactttttgctgccaccacagtggccctctctctgaagaatgcagccttcctaggtccaggggtattgcaggcaacaaggacatttcacacagtgcagccacaccttgcccttctaccacctcttcctgaatacggaggaaaagttcatcctggactgatccctgaggaattcttcctgtttctttatcctaaagctggtgtaacaggactctatgtgctcggaattgggcttattttgtatgctttatccaaagaaatatatgtgattaccacagagaccttctctaccatatcagtagtagggttacttgtctatgcaattaaaaaatatggtgcctctcttgcagaatttgctgataaactcaatgagcaaaaacttgtccaactagaagaggcgaagcaggcttccatcaaacaaatccaggatgcaactgatttggagaagtcacagcaggtactgccattactttttgatgtgcagaggaaaaacattcctatggcttcagagtttacttaccaggaacagctgtatagagtacataaggaagtaaagaattgcctagactatcatatatccgtgcagaacatgatgcatcaaaaggaacaagagcacattataaattgggtggagaagcatgtggttcagagcatctctgcacagtaggaaaaaggagacaattcccaagtgcattacagacctaaagctgctggcaaagaaggctcaagcacagccagttatgtaaaggtatctatcccaattgagacagctagaaacagttgactgactaaatggaaggtagtctatgtgacaaaatatttctgtattggtgtctactgaagttatagtttacctctcctaaaaatgaaaagtttatttcatacagtgagagaattaatatatcagccagttagatgtttctcatccttcttactctgcatttgagttgttccctgatcacttctgaataagcagtttgcctttattaaaacttgctgcctgactaaagattaccaggttatagtttaaatttgtaattcaaccatcttgcaataaagcgacaattgaatgaaaaaaaaaagaagttatcccccctgaagagactgctcagttagattttttttgctagggcttttctgaataagtgtgggatatttctaaacctctgaggtaagactatctaggttgaagctattagttaatgatttaggtagcttttctgggagaaatagggctattagaaagatgtattcagaggacaggtaaatattaagtgagcactgatcttggagattatatgtttkccccaaagaggtatgaggtatttagacattaccaaggaccagtgggagaatggtaattggtcccttaagtaataaaaaggggtgttaatcttttatttgaggggaagggatgccatttgccctacccaacaggcttagccctgttcttcctcttctgctctcagttatgaaagactgaagaggctaatctgaggacttcctgcacaggggcactgggttccaaggctgacttttgtaattttctcctagttcatttataagccaaacagtttaaggtttggggaaattaaacttttcccacttttaggggatgcatccaaggggcgtgtcctgtggtatgaagacataactacccatctgggaagagagaacagaggaggaagaaaggaaaaagaaaacagaaggcatcccccctttcttctgttatcctgaagggggtgtttcccatcatcctgggttccggacttaaccagtctttaccatctacccttagtaaccatctcatcacaattacccacttgagaacagtgggcccttgtccatccctgggattctggaattaactagtccttaccagagacacaatgtttaattttaaagcaagttgcctaattaatgtatggtacaataattatcaaaatgaaacaaagtaaagcttgctattaattattcttgaatacacataaatatatgcatacacacatagtaaaaatatttctaaaaatatagttagatattgtgttgatattctttaaattactgaaagttgaatttggacaagataagaaagaatagcttttctcctctgttatgaaactgagaaataaaaataaaattttaagagcccaacctactgaacagaccacgtcttaaccaaggggacctaagagttaacctagaaaactgagttctcggccatgacaggatgggaagtcagacacagctcgttaatacctgctctttcactgaccatcattaagctttcttctgtaagagctaaacagaaaccagccctttcaaaagattccgccattgtgtcaactgcttgactgctctcccttcttttagcagtttcaacataacaactgatgagcttttcttcctgatgagagaccaccaaccatggaatgattctggccagtctatgacgaatgcccagtgagggtttttgtgtctctacttcacctttggatgtcaaagagcacaacactccaccctgggatcacgctgatgccgccgttttttgaacgtgggtcctacggagaggcatgaagctcaattgcatatatatttgtttctcttcataaatatgcattattttttctatagctcattgaatatgtatatctggccatcccattcagcataaattcctgtcttattctttggacccttgaagtgtctattcctagtttctggctggggagctatgcttcccagcttgtcagaacggccaccctgcaggctataatcctttatgaaaaacaaagctctcctttccatatttatgaaccttattcttcagttgacaaaacatagcatatatcaacagaaatttgaaaaaaacagtcaatctgtggattcactggattttgtatgcacacaatcacaccatctgccaataaaagtattcttatttatttccaatacttctactttgattttcttcctaactatttggctgagaactgcagtaaaatactaaattggggtagaaacaacatcattgccacatctccaagcttcacattaggtatatctccaaatatgtattaccaaataggggcttaaggggttcccttttatttctattgttctcagcttcttccctcaaaaatccaaagtctctctgaatttttaagtttttaaatgttttcatctgttgtgatgatggtattatttttcttccataatctgytcatgtgattattttaaaacattgtgattttagaaaaatccaactagcttatgacataccctttttatgtatttctagattagaggtgccagtagtttaagattttggtatctatgttcatgactgatattggcttcatttattcctttattaaatgcttgaaatttaaagtgactctgcctggctctgacattattttcatggaaacattgttaactactgattctrtactttaaacaattagaagacaaccgtttatctttagatcagttttgggaagttgaaattttctaagaatatatccatttcatctaaatcttcaaatgtattatcaaatcactccaacatcctcttaactttttcattcctagggcatatgtagcagcgtactgtttgtaatgtttcatatttggactttctatgtctgttcttgattgtttgccagatatttgttctctcaaacaaccaatgtctgcaggaaagaccatagtgacctcaaggctccttgtgggcatgactttctggggcagtgggggctgctgagggccagggggcctgtctgtttagggtcctgggcctctcccaggtggctcaggtgtcccagcttctgtcagtcctctgagcccgagctaagccatcatatcccctgtgacctgcaagtatacctccagatggcctggagcaactgaagatccacaaaagaagtgaaaataaccttaactgatgatattccacccttgtgatttgtttctgccccaccctaactgatcaatgtactttgtaatctctcccacccttaagaaggttctttgtaatctcccccatccttaagaaggttctttgtaattctccccacccttgagaatgtacttggtgagatccaccccctgcccacaaaacattgctcctaactccaccacctatcccaaaacctataagaactaatgataatcccaccaccctttgctgactctcttttmggactcagcctgcctgcacccaggtgaaataaacagccttgttgctcacacaaagcctgtttggtggtctcttcacacggatgtgcgtgacagctcccgccagcaggtgcccacatcccctagccactgagggcctctgtgaaaaggcgtctgcacgtttcagggaggccctgacactgcacaaaggattcctgaggccctgggactcaggctaagcaaggacttagttaagagcgagtcatgtcgcaggcttgcgtgcagcaagatcccagtttcctccacaaagacaatcgctcacaggaaggcccagaggccccaaaaagccccttttacttgtgtcctcctcagacttctagtgcctaaaaacccagggaggggaagcctcaaggttgaggtcccggatccaacaaggcatgttccagtcctggtcacgtggacactaaagccttaggagacagaaatagggactcaagctcaggggtcaaaatcaggatttaacccttggagggctgtcatggcctgaattctgcccaatcccccattcatacgattcatatgttgaagtccaaacccctagtaccttcaaatgtgagggtgtttggagatagggccttcaaagaggtaattaaggtaaaattgtaataacmagttgggtttatcttgcctgctgcccagaaagccagatgccctgagaacaacaggtattacagcaaagaaagaggttaatcatcacagggccagccaggtgagaacaaggagaaacttctcaaacccatctccctgataattccgaggccagggcyttttaggatattttggccggcagggtgctgagaaacaattgatgaaatcacaggggtgtgtaaaactgtctttatgcagctgagttagtttctgggagggckgtctcacagaccaggaggggcttttgatctgctaaagtgccaaatctgaaaaatatctcacacactcattctttgagttttacatttgcaatgctatttataggggtagctggggaagttataaattttgtaacccctggctacgtgactccagagcactcaacacttatagaaaaacaagctgattgatggcaggttattggttaactatgcctattttttagaaaattaggccgggcgtggtggctcaygcctgtaatcccagcactttgggaggctaaggcaggcggatcacgaggtcaggatattgagaccatcctggcaaacatggtgaaaccctgtctctaataaaaatacaaaaaaattagccaggcatggtggygagcacctgtagtcccagctactcaggaggctgagccaggagaatggcgtgaacccaggaggcagcagagcttgcagtgagcggagatcacgccactgcactccagcctgggcracagagcragactccgtctcaaaaaaaaaagaaaagaaaagaaaagaaaagtttaagtccctgccataattttaaccttgtcttatgaatgttgctttaacctccgaattggcgggggcaagaagtggaagggctcagtttttcttgcctcatgtttaattataaactaaatatttttcatggttatctatgagaactctgtgttagaaaaaggaaaaaaaaaaaggrtgrgggggggggcctgtcaggttagaagcaagttgaagtctgtcatattagattattcttattatmattctgcaaaaggctgggcacagtggctcagtcctttaatccctgtaccttggcctggccaaaaccacttttaaacactcaaactatacagcaaaaaatcattaataaaaatgttgaccaggctgggcatggtggttcacacctgtaatcccaacactttgggaggccgaagcagatgtatcatctgaggccaggagttcgagaccagcttggccatcatggtgaaaccccgtctctactgaaaatacaaaaattagcctggtgtggtggcacaagtctgtaatcccaactactcggaaggctgaggctggaaagtcgcttgaacctggcagatggagattgcartgggcagagactgagtcactgcactccagcctgagtcacagagccatacttcatctcaaaaaaaaaaaaaagaaaatgttggccagaaatagtggctaatgyctataatcccagcactttcagaggccaaggcagggggatcactttagccctggagtttgaggctccagtgacagagccagtccctgtctctaaaaaaagaaaaataatgctatattagaaactattcatttaatgcaaaagaaagcagtaaatgtcaggcctctgagcccaagctaagccatyatatmccctgtgacctgcacgtatacatccagatggccagaagcaactgaagatccacaaaacaagtgaaaatagccttaactgatgacattccaccattgtgattcgtttctgtcccaccctaactgatcaatgtactttgtaatctcccccatccttaagaaggttctttgtaattctccccacccttgagaatgtactttgtgagatccaccccctgcccacaaaacatttctcctaatccaccgcctatcccaaaacctataagaactaacgataatcccaccaccctttgctcactctcttttcagactcagcccacctgcacccaggtgaaataaacagccttgttgctcacacaaagcctgcttggtggtctcttcacacggatgcgcatgacagtaattatgattttgggcacatcaacatctgtatcattcagggttccatcagagaaacaatcagtagtgttccgaggtcagctattaactagtgaactatatataatatatgtgtgtatgcctgtgtgtgtttatattataaatatataggtatctatacacatacacacttgtacatatatatatatgaagacatatatatgccttagtccattcaggctgctataacaaaataccatagactggctagcttatcaacaacagaaatttatttctcatagttctggagactgggaagtacaatcaggttaggtgtctggtgaggacccacttcctagtagacagtcattttctcactctaacctcacgtggcagaaggatcacagggatctccctctctccctccctgtctgctctctttgataaagacactaatccccttcatgaggactccaccctcatgacttagtcactatccaaaggccccacctcctaataccattaccttggtggtgaagatttcgacatatgaattttgaggctacataaacattcaggccacagcaatacaaaactcacttctataattgtagggtctgggtaggcaggaataaattctgtagggtaggcccttcagaaaagcaggtggaaactcctaaaacagcagatgaagcagctgagcacttacggaatttttttaaatttttacataaataaggtcttcctgcgtttcccaggctgaaatttaactcctgggctcaagcgatcctgctgcctcagcctcccaaagtgctgggattccaggcttgagtcaccacccccagctagatgtgatttccaccacccccaccctcccaagatgtgatttccaccacccccaccctccagggcaacctcagctttgctctttaactgattgacctttaactgatagaaaataacccacccagattatccaggataatctcatttactgaaagccaactgattatataacccaatcacgtctgcaaaataccttcatcgcaatgcttagattcgtgttttattgaaaaaatagggagcgtagagcagccaagttgacacacagatagcaccatcgcaatgctgaaaagacatgagtttcagaagagccgaggaaaacaaaaaatgcaaagtaaggtaaggacattcttataatgtagaaactaatatggccaaactgaaataattaaacaagagtcatatttagaaaggtattatgaagaagacaaaatcaccacgtagaatctgtacttccacttaatctaattacttcaagtttctttctacaggtgttaaatatttaatgaggggattaaattgaaagctatttaagaaaggggcgggtcaccttgaccctatataaagcctgtgtctttgggagctgctcagttactcgctgatctccgtrgagtccaggtcttctgcccaagatgaatttggagggcacttcaggtggtaagttcccatcagccttttctctgttctttgggattgctgcatgtcttgcttatttttcagagtttgtcaaagtttatagcacaaacatgattagaggtacagactggtagagcagcagctgtttttcgctgataaattgtgtcagaacagccatgggtgctttgaagttggactcttgaatttgaaatgtaagatggcagccatgagtcccatacaagggtcatctacctaaagttttaaagttgacagtttatgtggaggggagaatgtatgaactgtctaatgcagcctactgaattttactgagatatattctttgtcattagaagtaccagttcctgtgtgtcttatttcacctgttcaattgttccatgagtttcacttttttcattgatttttgttaattttcctcctccctactgcttcctcttttggtaattttgtacattttccgtaagttctctctttggaaacttaggtcattgattatcgttttctaatatatatatttaaatgtttatatacccaatttagcatgactttagctctatgcctaaagtaaaaatacagagtaataattaacagtacgggtgcggtggctcactcctgtaatcccagcactttgggaggccgaggtgggcagatcacgaggtcaggagatcgagaccatcctggctaacacggtgaaaccctgtctctactaaaaaatacaaaaaattagccaggtgtggtggcaccccagctacttaggaggctgaccggggagaatggcgtgaacccgggaggcagagcttgcagtgagctgacatggtaccactgcactccagcctaggcaacagatcgagactccatctcaaaaaatagtamcaataataataataataataattaacaaaatggggaggccaggacaggaggatcaattgaacccaggagttcgaggccagcctgggcaagataatgagacctcatctctacaaagaaaaaaaaatagccaggcacagtggtgcatacctgtagtcccagctattccggaggctgaggcttaagaatcgcttgaacccaggagcggaggtcgcattgacccgaaactgcatcactgcactccaatctgggcgacagagtgagactctgtctcaaaataaattaatttaatcaaagtacagatttaaacccataaatatattattcacactattctcccccttttctgttcatcaggcatacttcaaaaagaattctggagaaacagaattcagtataaccagagtcaaaaggatatcctccaatcatggtttcaacatgaccctttccctgataaagctgccagagaacaactggccaaagaaattggggttccagaatctaatattcaggtaggcattagatttctacttcattacctgtcagaaccatggtaaagagaaagactaggcccagcgcttttgccaattctcttatatcaggttatatcaggtattttgctaagaaacgttttcctgttctacaaaattagaaaacaaataaaaaggctgggcgcggtggctcacgcctgtaatcccagcactttgggaggccaaggcaggcggatgacgaggtcaggagatggagaccatcctggctaacatggtgaaaccctctctctactaaaaatacaaaaaaaaattagccgggcrtggtggcagtcgcctgtagtcccagctactctggaggctgaggcaggagaatggcgtgaacccgggaggggagcttgcagtgagcagagatcacaccactgcattccaggatggaagacaaagcgagactccgtctcaaaaaaaaaaaaaagaaaagaaaagaaaacaaataaaaacaaggatgcggtttatgtattttaccaaaggtggaaatatcatttgtattcactaatggggaaggagaatatactggctcagtctctcccaataggtaattaagtcatattttgagatttagagaatataggaaatgaaatcaccatgataattatgtcctatattttagtattagaatattcagatcgattattaatatgtaattacaaggaaactggggtaagaatgcatgtgcattccgaagtctcaggctatttcttaatttaatgtctcaaatgtgattcatacacatagygtttgaaataaaattccatactgaattattttaaatagaataactgacataaaatgaaacttaagttaaatctctccagttatcagaaagatacctggactgggtagggtgacccacacctgtaatcccaacattttcagaggctgagagtggaagatcacttgaggccaggagttcaagatcagcctggacaacacagtaaaaccccatctctccaaaaamatgtattttaatttgctgggtttgttgttccacacctgcagtcccagctactcaggggcttaggtggaaggatcatttgagcccaggaggtcaaggctgcagtaagccgtgattgcaccactgcacttcagcctggcagacagagcgagaccatgtctaccaaaaaaaagaagttatctgtgattccttctcatggtggtgtgcacctgtactcccagctacttaggaggttgaggcaggagaatcgtttgagcccaggcattctgtgctatactgtgcctgtgttgtgtggattgagtgcctgcagtaagtttggcatcaatacggtgacatcccaagagctggggaccgccagggtgcctaaggaggagtgagccagctcaggtcagaaacaaagcagatcaaaactctcatgctgaccagtagtgggatcatgcctgtgaatagccactgcactccaacctggacaacatagcaagactttgtctcaaataaagaaagaaaaagagatacctgtaaagaatataattctatcagagaaaatagtaattaaaccaatgaagaccaagtgaaaatgtgtttttagaggaaaataatgagttctgggttttgcatcatatgtatagtctccaacaagccattggctataaggatctcagtctgagaggatataggagagaagaaattttacttgtctcttcatgtatctatactggatgtgagaggcaaggattactcaagtcccagtaacaaaagtacattctatgggaatactggtaattggctttgagagaggtaccagtcccacttggaatcatggtgaaaatgacaagttcaggaaatgacgtagctggaggttacctctgccatagtgtttatacttttttcacttgtttccagtttccatctgtacttaagatttcttaactaaaactattctgattcattaatttagagaagagatataaccttttagcatagcggtctccaatttttttggtaccagagaccagttttgtggaagacaatatttccacagacaagagggggtgggtaatggttttgggatgaaactattccaccaccggtcatcaggcattagctattagttagattctcataaagagctcacaacctggatccctcaactgcacagttcacagtagggtttgtgctcctatgacaatctaacacagcagctgatctgacaggaggcgaagcttaggcaggtaatgctcactggccctccactcacctcctgctgtgcagcccagttcctaacaggccatggactgcctgtggcccgggggttgaggacgccagctttagcacaatgcctatgatataagagtggtttattggatattcgttgtcattaagatgctaaatgttcttaagaatgatctaattatcaaaataataacacttagaaatcattagaaaatatattgcaattctgactctagtaatgaggaaacaagcaaagagttcaattggttttgttagggacaacggtgacaaaatgaggtgtgtggcttgctaggagtctcctcatctattgttaaccccgggacaaaaatgactaagaggaaatactgataagtgttagtccaactctttactgtggctaattctgctctcctatttaaagaaatttttgtgcaattaattccatatgtattgcatgttatgaaacctgatatttcctatgaagaagtgttgaggatcaagaaaagatattcagaaaccgaagtcctgctaggagggagggaaagagagagacagagagcgatcctttgagagacctcatagggtctcctaaatcaaacaaatttactctggatgccacaaaaaatgaccatgaaagaaaasctcctttgatttgaagggagatgcgtgtgtggtcctgaatcatatgccaatagcagcatcattcctaggataatggattgcctttctcttgtgggcattattccagccacaggcagtcaaatcagttttgttcaattgaattgatatttggcaatattgacatacactgagttgtatgactatcacatcttcttctcctacttaggtttggtttaaaaattacagagtaaaacagagaaaactggattataagtgcttctcagaaaaagatcaaacccaggggcatgaccagtcccagcatctgactcaaggtaagaatgctcaatgggtcccattgagagtacgttgtgcccaaattctgcatcaacatctcttagctcagaagccagggatagctggttctggcatcctggtgaccagagatagaaacattatcctacattttttttaggtgaaagtaagtttgttatagaagtaaataaacaaaagaatggctactccataggcagagcggcctcccacaattgaatgagacagtcaggttcttaacaagcaagctcggggctttttatttttttattttttatttttgtattttgttttgagatggagtctcactytgttgcctgaagtgcagtggtctgatctcagctcactgcaacctctgcctcctgattcaagtgattcttctgcctcagcctcccaagtagctggaactacagaggtgcacaaccacgcccagctaattttttgtatttttagtagaaacggggtttcaccagttggccaggctggcctcgaactcccaacctcaagtgatccacttaccttggcctcccgaagtgctgggactacaggcgtaagccactgggcccagcctagctctgggctttttggtcctgctgcagagcaatgacctcttctgccacctcggggattcagagagaacaaatatggccagcattatcttcatgggtttgtttttctggtttgaatatgaaaattccccaacagcttctgtgttctcctttagaatacttacctaaagaagcccgacaaaaacagacattcatcacatggactcaaaaaaacaggctagtgcaagcctttgagaggaacccattccctgatattgctaccagaaaaaaactggctgaacaaacaggcctgcaggaatcaagaattcaagtaagttctatgtgtgtgatcccaactatgtcctgcctgtgatactgccccctggaggtgttattgaaaaacttacagctgacttgggttatcaaagtcatcaagggcggaaacgggggatggtaaacgcctggcactgaaagtcccgtttttgtcaaggaagaattttcaaatcaaattgctgtgcacggatttggaatcactagcagaaactacccattttgagaacattgttagattttctacaaccttgggagtgttgtcattttggctcagataattctttcttgtgaggggccaccctgtgcatggtaggatattggtcagcattcctggcctctaccatctagataccagtaaagcaactgcccacattctctcccccctatttgtgacaaccaaataaatcacagacatagtcaaatgttctcccaytgagggacaaaattggcccccaaggagtattttcttttacctaagttatggggatagtgatttagcgtatgttaagtgctcatgactgaggaggcacagccatgcatgggcttatgacacaaactctcaaatacatttatttgtgtttgttagtcattaatcagatgaatacacatgtacacaaactacgaattcttatgcacacatccgtgaagaggaaaaaaatgtcagcctggtcaagagatcttttttgctgatccattgttgcagttagagggagaattcgagaacacgttcctttccagtcagagattcaactcacctatacttaattgctaactgtgttataacctcaatgtatgtatttgtgtgtttatgtatatatacaaacatacacattacacacacatatatacacacatgaacacatggactggagttaatttcacatacaaaatgtataagatttctttttctcaaactcacataaaaaagaaaaacaaaagtaataaaataaataataacaaacatatgtacatacatgatttcatatacagtcatccctcagtatccatgagggattggttccaggaccttctcctgaataccaaactccaaggatgctcaagttcctgatataaaatgatgtagcatttgaatataacctgtgcacatctcatgtattttaaaacctctctaaattamttgtactacctaatacaatgtaaatgctatgtgaatagttgttaaactgtatttttctttgtattatttttattgttgcattgtttttttattgggttttcttctaaatattttcaatccatggttgtttgaatcagggtatacagatggaacccatggattcagagagccaactctataaaatcaccctgtgatttgtccttaggttaatagctcctttgttttatagagtatctgatgcagagttacaattgcttatgtcttatgatgtcatgttgccctttttctcatttagatgtggtttcagaaacaaagatctctgtacctcaagaagagcagaatggagcccatgaatttattggtagacgacccaaatgagagaccagatgcaactgttgggtggcatccaatcaacctgttcctccccacagacagctctcattatttttcttgctcacattcttccagcgggcatgaaactcttccacctgttcttccttcaacccaggctccttgggatcccttcaggttccatgtgagccaaggaccaaatgtcatgatcatgcagcccacacaggctgtgcaggaaggagagaagtctgatcagcctctgataattccgaatcacctcctgacactgccaattctgacaaaggacttagatactccgactcccttctggctccaataccaagaagaacaccaaaatcacaaagaacactctggctcgggagtaccacaggtcaagagccattctcagcctgaacctgagcacagggagcaacaacctctaaatctgggtcagtttgacatatcgaacattttgcaaaggtgggacgagatctgccaggctctgcttgctgaatgggaccctctcaaagggacacactgagacagacttgtggcagcagtaggcacactcagctgagaaacatgtcatccacttggctaattgtcccagcaatatgtggaaacctcaagcctttaggtcaactcctgtaatgcagagttctccagtaaaaggtacaacttggccgggcgcagtggctcacgcctataatcccagmactttgggaggccaaggcgggcagatcacgaggtcaggagtttgagaccagcctggccaacatggtgaaaccctgcctctactaaaaatacaaaaattggctgggcgtggtggcgcgcgcctgtagtcccagctacccaggaggctaaggcacgagaatcgcttgaacctgggaggcggaggtagcagtgagccgagatcacgccactgcactccaccctggtgacagagtgagactccgtctcaaaaaaataaataaataaataagtacaacttggcaatttctgacatatagaaattggaagtgaggtatggatggctggattggttacagcttggtgtatgccttatttgaacagagtttgaacactcagcagtgtatgagtggttgaagtatggccactggaattgtccaagacttagctactgttacatatacatactactaagttaggttttcaattttgtctattaagctaggttacagttcatccacaagtactcaaatatagaagtacagagtccttctcaggccacatttactttgctttcacatgggttagcatccgagatagagtgattttagcctccacaggatgtatgtggggtttactttggtacaataaaaatatctttgaaaaatattctttttttttttttgagacggagtctcgctctatcgcccaggctggagtgcgatggtgcaatctcggctcactgcaaccyctgcctcccggattcaagcrattctcctgcctcagcctcctgagttrctgggattataggcgtgtgccaccatgcctggctaatttttgtatttttagtagagacggggtttcaccatgttggtcaggctggtctcaaactcctgacctcatgatccgcccatctcagcctcccaaagtgctgggattacaggtgtaagccaccatgcccagccttgaaaaatattacttgtttatcttatccttttgaattctgttccattatacaatactttcaattccatataaaggtgtggaaacaaggtcagtacatacagatctagttttacaaagataccagtttgcactactacaaacagttatgcagtgaacatccctaccagtgtctgtgtccattatgtgaaggggttctctagggtttacatgctgaagcacaagtgccagaatattttgacattagtatttattgctaaattggcctcagctgaatttgttgctcctaatttgagctgcaccttcattaatctagggaatcaaaacacatgcacattcacacacattagtggagcaagcctacctgaaaagattctgatagaattatttaacagtgttaataccaaagcagtgtcatcatctggggtaacacctgaggttcactgtcccacggccacggaaaactaggatacagacacacaagaatgaggttaagaatgaggccaaagaaagagaagagctctctgtgcagagaggggtcctggagaaaatggtttgccacttccacagagaaatgcagaaggttttatagatgagcttgagggggtggtgtctgatttacatagggcaccaaagattggtcagaccagatgtgccatttgcatagcaygcaaagaagctggctaccccatccaaatcttattatgcagatgtgttctctacctggccgccaccatgttgcctgcttttttactgtacacgtagtgacaaagaaaaaagaaaagaaagcctccatgttgaacctagctggcttccaggtagcccttttctattagcacasctgctggcatttattcatgcgagcttccagcttgcttatctatgtctacagttccatttgacaggctgttttttgttagtaaagatttggggctgcttttgttaaaagggaagtcttgttggggatccttttaccctccctatctgcctaaataatttctctctacctcctgtatcaataccatgcctagctttatttttaaattgctcccctggataattcttgtttgcaggcaaagattagagctcttagtataaacagtcactcctccctacttccaacacatatgtggaaggagtwccccaggttacaaaaacaagttttatattttttttttctgttttgtttgtcagtgtgttttttggtttttggttttgtttttgagacaggatctcactctgttacccaggctggagtggagtggcaccatcttggctgactgcagcctcaacctcctgggctcaagcaattctcccatctcagcctcaacctcccaggctcaagtgatcatcccaccccagtctcctgagtagctgggactactggcacatgtgccatcacactgagctaatttttgtatttttggtagaaacaggttttcgccatgctgcccaggccggtctcgaactcctgagctcaaggaatcaacccacctcagcctcccaaaatgctgggattacaggygtgagccaccacacctggctgaagacaggtcttctgaaataccttagtcagatgaaaagcaaagaataaaagaataaaaaagaatgaagaaagcctatatgacatatgggatatcattaagtgaacaaatatagaaatttggggagtttcagaaggagaagagatgggaaaaggcatagaaaagcctttttgttagaaaagaaatgatttgggggctgctttttgttagaagggaagccttgctgaagaytctttttacctgcattatctgcctccaaaactagccaggaccagtctatgttcatgttaccaaaataccagggcttcagtctaggtcctgctgctggccacatggaaagccaatcacgaaacaataattattgccaaagaagaaggctttaatcgggcactacagctgaggagacaggagatcagtctcaaatccatcactcttactgattaaattagggagttacatagcagggaagaaacgtaactacgcatgggacaacaggaacttggaaagggtaaggaatcattcatgatgaatgaagggcctggcattcaatcgtttggatgtgactatctggtgactctcagttctttgatactttttgagaggcctgggggcttctttcctgcggaaggaactcagataaaataaatgttaagtttcatcctttaagaccagaagggttgatttctatgtttattcaaaaaaaactgtctataagactattgggtcaatttcagtccagtccgctttttctatttattgattcctcaatcatgaggaacctgatcgccagccttactggctccttcatgctgaggaagaacgttgtcggcagctccatgctatgggcgaccacgtggccacccaggaatcaaaggttaatctaatactgtagttttcttcagaaacacagtctttctctcttcagtccccaatttccgccaaagacaaatcacagcagaaccaacctacctgcaaaataagcttcagtcccatatacttggcctgattacccacacaaagtgcagcaagaatcattgtccacatagcctctcctaaaatggccttgctagagcctcccacaaaggcatttcggtcaaagccctgggaaaataaccagttcctcaaactgtgtcccattacaaaagaaaacgattctttttttttttttttttgagacggagtctcgctctgtcgcccaggctggagtgcagtggcgcgatctcggctcactgcaagctccgcctcccgggttcacgccattctcctgcctcagcctcccgagtagctgggactacaggcgcccgctaccacgcccggctaattttttgtatttttagtagagacggggtttcaccgtgttagccaggatrgtctcgatctcctgacctcgtgatccgcccgcctcggcctcccaaagtgctgggattacaggcgtgagccaccgcgcccggcctttttttttttttttttttttttttttgagacagagttttgctctgtctcccaggctagagtgcagtggcacgatctcagctcacttcaagctctgcctcccaggttcacgccattctcctgcctcagcctccygagtagctaggactacaggcgcccgccaccatgcccagctaattttttgtatttttagtagagacggggtttcaccatgttagccaggatggtctcaatctcctgacctcgtgatccacccacctcaggctcccaaagtgctgggattacggcgtgagccactacacccggacagaaaacagattcttattgcacttatgcaaacatgttgccaggaatgaagaacattcacaactaatttacaarttcttgagcaattaggcagagagagaaataagcctcaaattctgtttacaagagtatactctactcaattgttaaagggtataaatagctcaaaaaaaaaagctctccagactctgaagaatcagcaatgtttgtaataaacaacatcaacaaaaagcaatamaaatttatttcagtcctccattagtccaatccatgcaatcaactccctgctgtgcttcaaaataggtcagcaatatttatgaacatgtcagcctttccattcatgccctggaaattttctctctcatccaatggcacaatctccaaagttatcagaaatctgcatttaagagtccttttyggctgggaacggtggctcacacctataatctcagcactttgggaagccgaggtgggcagatcacttgaggtcaggagttccagactagcccagccaacatggcaaaccctgtttctaacaaaaatataaaaattagtcagtcatggtgacacacacctgtaatcccagccactcatgtggctgtggcaagagaatcatctgaacctaggagacagaggttgcagtgagccaagcttgtgccactgcattccaacctgggtaacaaagagaaaatctgtctcaaaaaaaaaaaaaaaaaaaaaaaaaagatttttttttttatgaactctcccaaagacccgtgtctcatgaaaacaattcattttgattgtcatcttctactgagtctgaagataagacttcaactggtgttaatgcttaagatttagcagggggtggtggctttttcagactcaggagtcaaagaagcaagccctggactgtagttataagtcattttttggagaagaatcaaagcaaaagaaaacaataataggtgacaaaatcttaagacagccatagttaaagacacagtcaacaaggaaatttgcttatttctgtggcatacaacaattataataatcataattactactgacaatatatattaagacatacgagaattttaaaaatctcatagagtattttattaacattaacaacacatctatataaatacgacccaaaggaagctaaacaccacctcagatttgacaatgcttcctacatagctctaacataacaaataagtctaataagcctaatatgtctctcttggacttcaggaaactaattttaattaaattaaaattgaattaattttgtgattaattttaactattaaaattttaatcagttccaccataaggaaagatttccatcaatgttttataacctttttttttttttattaaagagtagatctatgttccaagaaaactctgcttttccaatacaagggatcagatgctggccatgcatcagtgtgcttttgatattaatgtctgatttatagagaaactccaggcycagtgtggtggctcacacctgtaatcccagcaccctgggaggccaaggcaggtatggtggtgtgcatctgtggtctcagctattcaggatgtggaggtgagaagattgcttgagcctgggaggcagaggttgtggtaagccgtgatggcgccactgcactgggtgacagagggagaccttgtctcaaacaaacaaaaagaaaaactgaactaatcttctccctcaaaatcagcccttacagtctcaggcaaccacctctactttgatagtccctgggcctagagggattgagtggtttttattcctggacccatgtctcatgaaaacagttcattttgattgtcatcttctactgagtctgaagatgagacttcaactggtcttaatgcttaagatttagcagagggtggtggctttttcagactcaggagtcaaagccctgaaacttaacagaactagcattaggtaatgggatatttataccacagaaagtactgtcattctctctaacatgtcacaaatgaaaacactgtgatttggtgtccaagagttactgtctgcagcacttcaagacattttattaatgtaaccaagttattcattgcatatatctaattgctagcattctagtgacaactgtcaccaaaagcttcaaaaagtgatagatcctatgtcaaacttatcaaagtaagataacgaacttttctctccatcattaaaaaatggcaaacacaaatatcagttttggaaattcaatatgaggctaaataatctcccttcacttaatattataggacaaaacaaggacaaagtaaaagcaggcacagaataatttcttttcagctattttgaaaaaacgtcatcacacatttctaagattggtttctagataacatactgacaaccgattgggtaacttttcattactaaaatcttcaaaccagtgcaagatttgtatatattttgttttaaagtacatacatgaaggctcatcagtgatagataaatggcctaggattaaaaataactagaaaatggctggaggtggtggctcacatctgtaatcccagcactttgggaggctgaggtgggcggatcacttgaagttagaagtttgagaccagcccggccaacatggtgcaaccccgtctctgctaaaaacacaaaaattagccaggtgtggtggcaagtgcctgtgattccagctacttgggaggccagtgcatgagaattgctcaaacccaggaggcagaggttgcaatgagccaagattgagacactgcactccatcctgggcaacagaatgagactctgtctcaataaaaaaaatcactagaaagcctcacattttaaaattactacttaatccaaatgaatgtcacttaagtttaataatggtcaacacaactaaattagtttgaaagaaatcccaatccatgtartttccttatggaaaggccaattgtttctgaacattaaaaatgtgtgcccataacacagtgttttctcattacctgaaggaaaagatctgaaaccaattcaaattattgattgaattgaattaccttggaaataaacactatttaaacatttttattctcatctaccttttcaaacaagaaatgtactatttctgctcagaacttttaaaataagtcttttaattattttggccagaaaccttaaatcttttatagctctctagattactagaggtaagcaaaacgaatcaaattttaaatagtcagtgccctttatcaatttttacaggcttgacaaaggtagcttaagaactttagataaatagagcaaacaatgaattattagaaactcatagaaaacatgatgactattcataggaccaaataaaagcctttcttgggaaacctaaaacacatcaattgtttttatatgtatatataagtaaaacccaaaagagaaaagcaaataaatgaaaattagaagcaaaaataaataaacaggaaaccaatccccaatttttctcctactcagtttaccttagaggttaaagtgttaccagaacctaaaaatatatatatatggatattttgttcctgatacacaatttgatgtttttaagttcaccattaacagtacacattttgtgcaattaagaaattcactttaggtacatgaccaacaagcactttactgatagtactatctatacagaattgcaaatatagcgtgaagcactgcaagcatgtgtgaaatttggctgcaagctaaatctggcttcatgcttaactatattaaaaaataattgccagccgggcgcagtggctcatgcctgtaatcccascactttgggaggccgaggcaggtggattacgacgtcaggagttcaagaccagcctgaccaatacggtgaaaccccatctctactaaaaatacaaaaattagctgggcatggtggcatgtgcctgtagtcccagctactcaggaggctgaggcaggagaatcatttgaacccgggaggaggaggttgcrgtgagccaagatcatgccactgcactccaggttgggtgacagaacaagactccatctcaaaaaaatgaaaataaaaaataataataataattgccaaactgccaatgtgtttctttataacatttcttcttttactttcgtcaacactaagacctttaactctgagcaatgttaattagccaaccttctccaattttctatcaggttttaaagaatattttattatctaaactttttcatctttccattttctttttatgtgcatgaagatagatacagagaaacagaaaaaaactgcaaatgacttacacagatcatctatggcatgcttgaagtttttgttttgtcctaaatgttttctttttttcttttcttttttttttttagtaatgattcattttactttagaaaaaaattcrccaaacaaggtgctttctcatacaaaattattatcttttctttataaccytctttatgaaacatacgtcttcttttttttcttcttcttctttttgagatggagtctcwctctgtcacccaggctggagtgcagtggcagcaatctgagctcactgcaacctccacctcccaggttcaagcgattctcctgmctcagcctcccaartagctgggattacaggtgcatgccaccacacccagctaatttttgtattttagtagagacagcatttagccatgttggccaggctgatattgaaatcctggtctccatactttctttcagatctttccttgtattccctccccacaaccctggatagttcactccaattcttcacactaataatccaggagctatggctgcagggcacctttcaacatttcactcctactcaaatctcctttttctcctcttgtcttctttgtctgtgggatgttctaagtccccacccccaacctttggcagttgggcacccttcgtyaacctgccacacaacctccttagccaagccagcctcccctctcctctaactgctggttatgcatatccccacagacccaatggttcaccgccatccctgcagacttacacacctggaccctgtctgtcataaccctatacctcacatatgagggcattccatttacagaaactttttataccctcagccatttaaacaccttccctccacaaacatttcactctttccaaaaccctgaacgcagggctgttaccctactataactccttaatcctcgtctatccctaacagaggcaaatccccccagaccacccactgaaggccttatttccacccagacgtcactcatagctcagggccccctctgctttagctgattcttctccaaccccctcataagactctaggggggagcctacttccatccctgtgcaacttcaccctcactctcaacccatctcaggatcatcaaaatcaccaaataaatcactgaatagggtcttcctcagccttcaaaaatctactgttattttctggccccyctttcatctcagcacccacttcccttatcttctcccccacccctctctgtcagcgacacccaccaagtgttaagggactcccttggaggaaatgccatgactcctctctctcatgcttcctccatcccagcccttcttccaactcacaatggctgttagtggacagaacctcttttttcctttccctgcaaaatcacatttccttcacctcttcccccactgacataccttatcagcttctcactggggccgcccttgcagatggcttttcaatatgagagaatgagaaaagcatccgagagggcttctctgaagactcagctcccatttccttatggtttgccaccataacctacaacatttgtccgtccaccccacgtgtcttcttcctttgtggcaggaactcttatctctgcctaccaaccaattggtcaggagcatgcaccctagtgtctcaatctccagacattaacatcctgccaaacaaccagaccatccaggttcctttagtgacccctatctcatcctcttccacatgcagtaggcagggtctgcatctcattcccttgttaagagggttaagcatctctgccacactcagcaccagaacagcaggtgtatcaacctcgacggcctatatcaaaaaatctccacagtcctttatagtaccctagaggacatgcatacctccattacaaacctccagaggcagatagactccgttgctggagtcgtcctccaaaactggagggccctagacctgctaatcactgagaaagggggcacatgtatatgcctccaaaaagaatgctgaggtgtttttttgtttgtattttttttgagaaggagtctcgctttgtcgcccaggctggagtgctgtggcgtgatctcggctcactgcaacctccacctcccaggttcaagcaagaatgctgttttatgttaatgaatctggcattgattgtgacacagcccgcaggctctgtgacagggctgtagaaatctgacttcaagtcactgactcttggtggcaggggtcattcctcctaaagtggatgcgttgggatgtccctttcttagggcttctaatcttcctcctcctaatactaacaattggcccatgcatactcaccttcatatccctctttatctcccaaaggctgaactstcttggccaggcaaacacccagaaacatattgataccatccttctcctccaccaagtccagtatcagagcctccgtgaaagcgactctgaagtccgacatccactgcttcaaaacccaaaccctgatttcagcgcccctactcagcaggaagcagtcacataatcaacaacgcctctattcgttttatacagaagtaaaagacaggaatgttagccaagctgtgccatcctgtaaacccctgccattatggacaccctcgccaggatggaaaattccactggggcctaggccgtggaaacaaccaggcaggtcccaggcccaaccacctgaccacrggaattttctcccttttcagcagctagcggcactacccccatcccgttttgcaacacttccctccctccccgccggacctataactgccctagtctgtaagcggggctaggactcctgcgctcagtggtgtctctctccgcagatttcctcatccaataaacgcgtgttactgtccagccaccccaacccttgtctctgtctcttttctgcctcttamcaatcacttattatcaggaaaatgcaaattaaaaccacaatgagataccaccttactcctgcaaaaatggccataaattaaaaatcaaaacatagtagatgttgtcgtggatatggtgaaaggggaacacttgtacactgctagtgggaacgtaaactatgcaaccactatggaaaacactatggagattccataaagaactaaaagtagaactaccatttgatccagcgatcccacatcagaggaaaagaagtcattataggaaaaagacacttgcacacacgtttctagcagcacaattcacaattgaaaaaatatgaaaccagcataaacacccatcaaccaatgagttaatttttaaaatgtaatgtatatatatacatacataccatggaatactattcagtcatacaaaggaatgaaataatggcatttgcagcaacctggataaagttggagaccattattctaagtgaagtaactcaggaatggaaaaccaaacattttatgttctcacttacaagtgagagctaagctgtgaggatgcaaagacataagaatgatataataaactttggggactcaggggaagggtgggaaacagtgagggataaaagactacacattgtgtatagtgtacaatgttcaggtgacgagtgaaccaaaaatctcagaaattaccactaacaaacttatccatgtaaccaaaaaccacctgttccccaaaaaacattgcaatttaaaataaataaattttaaaaagaaatatattgcttcacatcataactttgtcttcattggaaatgaccttgacatccaatgagcatcaaaaataattttaagattttcaatgacacaaagagttcacctgcaacatttatcttatttacatggactcaattctttcatttttaacaatttacttggattacttctgaaaattgagattttttttgaaaactgagatattagacacagctagataaacttagttatttccttgttaatcagtctttttaatagcccgtgaacatcaggtactcacctaagtaggaatcttaaaggtaaatacgtagatatttttcccgtaactcagaagattcactaacaacattaaattagtctcacttgtcaaaaaaggcacataaaccaagattattttgttttttctgggttcatagttgtataacttttttttttttgagatggagtttcactcttgttgcccaggctggagtacgatggcacgatcttggctcactgcaacctcygcctcccgggttcaagcaattctcctgcctcagcctcccaagtagctgggattacaggcatgcgccagcacaccttgctaattttgtatttttagtacagacggggtttctccatgttggtcaggctggtctccaacacccgacctcaggtcatccgccccgctctgcctcccaaagtgctgggattacaggcatgagccactgcgcccggccccatagttttataactttctatgccaaaccttgaggcctcaaaatatctagcagagacaaatataaaatccagacaaaaatttatgctgacaattctgaaggcctttctattttttcattttaccaataatcttaaagcctttttaaaggtttacctaagtcacatgaacttaaaaaatgcttttggtttaatttatgagcgctcttttatttataagccaatttggcaaacacaacatataataaatgtacgtacaaaaacacatctagacatgtatacacacacataaacaaagatccagtagtttaacctcagaagtctagccataagacagcaatactaactcactggtttacgtggctgcactttgtttgccctggtaggtaatccaatgaaggctatcaaccaaaatttttggtaaagcagtttccatggcagtttgatttttaaaggccaaacctccccagactctaaagaatagtggggccaaacagcaccacagaaagacgtcacatactaatcaggcccagccctgcttagaacaacagcatcaaagcctggatacatggaattccattccaatttcccactcaacagcaaacttcagatttcaaaaaacacttgggccaaacagtattaccagataacatcagtttatcaaactctaatttcccatgatttgcctggcgtggtggctcatgcctgtaatcccagcactttgggagcccaaggtgggcggatcatttgaggtcaggagttcgaaactggccttgccaacatggtgaaaccctgtctctaccaaaaatacaaaaattagctgggcatggtggtgggcacctgtaatcccagttacctgggaggctgaggcaggagaattkcttgagcccgggaggtrgatgtggcagtgagcagagatcgcrccactgctctccagcctgggtgacagagtgagactctgtctcaaaaaataaattaattaatacattaaatratttctcatgactatattaacacacacaacaatcaccaaaatacaatccaactgctgcagcagcaagcaagtctggagagtgtccacactgaaagaatcagcgtgcttcctctctccatcagttgggcttgatcgacctacaaacaaaaattccttcgtaatttctcagttgagaaccaatcctgttgtctggtacccacaaaagacactcacttgcctgggctcacacacaatgcacaattacacaacaatccctcaggaatgtccactctaaaacagggcatttcctctctcagccagttggccttgttcaacctacaaatggaacttcctttaaaaatttcccaagttgagaggagcagatcctgccgtatggacccacaaaggacattcacctatcaggatacagatgtcaaatttcaaaggctattcttcccaggcaatcgggaacatagctggggctggctgcagtgtggccagggagagacagaaactcacctccagccaaaattgggttggtagcagcttaggagagcttctgagactcccagcccttggcagccaagccatgagcaatgcattcccagtcagggaaccaaaatctgttaccaaaacaccaggggttcagtctaggtcgggcttctggccacaaaggaagccaatcactgagataatgattattgcagcctaggaggtaggagatcagtctcaaatccatctccctgactgactaaaattaggggtttatatagcaaggaagaaatgtaaccatgtatgtgaaaacaggaactcaggacgggtaaggaagcaattgtgatgaatgaagggactggggtatcattgtttagatgtgatgatccagtgagtttcagttctttgttaattctttttttttttttttttttttgagactggcgtctcactctgttacccaggctggagtgcagaggcatgatcttggctcactgcaacctctgcctcctgggttcaagcctcctcctgcctcagccacccagtagcagggattacaagcacatacaaccacgcccagctagtcttttcaccatgttgattaggttggtctggaattcctaaccttgagtaatccacccgtctcagcatcccaaggtgctgggattaaaggcgtaagccactgtgcctggccaagttttagttctttaatactttttgagaggcctgggagttctttcctaaaaataaaaaaataaaaactcacataaaaccataagtttcaagctttaagacaagaagagcccatttctagtttatcaaaaaaaaaggctgtcaatgaaactattgggtcagtttcagtcagcggtcccttagcagtggagaattaaataaatcagcctattgttcaatcaaagctgtagttatggctcttggaacagagaagctcggtatctaatggttggtgaaccgcaactgcttcaacattgcttatctcgaggccagtgcttgtttagctgctagagataaagaaaacccttgtggcagttagagcacagtttattcttttttttttttttttttttttttttttttgagacaagagtcttgctctgttgcccaggctggagtacagtggtrcaatctcagttcactgcaacctccgcctcctgggttcaagcaattctcctgcctcagcctcctgagtagctgggattacaggcacacgccacagtgcctggctaatttttttgtatttttagtagagacggggtgtttcaccatgttgaccagrctggtcttgaactcctgacctcaagggatcctcctgcctcttcctcccaaagtgctgggattacaggcgtgagccaccatgcccagcgcatagtttattctttaagtaaaagactgcgtgaaacttaatccatgcctcacagtgccttaggtcctgtttactaatttggttttattgccaccaagagttcattttgtcagtctcatgatctccatttaaatattaatgctggtcagctgtgtctaaaccacaaaagtgagaaatataatgaggtatgtctgacatcccatctcatcacggctgggaactcagtttttggggktttttttgctttttttttgagacagagtcttgctctgtcacccaggytggagtgcagtggcgtgatctcagcacactgcaacctccgcctcccaggttcaagcgattatcctgcctcatcctcccgagtagctgggattacaggcatccaccatcacgcccagctaatttttgaactttttgtggagacggggtttcgccatgttggccagggtggtctccaactcctgacctcaggtgaccccccacctcagcctcccaaagtgctgggattacaggtgtgagctaccacgccctgccagaactcagtttttaaggtttctctgaggtccctttgactaaaggggtcagtccattgagttgtttgggggacttggaattttatttttagttctcacaagagtgtacagaatcgctgttatatagaataagtgtgtggtgacaggcatggaatcagctgtcagacggccagggtcggagagctgaccctgggctctgaaccattctacaccaaaggttcttacctgtaaaatgaggatgaaaatgtgatattaaagaattaaagaagaaaattaatctcaatgaatagaagataggatttgaaaaggtgggttctgtaaataaatcaaaaaagcatgactagggtggwggcgtgattagggtgggcacctctgagtatatttaaagtaattcagctttacaattcattattttttcagttggaaaggccctggactggagyttcgacatgtcttcccaaggtgagtgcctttggtagagaactcaatgtgttttgttgtgagaagactgtttccatgaaaatgagggttttgtagggtttcaacttttaccttataatagtgaagattgtgggcagtcagtttgatattattcactgggggtacaacaggacactgcagcttttagataggactaggcatttaaaaattaaacccaattatgattcttgtttataaaattctttagtttttagacagacaaaaatacctacagatcaaattttattaaaaggtaaaaaatcttggggggaagtttgaatggatgggttctagatcagacaaagactggctgtgtattaataattattaaagcagagagcaattgaggctggaagcagtggctcatgcctgtaatcccaacactttgggaggcagaggtgggaggatagcttgagtccagaagtttgagacaagcctaggcaacatagcaagaccctatttctacraaagaaataaaaattggccaggtgtggtgcatgcctgtagttccagctacttgggagcctgaggcaggagggatcatctgagcccaagagttagaaactgccataagctatgatcatgccactgcactccagcctgggtgacagagtgaggccttgtctcttaaaaaacaaaaatgtcccaggtatttttttttcctagctcacaaatatggcagttttttattctgtgattttgttcagaaatattgtgagaacttccatatgtaaagtatggaagaagctttgtcactctttctttgaaaacagttgaagcatgctgggttaggcttaggtttattgttattgatgacccctggatggagcgagaaggtcacgtgtaacgtaagctcactgtgtgttttgtatttttcttttttyttttggagacggagttttgctcttgtcacccargctggagtgcamtggcgcgatctcggctcactgyaacctccatctcccaggttcaagcgattctcctgcctcagcctcccaagtagctgggattacagacgcccaccaccacacccagctaattttagtatttttagtagagacggggtttcaccacattgctctggctggtctcaaactcctgacctcaggtgatccacccacctcggtctcccaaagtgctgggattacaggtgtgagccaccatgcctggcctgttttgtatttttcaaatcttgccccaccactgtatttgtcctggaggcaaaatctacagcaaagagcacccagagtaacaatggcccaaccataaaaactttgggatgaaaggttcaccacaaagctttgataggaatgagctctatctcagggacctgggagtagccccagaacttggagtgtggcgtgaaggtagcctcagtggctcaccactgtttgatgctctaggacaagacttccaaacattttttcttcggtgaatttttgttccctcctctttctctgaaaacccagtttcccaccaccatttgttgaaaagatgattatttccccacaatgattattttgacacctttgttgaaaataagttgtctggaaatgtgagggcttatttctaaactctcaatgcaataccattgatattatatataatattataatattgcatatacataattaaatataatatcaatgtactgggcacggtggctcacacctgtaatcccagcactttgggaggccaagtcgggcagatcacgaggtcaaaagttcaagaccagcctgaccaatatggtgaaaccccatctcttttttttttttttcttttgagacagtctcactctgtcacccagcctggagtgcagtggcacgatctcggctcactgcaacctctgcctgctgggttcaagcgattctcctgcctaagcctccygagtagctgtgactacaggtgcccaccaccatgactggttaatttttgtatttttagtagagacggggtttcaccatattggccaggctggtctcgaactcctgaccttgtgatctgcccgcctcagcctcccgaagtgctgagattacaggcgtgagccaccgcacccggtggtgaaaccccatctctattaaaaatacaaaaattagtcaggcatggtggcgtgcgccagtactcccagctattcaggaatctgaggcaggagaatcgcttgaacccaggaggcagaggttgcagtgagccgagatcgtgycrctgcactccagcctgggagacagagcgagactctgtctcaaataataatatcaatggtattgcatatatatatagtaagttttaaaatcaggaagtatgtatccatctttgttctttttcaagattattttggctatttggggcctcttaaattttcatatgaattttaagatcagcttatcaatttctccaaagcagttagctgggattttgatagggatttttactttgtattgtatctgtggatcaacttgaacataattatattagcaatattaagttttctgaatcttgtacataaactatccatttatttaggtctactttaattttattcaacaattttttttcaaagtacagattttgcacttcttttttttttttttttttttttgagacggagtctcgctctgtcacccaggctggagtgcagtggtgcgatctcggctcactgcaagctccgcctcccgggttcacaccattgtcctgcctcagcctcccgagtagctgggactacaggtgccygccaccacacccggctaattttttgtatttttagtagagatggggtttcactgtgttagctaggatggtctcaatctcctgacctcttgatccaccccccttggcctcccaaagtgctgggattacaggtgtgagccaccacccccagccaaagtacagattttgcacttcttttgttaaagttattcataagtattttcgtctttttgatggaattttttcttttcttttatcttttttttttatctttttttttttttttaagacgagatctctctctgtcacccaggctggagtgcagtggcacaatctcarctcactgcaacctccgcctcccaggctcaagtgatcctccaacctcagcctcccaagtatctgggaccacaggcacacaccactgcatccagctaattttttgtatttttggtagagrcagggttttgccatgttgcccaggctgatckcaaactcctgagctcaagccattcgcccccgcttggcctcccaaattgctgggattacagttgtgagccacaggtaggatgttctaatcttgctttgtgcctttctgccccagacctagaatcagccatttactaagaaaactccggtttcttttaataggaattggtattatcaaactatagtttaggccctaggtgtgctggttactaagggggtttaatggcttctggacctttcaggtagacagacctaggaaattatttttaagtgatgaaattaaactgatatctccaagtcagactttttttttaatttttttttttgagacaggattacatgcctgtaatcctagcactcactctctcctaggctacagtgcagtggcagtatcaccattcactgcagcctccaaatcccaggctaaaggaaacttcccacctcagcctcccaagtagctgggaccacaggcatgtgcctccatgcccagctaatttttatatttttcgtagagaagaggtttcaacatgatgcccaggctggtctcaaactcctgagctcaagtgatctgcccgcctggtcctcccaaagtgctgggattacaggcatgcgccaccacacctggcctccaaatcagaattgactacacaaggtcacaaggttccctttttcttttttttgtctttttttttttttttttttttgagacaaggtcttactccgtcatccccagctggagtgcagtggcacgtgcacggctcactgcagcctcagcttcctgggctcaagcaaacacctcagcctcaggagtagctaggaatacaggcacgtgccaccacacatgctaatttgttttttgcttttttgttttttgtttttgtttttgttttttaaaactgaggtctcattttgttgcccaggctggtctggaactccaggcatcaagcaatcaagcagtctgcccacatcagcctcccaaagtgctgggattagctgggtgtggtggctcacgcctgtatcccaacactttgggtggccaaggcaggaggattgcttgatcctacaagtggagttcaaaaccagcctggtcaacatggtgaaggcctgtctctactaaaaattcaaaaattatccgggcgtattgcaagcctgtagtcctacttgggaggctgagttgataagatcacttgagcccaggaggtcaaggctgcagtgacccatgactgcaccattgcactacagcttgggtggacagagtgagtctctatctcaaaaacaaaacaaaacaaaaaattataaatgctggcattacaggtgtgagccactccacccggcatacacaagattctttcttaactttcctactgtacatttgtggccccttctcttacagtgaatgccctggttcaatttatattcacttgctctgtcctacaatacgtgcgaaattattttgaaattgtaaaccaatgccaatcaaggaaattttttttttttttttgagatggagtctcactctgtagcccaggcaggagtgcagtggtgcaatctaggctcactaaaatctccgcctcccagtttcaagcgattctcctgcctcagccacctgagtagctgggattacaggcacccgccaccatgaccagctgatttttttttttcttttttttttagtagagacggtttcaccatgttggccaagctggtttcgaactcttgacctcaagtcatccgcccacctcaggctcccaaagtgctgggattacaggtgtgagccatcgcacccgttagattaatgagttttttagcatgtcccaggtgacagcatggctcgccccattctagccacatctttgccctttattagcatgcaaaagccatccttacatggctgcaagcccccctgatttggattccatttactgtctcaccttgcctcctctctctttttcagtcacactttgtactccattcgtagtgtcttccttgctatttctagaacattctagtctttctcagggctcggggcttttgcatcagtgtttaacaccagttacttcattcataaatatttgttttaattcacccatttaaaaaatatttattgtgtttctatttggggttttttgttttcaatcagcctatgttgtgctttaaagtgtctatttttataaggcactactttaggctttcaaaaaatagtaaataagatagactaaaagccatgctctctggggcttccagtctagtatgtttgtagagaagtgaagggaagacagatggtgtcatcaacacgtgaattatttggtaattttgagtcacgatagtgttacagagaaaggaactaaaaacagtaggataaaagaaattgagaattctgatctggaaaggtatttcaatttttttttttttttttttgatacagagtcttactctatcactcaggctggagtagagtgtagcgatctctcctcactgcagcccctgcctwccccaggctcaagcgatgctcccacctcaacctcccgaatagctgggattgtaggtgcacaccaccacgcctggctaatttttgtttcatgttggccaggctatcctcgaactcctgacctcaagttatctgctggcttcggccttccagaatgctgggattataggcgtgagccggcgcacacagcctgtttttccatttttaatagggtggttagggtaggactccctgggaaagtgagttttgaacaaaggcatggagggaggtgagggagtgaatcaaggggatcagaagaggaagaagtggagaccttcccaggaagagagaatagcccgagtggagattcctccaggtgttcaaaggacaagcaaagagactgacatagctgcggggcactgagtgagggggaaaagaagaagcsatgtcaggaataaatttacagaagggtacagattgagtaaggcttgaaggctattaaaaaataaaattttacgcctggcgtggtggctcatgcctgtaatcctagcactttgggaggctgagaaaggtggatcacttgagctcaagagttggagatcagccttggccaacatggggaaacctcatttctgctaaaaatacaaaaattagctgagggtggtagtcccagctactcaggaggctgaggcgcaagaatcgcttgaacccaggaggtggacgttgcagtaaatagagatagcatcactggtctccagcctcggmgacagtgagactccatctcaaaaataaacaaatcaataaacttttaactgaaatatactgtgcatgccaaaaatagcaaatatttacacatgtttaatttaacaaatgttcacaaaccagctacactcatggaactcagagagcactcagatagagagaacttagtggcacccagaggcctctgttctctccctttcaggctccgattccgttccctcagtagcccatatcctgccttccaatcagtatagatcagtttttcctgttgtatattacagtgatgaaataataaaatattcttctgcaattagttctaattttaaagataaattctcagccggcgcggtggctcacccctgtaatcccagcactttgggaagccaaggcaggcaaatcacaaggtcaggagttcaagaccagcctggmcaacatggtgaaatcccgtctctactaaaaatacaaacaattagctgggcgtagtggcaggtgcctgtaatcccagctacttgggaggctgaggcaggagaattgcttgaacccaggaggcagaggttgcagtgagccaagatcrcaccactgcactccagccgggatgacaaaataaataaataaataaaagataaattctcaaatccagatagtaaatatgttaggctgtgtggaccctggacacatctgagcctcaactaccgattccgctattgtggcttgaaaacrgccatagacaasacataagtaaaagaatgtggctggtgactggtgtttcaaaaaaactctatttacaaaaacgcaactggctggatctggcccataggcctagagttagccaattcctgctttcatgtgtaattttattattgtgagtagctatgaggtcacgcctggatttcaacttgggaaggggagggaatcaatggtgctaacactcttctttggtctggttattaccaatattctccaatgctcttctcgctacttatacttttgtcagctttcccagctgaagaggatcatcataatgaagaaagacaaacaaagaaaaaaagaaaaacaaaacaccgacataaattttctgaagaattattgcaggaacttaaggaaatatttggagagaacggttatcctgatttcaccactaggaaaacactggccaacaaatttgattgtccggttaacgtgataaacgtaagttcaacctcgtatgcatgtttcttagatttttttttttttttaggaaaggtctcactccagtcgcccagtctggagtgcaatggagcgatcacggctcactgcagcctcaacttcctgggctcaggtgactccccaacctcagcgctccccatttagtagcaaggactacaagctcccaccaccacactgggctttgtattttttgtaaagatgggagtcttgccatgttgcccgggctggtgtcgaactcctggggtcaagcaatgcacccatctcggcctcccaaagtgctgggattacaggcgttagccaccatctccagccatttcctagaaaattaaagggcaataagtatagatggaggtagaagccagaagattagataaaaaggtacagaattcaaagaaatgggagagagtaatcaaaatatatacatctatacaattaatcctccacatccactggttccacatgcacggatttaactaaccacaaatggaaaatatttggaaaatttaaaaaaagaaaataggctgggcccagtggcacacacctgtaatcccagccttcatcccaccactgcacaattaaaaaaaaatacaaattttaaaacaatacagaataagaactacttatgtagcatttgtgttatattaggtattaggtcttgtaagtaatctagagatggttttaaggacatgagaggacatgcccagcatatatgcaaattctacacagttttatgtaaaggacagaaacatcctcagatcttggtatccagaaccaatttgagagaaaattgtacacacacacacaatatgaaaaatataggcctgttgcggtggcttacgcctgtaatcctagcactttgggaggccacagtgggcgaatcacgaggtcaggagtttgagaccagcctgaccaacatggtgaaaccccttctctactaaaaatacaaaaattagccrggagtggtggtgcgtgcctgtaatctcagctacctgggaggctgagrcaggagaatcgctggaacccaggaggcagaggctgcagcgagcagagatcccgccactgcactccagcctgggtgacagascgaggctctgtctcaaaaaaaaaaaaaaatatatatgtatatatatakakagagagagagagaattaagcagtatatagcatttcatcacataggaaaacggtattattatctatgtatgtttgtgaaaatacagtgggtatgtattgtgaaaactagactgcagtgaggcaaatttggaagcagtggatgagttgatgctgctgtagttagtggtggtgacggtggtttgggccagcttgctagctgtgcaggtggatgggactaatgagactgtagatgtttgagatggagctgacraagtttactatgtgtgggatatgctgtgaaaggtaaggtggactcaaaggttacttggatgcttgacttaagtctatggaagataggaattgccttttactaaggaggggacctaggtaggggcaggtgtgtcagagaaatcaaagtttacattttggacacatgtttcacatgtcagataaatatacaagtggaaatactaagagaacatttgaatatgcaagtctgaaattcaggggagggcacttagtagaagatacaaatttgaaaattgcctgtttatgaataatgccctgggatctggcacaagccctagcagagtggtaagggctttacaattatctgctgcatgaaccaatatttgtggacatttttctgatatcatagaatcagttgagaaaatgcctgttaatcactataaaaattgattgaactagagttatattttataagagaatggcaaagatttcccttgctctctgtgttctgtaatagtgcagatttattggttgcttgaaacttggaagaaagtgcccattaatataaactagaataagaatacagatcaggttttatatgaaaaaaatacaaaaatattgtgtaagtaatttcattactaatttttttctaattttttttttttttttttggaaatggaktctccctctgtcgcccaggctggagtacagtggcatgacctcagctcactgcaacctccacctcccgggttcaagcaattcttctgcctcagtctcctgactaactgtgactacaggcacacgctaccacacctggctaatttttgtattattagtagaggcagggtttcaccatattggccaggctggtctcgaactcctgacctcaggtgatctgcccgcctcagcctcccaaagtgctgggattacaggygtsagccaccacacctggccagtttgaagaattttttaacttccatcttgatttcactgttgacccaatgatcattcacgaacaggttatttaatttccatatatttgcatggttttgaaggttccttttggagttgattcccagttttattccactgtggtctgagagagtcctttatataatttcagttttcttaaatttattgagacttgttttgtgacctatcatatggtctatcttggagaaaattccatgtgctgattaatagaatgtacattctgcacttgctaggtagaatgttctgcaaatatctgtgaagtccatttgttccagagtatagcttaaatccattgttttttgttgactttgtcttgatgacctgtctagcgctgtcagtgaagtattgatgtcctccattttttttttttttttttttttttgagatagagtttcactcttgttgcccaggctggrgtgcaatggcactatctcagctcactgcaacctccatctcccagrttcaagcaattctcctgcctcagcctcccacgtagctggaattataggcatgtaccaccacaccaggctaattttgtgttttcagtagagacttattggccaggctggtcctgaactcctgacctcaggtgatctgactgcctcagcctcyaaagtgctgggattacagtgtgagccaccacgcccagccatcctccactattattgtattgctgtctatcccatttcttaggtctggtagtaattgttttataaatttgggaactccagctttaggtgcatatatatttaggattgtgatattttcctgttgtacaaggccttttaccattatataatgtccctctttgtcttttctaactgctgttgctttaaagtttgtgttgtctgataaaaaatagctactcctgcttgcttttggtatccattgccatggatgtccttttycacccctttaccttaagtttatgtgagttcttacatgttaggtgagtctcttgaaggcagcagatatgtgattggtgagttcttatccattctgcaattccatatgttttaagtggagcacttakgccatttacattcaatgttagtattgagatgtgagrtactattccattcattgtgctatttgttgcctgtataccttggttggttggtttgttgggacagagtcttgctctgttgcccaggctggagtgcagyggtgcagtcttggctcactgcaacctcttcctccccggttccagtgattatctcctgtctcatcctcccaagtagctgggattacagacgcctgccaccatgtccagataatttttgtatttttagtagaattggggtttcgccatgttggccaggctagtctcaaactcttgacctcaagtgatccacccgcctcagcctcccaaagtgctgggattacaagcatgtgccactgcacctggctataccttggtgtttttttgttgtataggtcctgtgagatttatgctttaaaaggctatgttttgatgcatttccaggatttatttcaagatttcagagctccttttagcagttctcgtagtgtggcttggtagtggcagattatctcagcatttgtttgtctgaaagactatatcttttcttcatttatgatgcttactttcactggatacaaaattcttggctgataattgttttgtttaaggaggataaagatagggccccaatcccttctagcttgtagagtttctgytgagaaatctgctgttaatctgataggttttcctttataggttttctggtgcttttgtctcatggctcttaagattctttccttcatcttaattttagacgaacttgatgacaatgtgcctaggcaattattttttgggatgaatttcccagatgttctttgagcttgtgatatatgaaagcaggcacttgctttttttggttagactctcatgagcgctgcctcccactggctctataatctctgacaaattcttgactctcctagtgccttttctgttgcttagaacagaatatctgaaattgagtgatttataaagaaaacatttatttcttatagttagggaggctgagaagtccaaggtcaaagggctgcatctggtgagagttttcttgctggtggggaccaaggtggtacagggtatcacatggcaaggtggctgagggtactagctcaggggtctcttactcttgtaaagccaccagtaccactcccatgataacccattaatccattaatccatgaatgtgttaatccattcatgagggcaaagtccttgtgatccaatcaccttttaaggcctcacctctcagtgctgccatgttgaagattaagattttggggttttgtttgtttttctttctttcttttttttttttttttttgagatggagttttgctcttgttgcccaggctggagtgcaatggcacgatctcacctcactgcaacctctgcctccccagttcaagcaattctcctgccttagcctcccaagtagctgggattacaggcacgtgccgccatgcctagctaattttgtacttttagtaaatacggggtttctccatgttggtcaggctggtctcaaactcccgayctcaggtgatctgcccacctcggcctccaaaagtgctgggattacaggcatgagccactgcacccggctgaagatacagttttataaaacaaaagtatctgagacagatcttaatcaatttagaaagttttgtcaaggttaagaacatgcctgtgacacagcttcaggaggtcctgatgatatgtgcccaaggtggtcaggccacaacttggttttatacattttaggcagacataaggcatcagtcgatacatgtaagatgtacattgcttgggtctggaaaggcaggacaagtggaagcaggggcttccaagtcataggcagattcagagattttctgattggtagttagttgaaagagtttttatcactagaaaggaatgtctgggttaccataaggaattgtggagaccaaagtgttgtcatgctgatgaagccaccaggtaccagatttcagaatagactgtaaatgtttcttatcagacttgaagagtatgttttatgtttctttttttttttttttttttgagacagagtcttgctctgtcgcccaggctggagtgcagtggcacgatctcagctcactgtaagctccgcctcccaggttcatgccattctcctgcctcagcctcctgagtaactgggactacaggtgcccgccaccatgcccggctaattttttgtattttttttagtagagacagggtttcaccatgttagccagtatggtctcaatctcctgacctcgtgatccacctgcctcggcctcccaaagtgctgggattacaggcgtgagccaccgcgccaaccttgttctatgtttcttatcatacttgaggagactgttttatcagtaatcccaaaagaaaggagggtataatgaggcaggtgtggctcccctttgctatcaaggtctgaactagtttttcagttaactttggacagcccttggctgagaggaggggtccgttaagatggttagggggccttagaattgtatttttggtttacagtttcaagatgagttttggtgcggacatttaaaccatagcactcctgcacctcagttttctctaaaatatgtgtaattttctctgtcataggtgcttggttcattgtgcctagtcatggttttgttttaaacaattatcctgtgtgtggatcaaagatccttgtagcttcagtgctcctaatagcctaaagcaattctgaatttagtagcacagggcatggaaatataaaaatgagaggttcctgttagattatgcaagtaacttaccctgtagcctgaactataagaattacctcccaccgggcgcagtgagtggctcacgcctgtaatccccgcactttgggaggccgaggcgggcggatcatgaggtcaggagatcgagactatccyggctaacacggtgaaamyccgtctctactaaaaatacaaaaaaaattagccgggcttggtggcrggcacctgtagtcccagctactcaggaggctgaggcagaagaatagcatgaacctgggaggcggagcttgaagtaagccgacactgcgccactgcactccagcctggacgacagagcgagactccgtctcaaaaaaaaaaaaaaaaaaaagaattatctcccttattcaaaccatagcttcttgggatacaaaaagcattttctcatctctgcctccctcaaagcctgaataatttgggtatttgcatattatcctctttctaggggagagaaaaataaagattagacaaattgaatgaaataactagggttattctaaatatatatatttggtcttctgctgtttcctggcatgcaattctcaaaatacttagaatctccaaagctatgtctttttctacactaatgagttgactgatggtagtagaccctagtagcttcaggatgagagctgtaaagatccaagcaggattagagggttgggactttcagccccaccctccaacttctgggaaggggaaggcgctgatggttaagttgatcaccagcagtmgatggtttaatcaatcatgcctgtgcaatgaagcctccgttaaaaaaaaaaaaaaaaagaaaagaaagaaaaagggaaaaaaaaaaagtgggtttggggagcttccagatagctgaacatgtggaagttcctggagggtggcttgtccaggcagggcatgaaagctctgcaccccttcccccatatctcactctatgaatctatatcctttgtaacaaactggcaaacatatgtgattccctgagttctgtgagctgctctggcaagttaatcaaacccaaaaaggaggtcacaggagccccaacccaaagccagtcagtcaaaagttataaaagcccagacttgcaactggcatctgaaggaggggcagtcttgcaggactgagccctcgacctgtgggatctgacagtgtttccaggtaggcagtgctggaattgaattggaggacacccagctggtgtgcactgcagaactgattgcttgccttgtgtgtggggaaacacatttgctcacagtagtctttctgtgactgttgtggtatgagagcagaggaaaaatggtttgtttcttctcctcacagagtcatacaacaaatatatggtcaataaataattgaaacaattgcactctttacttgtgaaacttgaacccaatgtatgtaagaattatgtgcatatatgcaacagaaatggtatcagaaaatacattattaattcttcctggtggaagagcatgagtaaagtagcagggttgtaggaacaatccacgtctaggtgggacagctgggagcctcttctgtagcacagagtgggtctcagtgagcaagcaggagaagattgcatataggtcacaagtaggttggagatagattccagacagcctaggtttacacgtaaaccatggtgycactgtctccagtgaaggaggttatggttctagaaatgcatgatgcatgacctccggtatcatatgtgcagttctagggagattgtcttattttttataagccttaatgtctgaaggcaagtcagggactctgcttttaaaaggcttaaaaagaaaaagcctcctacattaaggaatgcatagaggcatataatcagagaagtagatttgataatacaatattatcttttccctttagaactggttccagaacaatagagccagacttccaccggaagaaagacaaagaatatttcttacttggaaaaaacacgatttcccagtccaagcctgtccatttttaagcctccaggaaacccaggctgcagcttccaactatgccacagagcagagtttttcctgtgccaagagggctctgatgagaagacctggttgctcccttctggagaaacagaggattgcctgtcaacagatgggctacaattgcttctctttggagaaccaagagactcccagtcaacaggtgggctccatgtgctcttctctggagaaacaagggattcccagtcaacaggtgggttcccagtgctcctatctggtcgcaggtactgaaaagcatccaggctatgctttggagtatggaggtgacacaggaagtgagcattctactgcctatcgttttctcagctacaactctgcagaatgccttcatcctcccccatcttctgtgccatattttcatggagaaaggactgaaaccagggaaagccagcatgcaagtcccttccttttggattacgctcaaggtgcttacggggtgaagaaagaccattgtctttgctcattctgtctctcactgctgcaagaacagcagcagaatgattggcagtatcacccacagcagcaccaacagcctcagaattactcagaggsgatgatgttgcaggaacagctgccaatggactcgggtccttgggatctagagaagcagtggccctcggctcagtcacagctgcagagtcaactgcctcagaataatggaaagccgttgtgctctcaactgcagcacgtgcctccccaaatagctgccaactcacccctgctgcctctggggcaagatatgcaggtaggggcttcaagcaactcaggactcaaatgcagcagttttaggttgaggggtctacacgggcctgccacaggaacccaaggatgcagctttgcaaagtattgctaagtatcacagaaccatagccacaggtcaagcccacagtaacccacacagcaggccaaagcaaagccgtctccagaagcctccacataaaaaataaaaataaaaataagtaaataaataaataaaaataaattttttwaaaaaagccagatgaggtgaggttgtttgagcctaagggttcatgacgagagcctgggcaacgtggtgagaccccatctctaaaaaaaaaaaaaaacttttaaaaaaaattagctgtgtgtgatagtgagctcctgtggtaccagctactcaggaagctggttcaggaggatcacttgagcccaggagttcaagaccagcctgggaaacatttctcaaaaaaaaaaaaaaaaaaacatttaagccaggcacaatggcatgtgcctgtagtcccatttaactgggaggctgagatggaagtatcacttgagcccgggaggtggaggctgcagtgagctgtgatggttccactatattccggcctgagtgactgagtgagatcctgtctcaaaaaaaaagtcttcaggaaagccccatgagctgttggttccttcttgtagagaagcagtgtccacatgcattatagctcctgagctcctgaccatatactttatggtggcctgcagaagcttgactccacagagtatggattgaaaaaccaacaaatgctgggcggggtggcttagctgggtgtggtggctcacacctgtaatcctagcactttgggaggccaaggcaggtggatcacatgagatcaggagactaacctggtcaacatgtcaaaacctggtctccacaaaaaattcaaaaaattagccaagcatagtggtgtgcgtctgtggtcccagctactcggaggctgaggcacacaaatggctgaacccaggaggaagaggctgcagtgagccaagatcgcaccactgcactccagcctaggcaacagagtgagactctgtcttaaaaaaaaaagaaaaaaatatatatatacataacaaaataatcatatatatggagggaaagagcatgtaaaggtaattatgtcattataaaaaacactataaatgcacttttttctcaactgattttttgaaaactgcataaaagtatrtgtatataatgtataagttgatcctgtaacacagaagtttaatgtatgtattttgacaataacagaaggaggtacatgatcacagatgctaataaaaatggtcatagctgctgaagtaatccttataataatgtattgttggatttgtaatattaatagatgtaatatatataccccaaaaccaggagaaagagaaatagtcatataggagtaacatctatgtatatttcactggacttaagctaatataaatctgaaactaattctgatcagatgtgtatggcaaaccctagagatgtgtatggcatgtgtatggccctagatgtgtatggcaaaacttctaatcactcaaaatatacagcaaaaattaaagaaaatgttggccaggcatagtggcttatgcctgtcatcccagcactttgagaggccaaggcagggacaacacttgagcccaggagtttgaggctgcagtgagctatgatagtgccactgcattccagcctgggtgacagagagataccctgtctctaaaaaagaaaaataaaatgctatttaatatattagaaactactcattaaatgcaaaagaaatcagtaaatatcatgctggccatcttttcaaatactccacttacaatggtcccagcataattggggtggcccccaaagctgaggattgggtcttcccacagttctgcaggaccaggtgacacgacagtgaacaaccacaccatcaagactgtctcagccttctgcaccaatcctgaaccccattcctgcagaccctgggccaggacctaaaccaaagctgcagctcgctggggcaacattgattgcccaaggtgaggactaagcacagatagcctagtggccctggtgcagaaccaggattggctgctgaattctgaaaaccaggacttggttcaacatttacatttgatagatgccttgattcccattttgtgtttgtgaaaagtgtatgtgtttacttttgctgtaaaacataatcactaataatatgcaataaatattttcttgaaggaaaaaaaaagaggagaacaagcatttgagtacaaatgatgattccaggatgcactgtagggaagtgggaatgagataagagaaggaagcctatgcaggatgcattcataagtagattcccactgtgggcaactatgtttactactactggggacctctaaaagatggcatggaaaccattatcccactcgaaggataactttcaaatatccagttgtataacttctctggtccgcagggaagctgggtaggcaccctcgaattcccatacaggggcattaactccatagcacttcaagcagagagcctcaagcaggtgcttattgcaggattcctratagtggcacatgctagagaatgatgtgtgcccagggaatatggatgaggtcctgacaccttctgctacccacctgctggtccctgattggtttctctcccctttggctttcagcagttcagcttattttgccacttctcacagtccttgatgcagttcttctctttgctccatccagaagaactagtatctttccaatggcctattcattctaaaatggaaccactttattggttgtaattaacaacaactgttagttcctttgtggtttttatacctaaaaagttttgcatatacaatcaaaacacttattgacgagactcgaatacaaagttatatttattttcaacaatgaaaacaacacaacaaagtggagtcaatccactaattttttaaatctaacacaatgcttagcacaaacaatactcaataaataacacattaaccaagtaacattattcttaacactctctagagttgtgtgcgcgttttaaggaaaactgaggggtaggtaaagaaagacatccggcagacttgactgakaagggctccaaaaaaagaacagccaaagagcagggtacccaaatactaagttagcaaaatgaatacagcattttcaaagcagtctagaaatcagagctcactgggggaaatgacaagggtttggggataatccgtgttcaaggcctcataattaaatcttctcctatttctagattctttatttggaatctatcccaatctaaaggagcttctgccaaaggacaggagattacttatgctgcctgaaatggcctatgcctcctaaatttcctttcactttgtcactactatagcaagggttccattccaacaatggattactactatgtagaccaactcctgtctgatttagatcttcctttcataaacacattgatacttgttcaaggacagctgtaaatacatccaatttcttttctttttatccccctctacaactctgcttggctacaaaaatctaggactcacagagcaacagcagcgatggtcagaaaataagtgccagttccaatgcaagaactctctaaagttcattggtcacaattttttttaaccacctcacctaccatgacttttttcttttctcattatcttgccaattatttctttcgaaattcaatcctccgagctacattctgagcaccaaattttttgaccaatgcctctctggtatcctcatcatctttttgcaaatctatgtcatcttgtcgggaccaaatgggatatccatcagctctctgaccagacgctaagaaggcggaagtagcctccagctcaccactattttttaggaaggcctgtgtaactgttgatagatccaagttaaactyctccattaactgccgaatgatcttaatggcagctcccacctctggttgagaaactttttcttcttcttcttcttcctcctcatcaggctgtgtttctgagtcttcctcaggtgtgggtggatcatcatcacacatagttatatgtatttcaaaatcaggagggctctcatccacctagacagaatgatgagtaaaaccagctcctaatcaccaagtcttgatttcttacaatatctggtctcttccaactatcacccccttgccctctgcattccaatcacactggacttccttcagttcctcttaatatgctgtgttccttcttacatttattcatgtcagatgtgtatgtatatgtacacgcgtgtgtgtgtgcgcgtgtgtgtgtgcacgtgtgtgtgaggggtagggggagtatatgtgtatatgtgtgtataattgactatagtattccaatagaatattagaagctacattgaatatgaaaaatatatgtatatataaagagagagacacatatatgtgcacacatgttcattagatttgttaaatgtttgacttcactctcaagactgtaagctcctaagggcaggaattgtatgttttgttcatcaccacatctccaatacccaccaatgcctatacatagtaagtactcaaaaagcactgctgtatgaatgtattagggcttccaagctatactggttagacagattacaaagcatgctatatgagaagaggcctaggtaggtcatgtttgagagctgagtgtttgaagtttatgaaaaatgaaccaaatatcaaataataaaacagactacaaaaggcaacaatccctaaatcctgccaattcctgtgcatcccttcaattcctgtgcatcccttcactcaccaattacagaagctttaaattatttcccttgtttggactgaagcctaaccatttttctttgttaatatgaattttctttgttagttcacaagacgctttatcatggaaaaatatatacatataatttggacctttaaaaaacttatcattattgtatggctcctgtctttctctgtagctattattaaatatcagattctaacagagtaatataagctagactgaatatggaagagctaaaacatttttaaaaagctcaaagtacacaaaaagctaaatttgcttgataaaaaaaattactataagtagctgggcatgatggcacatgcctgtaatcccagttacccaggaggctgaggcagaagaattgctggaacctgggaggtggaggctacagtgagctgagatggcaccactgcactccagcctgggtgacagagtgagactccacctcaaaaaaatacaaaaagcggtggctcacgcctgtaatcccagcactttgggaggccaaggcgggcggatcacgaggtcaggagatcgaggccatcctggctaacacagtgaaaccccgtctctactaaaaatacaaataattagccaggcatggtggtgggcgcctgtagtcccagctactcgggaggctgaggcaggagaatggtgtgaacccaggaggcggagcttgcagtgagccaagatcgcaccactgcactccagcctgggcgacagagccagactctggctcaaaaaaatagaaaaaacaattactataaactttttgaaaaatatattgacattaaagtactcaaagtgggatgctttatactgtttatacaactgtccctattctacccaatttttctccctttccccctcaacttgtcctgccaaaaactaaaagctttgtgaagcaaaagcttcagggcaacatgtctgaagcccagatcagtcccattttccattttccctttccatcttgaactcctctctcactttcctgagccccaggtagatgaaaaaggtgtacaggataaccagtttcaaagaagaatgaaggtagggaaaaaaataatgagtaaatctagttaacataccacaacctcctcaaactcccgggtggcttccacaagcatctttttgactgcttcttcattctcctggatttcttccttcacatactcttcttcaggcaaatctggagttctcttattctgtggttctgttaaagagaagaacagcacagattagcaatagcctcttttacataaaccaaaaatatatttgctgtgtgagctctgggccaggagtgagcctgcacttttttttttttttttttttttttactatcagaagacatctgttcttgattcagaagggtaaaaaaagcctaggacgtgctcattcacccatttctatgcttgcttctgaaaagatgtactatccaaacaatgatacattcttaaactctgacatataaaaatgctcaagtttaattcattttttgctttgtagttacagactttgcaaattaataaaaatgtgtcataaattgggttccttgggaagcaaattctgagatggagatggaaatttaaagaattgggaagtgattttgggaaaacctttgtggaagagcaggagtgggcagagagagaagctgacttatcaaagagtttcaacaagacctcagccaaaaccatgggcaactctggagctaggaaggcccttcagaactgaccaagctggggccaaggagcagactttgtaactctgcaaatatcagtcactggatggtggcagccctaagaagacaggagtttgggcaaggcagctctcctagcagccaaaggcagatctgggccacgtaccacaatccaccaatataccatctacaaaaaggagggcctcctaaatttaaacatcctgttcctttcctttacattttgttctctgaagatttaactctgctccttttctacttactaaaacatactacaaaggggcagcaagagggagtttttcgtgatggaattgttctaaatcccaatgtgggtgctggttacaaaaatttacctatgttaaaacacatataactggaaaagagtacagcagttcctcaaaaaattcaatataatttcatgatgacaacccacaaggaaaaagaaaaaattaaacataaaattaccatatgatccagcaattgcatttctaggcatatacctaaaataatggaaagcagggtctcaaacagatactagttatacccatgttcacagcagcattattcaaaataaacaaaagatggaaataagccaaatgtcaattgatacattaatggaaaaacaaaatgtagtatatacatacaatggaatattattcacctttaaaaaggaatcaaattctgacacatgctacaatatggatgaactttgaagatattatgtaaagtgaaataagccagacacaaaagggcaaatattacatgattctacttgtatgaggtatctagaaatattgaattcatagaaacagaaggcggaatggttgtttccaggggctaagaggagggagaaatggggaattagtgtttaataggcatgtttctgacccctagaagcagaaaataataaaaggcatggagtttcagttttagaaaatgagtaagttctagatacagatggtggtgacagttgcccaacaatgtgaatgcacttaataatgccactgaacagaacacttaaaaaactatctgaactgtaaattttacggtatatacattttaccacaataaaaaataaagtttttaaaatgcatataattttacaccataaaaagttaattttactgtatgtatttaataaaattcttaaatagtaactaaaagaggcttatctttgagagatacatgctaaaatagataaaatgatatgatgtctggcatttgcttcaaaacagtccaggaagttgggatgaaaagtatagatttaaaaaatgccatgaactaaaatcaggtgaaggtgggtgatgggtatatgcagtatagttcattatactattctgtatttgtaaatgcttggaattctccataataaaaagtaaattactgttcattcacataatgaaatacagtgcaatcaattagaaaagaatgaggaaaagctttgtgcagacacacaaacacttcaagataaataattaagtttaaaaaaagtaaaccacagattaagttgatgtctagtgtgctagtattactatgagcaaaggggacatgcaacagacaagagacggtaatagaggctgcccctaggaaaggacccagggaaaagggtatgtaaatagggagactgccttttcagtatgtacccatttgtactctgagtatatctacgggataaattcctagaacaaaactgccatgtttaagggaatatacgttataaatgtcatcagatattgtcaaaatgccccccaaagaaattgtatcaatttctattaacaacgtaggagtatacttgttttcccatacactaactttggatattacccattgtattgacttttgccaatcttatagataaagtataacatctccttgctctgatttagttaaaaaaaataaataacttggggagcttttgttctattttgtataatggaagctatctcaattcatcaaataaatacaaaacaattccaacacacatatttattatctcacaggtctcatgggtcaaagtatagcttatactgaccctaggctcagggtctgatttactttctttcttcttctttttttctttccgagatggagtctggttctgtcacccaggctggagtgcaggggcttgatctcagctcattgcaacctacacctccctggttcaagcaattttcatgcctcagctgcctgagtagctgcgattacaggcgcatgccaccatgcctggatagtttttgtagtttttagtagagacggagtttcatcatgttggccaggctggtctcgaactcctgacctcaagtggtctgccaccttggcctcccaaagtgctaggattacaggcatgagccaccgcactcggtctgatttactttcatttaataacagactatttcttcatttgtttatcggccgcttatttatttccttttctgggaacttcctgttccatttccttttctcatttttctattagttttctttttacttaatgacttcttacttaatgacaaagagctctttagacattaaagaaactaagtctattgcagtgtattgggaatgtttttccagcatgccctctgactttatttatcatgagaagttcttaattttcaggtaatcaaatatataaaactttttctttgtctttttggcttcataacttatcaccatgctaatatttttactttttttcttctggcaaatcaggcagcatcctgaaccacaaatggttcagagcaactcccaccatactgatatattcattcatatcttctcttactcattttagaattttttaatttttacatttaaatatctgattatcaaaagattacttagatgggtaggatgaatacagcttaattttgtcccaagttccaaatggcttgccaatagccccaacatcacggatttaaaagcaagtcccagacacagcatggtggctcacacctggaatcctagcacttttgggaggccaagtcgggcagatcccttgagcccaggagttcgagaccagcctgggcaacacggccaaatcctgtctctacaaaaaaatacaaaaattagctaggtatggtgacgagtgcctgtagtcccagctacttggaaagctgaggtgggaggatccactgagcctgggaagtcaaggctgcagtgagccgtgatcgcactaccgcactccagcctgtgtgacagagcaagaccccatctcaagatatataataaaattaaaataaaataaaaataaaagcaaggccatacatgatgacatacttcacccatacacatagccctaacctcatctgctataattaattctccctcctactccattaacagccactctgttctctttgtggctccaaacacaccagccatactcccacctaagggcgattgccctggcttcttcctctgcctgaacactcttccccagatatccacctgggttgctctttcacttccttcggtctctgcttaaacatcagcttatgagaatgaccttctcttatcatcctataggaaaaacctcctccccaacccttacactctgaattatttttctctatagcccttaccactccccagctagcatgttataagctccaggaccacagggacttttatttattgttatattccagcaggaccacaatgtctggcactcaaatttctgctgaatgaatgaagctgaaatgtcacttttaccaaaacaaaattcctactaagcatactgaacaggagaaaaagattttactccccagacttcaagtgttaaatggagtagtcatacaggcaaagaaaaggtgggaggattacggagggggaggagaagcagcatgcctctttaaacaaaagggtctatcggtttaagttatcaatgccaggtacgtcaccaagtacatcttaacagactcgttctgtatcctagacatactgaaccccaattttcaattcaactgcattaaaaactcacttcacctaagcaagaccaggaagagaccttccaactgccgagaaccttcttaagtccataggcattcagttacgccagagcattaaagtaagtctggtacgcctttatactgaatctacctgaacataacagcaatcttttttaaaaaggagtctgtggaatatctcttaaaagaaacacaagaagccagttagcccgtgggtagctggtggacaggaaggacgagataatttttttttttttttgagatggagtcttgctctgtcacccacgctggagagcagtggcgcagtctcggctcactgcaacctccgccccccgggttcaagcaattctcctgcctcagcctcctgagtagctgggactacaggaactctccgccacggccggctaatttttgtatttttagtaggggcggcatttcgccatgttggtcaggctcgtctcgatctccttacctcaggtgatccgcccgcctcggcctcccaaagtgctgggattacaagcttgagccgccgcgcccggccaagagagaattttctatatactttttgtaacttttgaatatagaaccatgtcaatattctagtcaatggtaaagtaaattaaaactagaccaagaagctgggtgtgatggctcacgcctgtaatcccaacactttgggacaccgagacgggaggatcgcttgagcccaagagttcgagacctgtcagggcaacacaacgagacccccatctctacaacaattttttttttaatttagcgggacgtggtggcgcgggagtgtagttccagctacttgggaggctgaagccggagattcgcttgagcccaggaggtccaggatgcagtaggtcgtgatcgcgcggctgcatcacagcctgggcgacggagcgagcccccactcaaaaattaaaaaataaaaacgacgagaggccagacgtggtggctcactcctgtaatcccaacactttgggtggccgaggcaggaggatcgcttgagctcaggagttcagaccagcttaggtaacagagacccatcgcaaaaaaagaacaataataaacaacaagggagcgagaaggcaagaaaatggtgcaaatttacccggatgtcaacagggggcggggccaagcgctgctaccgaagatgccaagatggacgccaggcagccaggagaaagatcccaaccccacccgcgcagatatccgcgaggccccgcgctcagcctcctcacccccgctatccgcggcctccgggtcctcctccgccttccgcttgagcttctgggaggaggggctcaccggcgcgtcccccagcaggtacttatgctcctggccccgcaggtgcttgaggtagcggtccttcagggactgccacgagtgctgcgtgagcgagctcttctccatcgctttccacaaggcgttaccggtgacggagctgggcgagcgggcattttccttcacgtaggtaaggatggctacgtcgtccgcatccgtgaaggcgatccgcccggcgtgccgctgcggctccggctccgcggcgccctcggccagggccccgggctttgcttccgagccggtgtccgccgccgaggcggggcccagccgataggcctccagctccagcctctcgttgcgctccacgcagtccaggatgtactgcgtggagatgaaatcacccgaggcctcggccagcgcctccccgggctgggccagcagcacggccccgggctcctgcactcggcacacggtgccgccgccgtgcaggatgagcgtcgacagccgacgcttggccgggctgggccgcacgtagaaggacatggagctgccgtcgtccctcacgaacagagtcgaggaatgggtgggcccgttggggtctttgcccaaatccatcgcctccgccatgtctgacgccgagcactactagaagagctaccccctcgcgagcgcctggcacacagagctcaactgactgagctgtcaccgcagacgcctctgccgcgaagcgcagcactgggcctgcgcagcagcagccgcggcgcatcgagagtgcccgccccctctcccccggaagaggtggggcttcgcaccttgacctggaaattaacgtactatcctccttacttttgggtcgggccctccgggaagatggcggccgtgcaggcggccgaggtgaaagtggatggcagcgagccgaaactgagcaagaagtgagtgtcgctgcgagtctttaaagcctttgcggtaggagagtctgggctgggaagcgccgcgaggttcccaccaaggctgctgtgccggggccttcttgccggctctcgtgggtacgcacatgctgagacgtggtggctgcgccctgcagaccacgtaccccgggataccccgggcacgccggctccccgttcccagctggcaccggcgggatgctccctatcatactcctagagttaagagactgtggaggaggaactaggacgagaactaagagttatcagaaaagaaaagcgaaacttcctgcttagcttcatcctcctttctgagaaatgcattcttttgttgagccactcagtaaacgtggaagttggagaaatgttaaataccctagcttttcagaaagaccttcaaaattttctgggcctcactaaggtcattctgaacgttatgtattaaaagggatcagttctaaaactgtcatgcatctacccgtatgggttattcagtagatacctgtgagtattaagtgatcaacgtctaacagtagagaccatcttaattcagcctgatatctttgttaaccactcccaaatccctggagtatgtaggttaacatagataagtcaggattagccaccctttaactggctgtcttatattctcattagcgttccccatttgaaccacagaacacaggtaattgagtgttttatcattgctaggaagatggtacatagtaccattccagaggcatacgagagggcttaatccccgtggcgcgcacttgttatcccagctactcgggagactgaggcaggagaatcgctttaacccaggaggcggaggttgcagtgtgctgaagtcgtgccactgcactccagcctgggagacttgaggtagtggtccttcagggactgccagaagtgctgcgtgagcgagcccttctccatcgctttccccaaggagttactgagacggagccagaccctgaatgaaaaagaaaagagaaatgatgtttctttttttttttttttaagatggagtctcgctctgtcgccaggctggagtgcagtggcgcgatctcagctcactgcaaccttcgctgccagggttcaagcgattctcctgcctcagcctcccgagtagctgggattacaggcgtgtgccaccatggctggccaatttttgtatttttagtagagacagggtttcaccatgttgggcaggatggtctcaatctcgttaccttgtgatccgcccaccttggcctcccaaagtgctgggatgacaggcgtgagcctgagccaccacccctggcctgatgtttccttttgtgtccctggctttgtgcttcaaatatcttagaaaaagtataagagaaattgtcgaagtttatagttgggtaggaccttaatatattgtcctttattagagcaatccgatggacttccataaaagtttggaacctggtctttggactgctaccttagagaaaattgacttgactttattaagtcaaatttaattgaatgtggtatatctgtgatatacgatcctaaagtttagttcattctttcaaaccacctatgataatcaattacattgaattgaactttaggactgtatatcacaggtgaaagcacggtttccagttcagagtgtgtttttaggtaaacggaaaaaactggttaattcctctttactgactttttttttttttttttttttttggaggcagagtcgttgttgccccggctggattgcagcggtgcgatttcagcccacggcaacttgcaactcccgggttcaagcaattctggtgcttcagcctcccaagtacctgggactacaggtgcatgccacaacacccggttaaatttttgtgttttagtagagacgggatttgaccttgttgcccaggctggcgtcaaactgctgagctcaggtgatccgtccgcctcaaccccacaaagcgctaggattataggcgtgagccaccactccctgcttcactgacttttctaaaattaaatacagctactacttttttgaccagcttttctgtgccaggcacaatgctagatctctacaagctttctgtctagtgtcagtaataaccttgcaagaggagttattgtccatttttcaaattaataaactgaggtcctagtaattaaatgcactattaaagtgtgcattcctaaaatatagtctagcagtgatccagagcactggagcacggatctgaactcaggcctgtgactccacagtccatgctctgtatcctgactgcacagcactactcacgttgtcttacctgtcattgatgtctattcctctcgttaccatgagctaaaataatttttttctgattaacatttccttccgtttattgttctggggaattccttggtctgaaatttttagtaagcaccattttgtgccaggtattgactccaagtttaaaagcagatgtgctccctgcccaagtgaaatagcctcctcaaatttatttgaacacggtaaagaaggtgatctctgtaattctgttgccttccagtgttgataatgtataaacataacgcagtctaaggaccttcctgaaattctcctttccccttgttcctagagttccaaacaagtcttctctttgacacgtatttttgtgtggcttgcatttatctttgtctagagtttgcaattgatagtgacagtttcctcttattttatatgcttcctattgccatcttgtggccaggtatttcctctccaggtgagaaaccacacttcagggcttcagaaagtgcctcacatcctgttcccatattctaggatgttgtgagcaattttacctgtaagctatccattaacttgctgttggctttaccccagatatgcatgttttttccatagtcaggactaagaacattgtcagttacagttgtagcacagagagtgttacagggttgctatcagttaagacagtcttaagttaaatgggactaaaaggtagtagaagcatggtccccctccccaacccataagagagttggttgggtatatgtatactgtctgtcccatctgacaccacatctctgtgtttcccgctaggtggtggtaatcattagttccagggtgctctgccatgttgacgcaagctgctgtaaggcttgttagggggtccctgcgcaaaacctcctgggcagagtggggtcacagggaactgcgactgggtcaacttgctcctttcacagcgcctcacaaggacaagtcattttctgatcaaagaaggttggtgcccattaccttctttattgctctggaagcaaaaattatttccttacttggttcattttccgttaagcctctggctaagtctttggacttgttgctaaggaaacaaggagccctaataccaaaaccaatagtcctttctcattttctctttaataaattcaaatcgtctctccttagagtcttgagatgacatgtggatcttattctagaagagtgctaagaacaaaacctttgtttgaacaaataatttctaatgccagctatttcccttttctgtctttctggagttttgtgtgctcttgagattaatttggtttctagtcttagtgctatccctaggacctttttggattatccttaagattgatttgatttaagaggagcacctggttgagtggaaaacagatttatcttaattctagaagaactagacagcctaatcttagcagtccactgactgaattatagcatgataacaccagcacagtgttttggaaaggttgtctttacaaatgttataagacattatatgtagaaaaagctgtcaactttgaaaccattcagaatctgtttttcttttttacaagatgaaagattcggccaggcgtggtggctcacgcctgtaatcccagcactttgggaggccaagacaggcagatcacgaggtcaggagatcaagaccatcctggctaacacggtgaaaccccatcttcactaaaaataccaaaaaaattagccgggcatggtggcgggcacctgtagtcccagctactccggaggctgaggcaggaaaatggtgtgaacccgggaggcagagcttacagtgatctgagatcgcaccactgcactccagcctgggcaacacagcgagactctgtctcaaaaaaaaaaaaaaaaggtgaaagattcaaaacctcaattcattttttaaagttattctaaattcatatcgaaaatgaaggatgtgtcctgaagccagaatgtttgcgggcatgacttgggatcttctgctgtggttcactattgcagaatatttgattatgttcagcggtttgaaagaatgatccataaattgtctttgaatagtaaagatatccctccctacaccaatctgtttagtttctggtttcagatagcaaattcagactataagagacatgaacatatcatacagaacagctcagagttgtccgcattactttggtttttcaggttcaagtgataagtatcaagagtttggataccaagtgatttaaccagaaatgtatttaaatctatatgaggcacagagagtaaagggttaagatactaaaagatacctagaaagctcacatttggttagctgaatgccagggtcagggtaatccctttatacaaacattatctcattacacaccataacaactggtgggggttgtctattattattttcgtttcacaggtgagaagttaattcactcgtccaagtcacataattgacaagtgtgttggaatttagtcccaggcagcctgactacaaagatggtatattaccccctgtactatactgctttgcacaccgttctattttgttgtctaagtcaggctccagtgggcaaagtgagactaatgctgacagccattcttggagagactgttggtaggggaggtctccttgagtgctaaagagccggctcttccttactatcatcctaactcactcttaggggagggatagagagagggggtagcagagggctggagatgttgccttatcatgtattagatctggcattggaggggtcaggtggctcacacctgtaatcctagcactttgggaggccaaggtgggcagatcacttgaggaaaggagtttgagaccagtctggccaacgtggtgaaacctcgtctcactaaaaatacataaattagttgactgtggtggtacacacctgtaatcccagctactcaggaggctgaggcacgagaatctcttgaaacccgggaggcagagattgcagtaagctgagattgtgactgcactccagcctgggccacagagcaaaactctgtctcataaaaaaaaaaaaaaaaaaaaaaaaaaaaaaaagacctggcactgttggaacttcaccttctagggggatactaaacaactaagattcagtcactgtcctcaaggagctccctaacctaattagctcaagaaaagcctattctaattttctagaaaaccttttctcctattcaaaactaatgcataggattttctttgtcttggtacatcttggttttagttgggacctaatgccaaggacctgagactggcaagcagagactgagagtgatttttcacatctttgttctaagcttatttttccctttgtgtctttcacataaagagtttagtgacaagctacttgagctgagctgtgggtgtggaattgaggggtatagaactgagcaagagcgtttctcctgggcgattcatgtttttgataagttgctaggggcagaacatagaggactcttcaggcagctaacacattgaacgctttcatctttccaacagtgagc

SEQ ID NO: 96915 - DNA, 94232 bp, Homo sapiens
  misc_feature (1)...(94232): n = A,T,C or G
gggattacaggcgcccgccaccacacccagctaatttttgtatttttagtagagacggggtttcaccgtgttggccaggctggtctcaaactcctgacctcaggtgacccacccgactcggcctcctaaagtgctgggattacaagtgtgagccactgtgcctggccccagccctctttttcttgcctcatcacgttggctagaatttctagtacaatgctgaatagaagtggtgagatcagacagccagccttggcttgttcctggtcttagggggaaaacattcagtcttttattatttcatatgatgctagctgcaggtttttcacagatgcccttactatactgaggaagtttcattttattcctagtttgctgagtttttttttttttaaatcagtaatggatgttggattctgtcaaatgcttctctgtatctattgacatgatccattttgtttcttcactctcaagagtgtgaattacattgataaactttcaaatgctaagccaactttgccctcttgagatatcccactcggtcacggtgtactatcctttctgtatatagtgttggattcaatttgctaaacaatgttttaaatgcattttcttgtctatgttcacaagagatattatcctgtaattttctagtaacgtctttgtggaattctggtatcagaataatgctgtaaggaatgatgaggtgggaaataattccttccttcaactttccgagtttgtatagaactggtattatttcttccttcaatgtttagtagaattcccagagaagctatctaagtttggagtcttcttttttttgagatcgagtttcactcttgttgtccaggttggagtgcaatggcacagtctcagcttactgcaacctctacctcctgggtcccagtgattctcctccctcagcctcccaagtagctgggattacaggcacctaccaccatgctgggtaatttttgtattttgagtagaaatgaggtttcaccatgttggccaggctggtcttgaactcctgacctcaggtgatccacctgcctcggcctcccaaagtgctgggattacaggcatgagctactgtgcccagccaagtctggagtcttctttaagggaagatttgtcaactataaattcaatgctttaatagacatagagctatttaggttatctattcccttcttaaaaaatttacatttttaatttttataggtatatagtaggtgtatatattcatggggtacatgttctgatacaagcatgcaatgtgtaataatcatatcatgaagaatggggtatccatcccctcaaaaaaaaaagatggttagataacacaaagtatgttgcaatgccttaattgtatgcatgtcagggcctctttcatcctttcatacaacacaatttctctttttttttttgagacagagtcctactgtgtcgctagactggagtgccgtggctcaatctcggctcactgcaacctccgactctctggttcaagcgattctcctgcctcagcctcccaagtagctgggatttcaggcacatgccaccatgcgcagctaatttttgtatcttttttagtagagatggggtttcaccatgttggccaggatggtcttgatctcctgaccttgtgatccacctgccttggcctcccaaagtgctgggattacaggcgtgagccaccgcgccgggcccaacacaatttcttcttaaatgagcttaagtggtttgtgctttccaggaatttgttcgtttagtgtaagctgctgaatttgttggcctaaagtccttaataatagtccccgattatcctttccgtagtgatgtcatttctcattcctgatattggtaatttgtgtcttgcctttttcttgttcaatctggccagagatttttcaattttattaatctcaaagaatcagcttttggtttccctgattttctctattgcttttgttatctatttttttgaattccactctgatacttattatctgccttcttatattcactttgggtttcatttcctcttacttttctagtttccttttttttttttttgtgacagagtctcagctcactgcaatctccacctcccgggttcaagcaattctcttgcctcaggctcccaagtagccggaactacaggcgtgcacaggcatgcactgctacacccagctaatttttgtatttttagtagagatggggtttcaccatgttggccagggtggtcttaaacttccgacctcaagtgatctgcccacctcagcctgccaaagtgagctaccgtgcccagccaacttttctagtttcataaggtgattgctgaggtcactgatttgagacttaacatttaatactgttttagctgcatcccaccagttttaaatgctgcattttcattttcattctgttcaaaatactttctaatttcctttttgatttcttctttgacccatgagttatttaaaagtgagttgaaaaaatatacaaaaaacaaaagtgagttattcagtttccaaatattgaaaggattttccaatctgttactgatttctactttaatattcaatatcattctggtcagataacatacttgtttaatagaacagaatatgatcaggcttaatgttttaatgcacttgaaaaattgtgtattctgctgttattgtggggagtgttccataaacattcattaggtcaagttggctgacagtcatgttcaagtcgcctatatcctcagtgattttctgggtatctatcctatcgtttattgagaaagaatattctccaactacaattgtgatttttctctctccttgcagctattagtttatgctttgtgtattttagagctttgttattaggtgcataaatgtttaggattatcaagtcttttcgatgaattcaccccttcttcattacaaaatgatcctcttaatctcttgcaatactctttgctatgaaatttaggaaatcagttatagggattaagactataacttcagttttggatatatacatgtttatacatgtagcagtatctaagaacaaacatctgagagttcagatgagatatggagatagatatttgggttaagatggtgttactatagcatctacttcaatgccaataaataaaggtgctccagaaatattcgtaagataagtagtctgactctggtttccaaagtgattacaaggtttagaaatgtccagctgatcccaggtcatgccagtataagttcatggcctccagatgagtgcttaaacgctctcatgctttccagtgagttatttgctaggtttctcataatagctattttagatctttttgacactgcttaaatcttgggtttcctacttcccctctcactttcagttgatgtttttctttcctcattcacaatgaaaacagaagtcattagagaattccttcaccttcattccaataaatacataaggtcacctacaactgcagcccatttttcttcctgagtgtttttcctatgtccaaagcaaatatctctacctatgctcttgatgtcattcccctcctatgttctaagagatagaagatatctcattaagatagaattatcttattattcctcttttttctgtaccagcaaaccttctctcccttccatccgctttaggctgctcaagaatctctcatcttaaaacatctcaatactacatcacccttgtagctccctggagctaagggtgccgaatttgttggcctgaagttgttcatattctcttccacagacaaacattttgagttatctccacttgccatctctacctcatcatctcttcatccctctacggtaatatgtagcttccacctcattactccaatgaagctattcttggtgaggtcaccaatgatcccttgtgaataaatccaacacatatcttccatttctttttctacttgacttttaagtggcattcgacactcttagctgcactctctgccccgaacatcctcgttccttggctctgttacgacactctcttggttttcttcctccttcactgactgctctttctccacaaactgtctattctctgaagattctaacctctttatgtctagtacaccatctctgttggtcctctcttcagctcctagagccaactgccacctctatgctgaggatgcccagatatctgtctctagcagggattctttcctgagctctctatccttctattccacagtcgaccagacaaacgcactggctggaaaagccatgacttgcgttgaattgcagttgtatcacttgttggccctggccgaataatggcattgttgagcatattttctcatcccaaaataaagggggttaattatactgtgctttcttcacaaagatgttttcactacaatgaactattacagaaaagggtgttgtaagcaataaatcagtgcctaaactaagctattgctactgttatttttgttatatatatttttaaagatgtcatttggcttcatgcaatacttcattccataacatagataagtgttccaacgagctgaggctattatcttttaatgataaagataacagatgttagcttctgggacggctaagaggctgatgtgagctttagaatccatttttgagttggagaacaaataactctgttgaaggggttgcaaccttaaatgactataggaaccaggcaggtaacatacatgagcccatctggtcaggcaaatgactgtgtcttacctcaagggaccactctaggtaattggtaacacacatcattttgggtccaatattgacaggtttgatttttccacagaagctggaaaactaggtttttaacatttaggcctttcaattattattattattattatttattttttgaggcggagtctcaggctagggtacagtggcgcccgcctcccgggttcaagcgattctcctgcctcagcctcccgagtagctgggattacaggcacccgccaccacgctcggctaatttttgtatttttagtagagacggggtttcaccatgttgaccaggctggtctggaactcctgacctcaggtgatccgcctgcctcggcctcccaaagcactgggattacaggtgtaagccaccgcgcctggcatcagtctttaaatgatagcaactaattcacctcctgctacccactcccaacccccaaatactgtgtgggccaaaaactaaaaatgcattgtctgtgagccatttccttattatcctataaggaaagtcaccatttcatctccaaatagttgggcattacgaacccttccaagtggttcatgaggatttgcttttgccttggaaaatgtcagggtgagaacgaaccttgagggtcacagggcagtctctgcagtgttgtggttgcccaggacgaaggtttttctagcccacggctcccactactggtcactgccccaggccagaccctggccctctcctcggaagacagagcaatgcagcagcgtttcccctgcaaactgcctgcctggctgctgggagggggctgccaaccttactcactaagcgtcacaggaaactccgacctccatgagacgaaaaccaagtatttactgaaagcttaacgcacgctaactccttgctccttagccaactgagagaaaaattcgcgaacccattcgcaaacgcggcgctaacagcaaacgggaggctgactccacccagaggatggcgaagcgcttaaaccggagacacctgagaaggagcctcccacaaaacagaccatgtggggaacggtaccgggagctggactggggcgctgaactacctgggcgggaatcgcctcggcgactgttccgcgcgcctccgcttgagtcagcccggccgggagcttgacagccggaagttcatcgcaagcccggcgacgccgcgcacgcgctgtctccgtcagacctccgcgcctgcgcgcgcagccaggaagtgaggccgcggcggaggggacggggctaggccgggtcgccgcctgacgcgacgcgtcctcacgggcgcctacgtcacggcgtcgaggcggaagatggtgcacctccgggccggcggttgctgagctgacccggacggcgagggagcgggagcccgagcccgaccactccggctgccgcggggtgcggcgcagccaccgccatgtcgctgctgcagtcggcgctcgacttcttggcgggtccaggctccctgggcggtgcttccggccgcgaccagagtgacttcgtggggcagacggtggaactgggcgagctgcggctgcgggtgcggcgggtcctggccgaaggtgaggccccgggtcggcagcgcgggtgcggccgcggagtgttgtctccgggacgctgggggcagcgtcagcccggagtggaagggcgtgggttagggctggggagggtcccagcgggatcgtgggtcagggtcggccaggggagggtctctgccgagggcgtgggtcagggccaggcgaaggtcatagcgcgggcgtaggtgagtgcctgctggcggtgattgcggagggcgaggctgggaccgggtcggggtactttcttgtcataagagtagggtcaagtcggagcaaggcctggggcttggggaaccccctcagggtgggtgggggaagatgttacggtgaggtgggggatggtggcaggcagggagcttgggtggggacccacagcggagactgagggacggtgcctagaaggccgacagctggagtcaggaggtgagcggtgcaggagrtgggtttaagccttggccttttgccggacatctggggttattgagcaggcagggacaggactggactttggaggttagggctggttcttctacagtccagggaacttgagagttggtgggtgcacacgtgttgcaggtagttgcggttgtagcctggggggtgggggggttggccgagggtagactgggctgtgtctcgtgatcccccttcgtctttcaacacctcrgtgtttctcttcccggtgaacatctactcgtgtgattccgtgtgtagtacaggaagcagagccagtggttgtgacctatatagaacttgcagagtggacaggtcactcggcttaagtcctcttgagtcagtcttgagtcagttttgtctctgcatgctatttctagctccctggatgtcctctccgttcacacggaatcgatcaccagtgccagtgggtcccattctctcttgtggattttccttacattttttgtccagtggtgcctggaggtgtgtcatatttcactggctgtgaagtttatgggctaaacacagttgacttgggtgcggaagcgtaactctattctgctgtattggcacagggagagggagtgaagcgacacaaaagccctcaccctcaccagctccctggtacctctcagggctggagggttagyctgtccaggtgcctgctctgtgaccagacaggagactatcccagaattctgattatcacaaaaggcctgcggagacattttgactgtagcattatcacacactttgtctccattgtggtcaaaaccaaacagattttgggtatgatttggtcagaaagtctaagctcttctttcagaagtgggggctgaagtgtgatattctttcacatcagttggaagatttctctcagatcaaatcatttattctgaaaatactaggtggttatcttcattctttaagaagtttattgtggacaggacttgctttctggaacttcagacttgtgctcaaggggtggagagacagaggcagcacagggacagatccttaggggtggtacagacagtgtgagctttgggaaggggccaagcagaagatggcacggatctkggtgggagggatggagaatgcaccctcactggggcccggagaggaagattcgtataaagaaagaagcttgtgggtcacttagcacccaggaagaagaacaaggaaatgtgggcagctgctgaggttgtgcaaaagaacttgtttccctttgctatctaggcaagtcaggagataaaaataaccaatgcaattaggagctgtagatttcctccttgtaaacttaataggtggcctgcagcctcctaagtactttgaagcctctttgaactgaaacagagtgtgaaagctgaattaagtattttatataaacatacttaattaagttttgtctgaacagcaaccttagaacataggctatgggagtttaggctgtcttgtgtaaacatggtgatggctggtaatctgaacccttgagtacagatgtttacacttccagaatttttcaggtttcagaatggtcattgcagcatataacctgtatatcgtgggatactcccagaagacttgggaaagtattctgtaattgaatacattaatatttctgtaattaaatgaataaatattctcactgtgggataattaaagtctgtaattaaccccatatcagttcatgtcaggttttatcccaaatgaggttattatgatagaccaggatttgctgtcaagtgagttaggaaaaaatggttttcatagcttttaggaatttggacttgtggtgtgaatgggtttttaggtagaactgtggaaccagatagctttctaatttcttcaaatttgttctgtcatcttcctttttttttttttaatttaagagacgaggtcttgctgttactcaggatggatttgaactgggctctggatcttcctgcctcggcctcccgagtagctgggcttacaggcatgtgctgctgcacctagctagtcttcacttttttaaaaggcagattatcaggagcaccaaccatgtcagagatgcccagggcaggtgtatgctgtgtgttctttgttttgggttctgcgtgccgttgcttctgaagtggagcctgtggtgccctgactgcagggaaatccaccttccctgtgtggctgacttgaactcggggttactgctagtgagataaattgaggcagaaaagaaaacgatgccgcacagccgtcgtatggtttaagcgtaacccgcctcgtgcgtttggttgggtgttgtatgtaatttgagccagcccgcagcccttgtgtgccatgcgcagtgttagctgagtggctgggcccgctcaggagccttgggggtcaagctctggcctaaggaatggggagggcacagcctactcccacccccagggccacttgtgtgtggtcctgactctccacccttcttcctccttgacatggcttttggaggcttcctcccttcacttacttagaatgttctgggccgggcgcagtggctcacgcctgtgatcccagcactttgggaggccgaggcgggtggattacctgagatcgggagttcgagatcagcctgggcaacacggggaaacccgtctctactaaaaatacaaaattagccgggtgtggtgacacatgcctgtagtcccagctactcaggaggctgaggcaggagaatcgcttgaacctgggaggtggaggatgcggtgagccaagatcacgccattgcactccagcctgggcaacaagagtaaatctccgtctcaccaaaaaaaaaagaaaagaaaaaagaatgttctggactgggtgagggcactgtgaatatttggtactgactgacagttgcagaatcatgtggtacaagcaagactcttggttgcaagtttcagaaaccctcccaggtgggctcagtggcaggaaggccccatgtctccaaggtgggctcagtggcaggggaggccgcatgctggccccatgtgtcctcygcagggtacacttgagatcattttcttttattgaaaagagtctggctctgtcgcccatgttgagtgcagtggagcgatcacgactcactgcagccttgaactcctgggcctacgtgatccccctggcctaggcctcccagagtgctgggacgacaggcatgagataatgtgcccagccttagactgatcttaaaagtagaccgggccgggcacgacggctcacgcctgtaatcccagcactttgggaggccgaggtgggcagatcacccgaagtcaggagttcgaaaccagcctgaccaacatggcaaaaccccatctctactgaaaatacaaaaactagctgggcatggtggcgcgtgcctgtaatcccagctgctcaggaggctgaggcaggagaatcacttgaacctgggaggtggaggctgcagtgagctaagattgcaccactgcactccagcctggacgacagagcgagactctatctcaaaaaaaagtagacccttaggttgctgtggcgagccagccttgtagccgaccctcttcccacataggacttgtgactgagggcaccagcctctgaagctccgtgctgttctcttggccatgtgactgaggkcaccagcctctgcagctctgtgctgttctcttagccaccagggttctgtcatccttgcttctttgtacctctcctggacccagagcctgaagtgcggtggctgcgctcacccagggaggggtgcggggcctgcgctcacccagggaggggtgcggggcagtgcagagcgcaggtaagcagggaggggtgcggggcagtgcagagcgcaggtaagcagggaggggtgcggggcagtgcggagggcaggtgagcggggaggggtgcggggcagtgcggactacaggtgagcggggaggggtgcggggcagtgcggactgcaggtgagccgggaggggtgcggggcagtgcggactgcaggtgagccgggaggggtgcggggcagtgcggactgcaggtgagccgggaggggtgcggggcagtgcggaccgcaggtgagcggggaggggtgcggactgcaggtgagccgggaggggtgcggggcagtgcggactgcaggtgagcggggaggggtgcggggcagtgcggactgcaggtgagccgggaggggtgcggggcagtgcggactgcaggtgagcggggaggggtgcggggcagtgcggagcgcaggtgagccgggaggggtgtggggcagtgcggagggcaggtgagccgggaggggtgcggggcagtgcggactgcaggtgagccgggaggggtgcggggcagtgcggagcgcaggtgagccgggaggggtgtggggcagtgcggactgcaggtgagcggggaggggtgcggggcagtgcggactgcaggtgagcgggaaggggtgcggggcagtgcggagcgcaggtgagcggggaggggtgcggggcagtgcggagcgctggtgagccgggaggggtgcggggcagtgcggagcgcaggtgagcggggaggggtgcggggcagtgcggagcgctggtgagccgggaggggtgcggggcagtgcggagcgcaggtgagcggggtggggggggttgcggggcagtgcggagcgcaggtgagctgggaggggtgcggggcagtgcggagcgcaggtaagcagggtctctggggcttggttagttggttctaggtcatcaggcctgtgaggcccagattctgccacagagtagctgccccctggcggctctcctggtaccaaccgccttcacttccaagttgacagcttgatcatcaacatttgtccactttggctagttcccagcgtgaagtaaaaatggtcagaaccaccacagcaacccttaggggctcttcgtatttgccgagcatggtcagtagtactttatgtggattgtgtggtcctcacagtagccctggaaagtgggtactataattacttccatctcgcagaagagaaaagtgacgtttgcagagattagttgcttgccagaggtcgagtggtggagtgggggctgggagccccagggaggtgtccttagggcccctgtcctggcccccgttgctctgcgcattgtgccctggaggagatgtctgagcatataaggtagtagaggctgttggggcggagagtgacaggccaacaccacttcatgctcagctgcggctgacccttggcaggaacaagcctgtgttacttctgtggtttctgtctgttaacatacagggaggtcactcttggggaggaccccatgggtgggctcaccattgggggaggtcactgtcgagggaggaccccctggggtgaattagacgttcggggaggtcactgtccagggaggaccccctggggtgaattagacgtttggggaggtcactgtcgggggaggacccccttggggtgaattagacgttcggggaggtcactgttggggacgacccccgggtgggctcaccactgggggaggtgacagtkgggctgggccactcscctttcctcctcctccactccgtggactcctggtgaattgctcatggttgtctgtgtgggtgcgcatccccgtgtcccagtccgtctgtgctgctgtaacagaacgtcgtacactgggggcctataaaccacagacgtttgtttattcctcacggctctgcaggctggaagtccaggcgcaaggcgccggcagatctggtgtctggtgaggtccagcaccttctcgctgtgtcctcacagggcagaaggggtgagggagtgctctctggggcagtaatcccagtcctgagggctccaccttcatggcctagtcacccccaaggaggccccacctcctaacaccatcaccttgggtattaggatttcacacaggaattttggaggggacacagattcattctgtagtgttgtgaattatgtgtgtattgaaaatgttggtatgtggtattttacgttagaaaagtgtctgtttcttaaaagaggccgagttgattaaaaaagatactcagatctgcctgtagtggtcctgtactgacctcactgtcccccggcactctgtcccgtccccagcgtgctccgtgcatcctacacgcatcctggtgagaggtgtcctcagccctttgcatggacgctggtgggctgtgtgggggaaggttgcccagctctgctcatggggcctgcaggctgctcgggggcaccagactctagtgtcccaagtcctcagagtgtcccctgggggtttgttttatttggacattttgatgggtttaaaaagtgtcaagctttgatttgtgcctttctgagtagcgagtttggtaatgcttatttgctgctcagcctccccttctggcattgcacattcatatcctgtgcctgttatttttttattcttatttttttgagatagagtcttgttgtgttgcccaggctgtagtacaggggtgtgatctcagatcctggcaacctcctcctgagagcagcccccgggcagaactccacccccatgacccaatcagatctcacaggagagcactcactatcctgagagcagcccctgggggaactccaccaccacaacccaatcagatctcacaggagagcactcactatcctgagagcagccccccgggggaactccacccccacgacccaatcagatctcacaggagagcactcactatcctgagagcagccccgggaggaactccacacccatggcccagtcagatctcactatcctgagagcagccacgccatggggaactccgccccataatccggtcacctcccaccaggcccctcctccaacattgarggtcacaagtgaacatgagatttgcatggggacgcagatccaaaccgtatgtgctgttatgaataaagatccaaacygtgtccgctgttatgaataaagatccaaaccgtatccgctgttatgaataaaggtgccgagaacattttttttcaagtctttttgtggacgtgtgtttttctttgtcttgggtaaaaaataccaaggagtaggwttgctgatttacaggttggatttaggttgaacttcacatgaaacaaccaaacctccttccacggtagctgcaccattttacatttccaccagctgcagtggagagttcctggctctccacttcctcaccagcatttcttgtggtctctcattttgattacatccattcttgtgagtgtgcagtggtgtcgatctcattgtgatttcattggaatttccctgatgatgatgttcagcaattttttttttttttttttttttgagagggagtcttgcccaggctggagtgcagtggctccatcttggctcacggcaagctccacctcccaggttcaaacaattctcctgcctcagcctcccaactagctgggattaaaggcatgcaccaccatgcccagctaattttgtattttttagtagaaatggggtgtcactatgttggtcaggctggtctcaaactcctgacctcaggtcacccgccggccttggcctcccaaagtgctgggattacaggcatgagccacggcrcctggcctttttgtccattttttattgggcagggagtttctgcttactctggatacaggtcttatgtttatatatttatataatttatgtgagaaagagaaggcaagccttagctgtggtcactctgctgtcccaggccaggctgcctcagggaacctgggccttgagatttgacctggcttgagcatttgatgtctctgtgcctccactccccacccctccactccctgcccttgagatgaggtcttgctttgttgcccaggctggagtgcagtggcatgatcacagctcaccacagtcttgaactcccggactcaagcgatcctcccacctcagcctcccaggtagctgggaccacaggcacgcaccaccacgcctggctaatttttaatttatttctggtagagatggagtcttgttatgttgcctgtaggctgttctcagaactcctgggctcaagtgattctcccacctcggcctcccaaagtgctgggattgcaggtgtcagccactgtgcctggcctgtgcctgttccttaattggcagagtgtgtgctgtaaaatgtatataacagggtcttggaggtacccgacatgccattctttaatgtcttatacgttactattatttttaaataaactgtattattttgagttcattgtaggttcccacgcggctgtgagaaaagatggagatcttttctattttagacccttgcctggtttccccagtggtgacggtcgggatgctaaccctggtgcaggtgaggctgtggaagtctccatccccgtagggagccctcatgccacctctcagccacgccatttccttaccctctggaaacctctagtctttgctctgtctgtgattttgtcattcgaaggatgcagtgtaaggggaagtgcagaattcttcaggtaattgtgtgtcagtagcttgtttcccgtggtgagactcctctgcgtgagtgtgcacggcttgcccagccagccacccgtggaaggacatctgggctgtttcctgttttggctactacagataaagctgctgtgacacttgcgtataggtttttgtgtgaatatacgttttcatttctgggataaatgtttaagagtgcagttgctggttcatgtgtggtaattatgtgtttagtttgttagaaaactgccagattgttttcttgagtggccatacattcccaccagcaatgtaggagcgtatcagcctggttaggctgccataacaaaatactccagactgagtggggagcagtagaaattcactctcgcagttctggaggcttgaaggccaagagcaagatgctgtcagtgctgattccaggagaggcctcttttgctggtttgcagatgctgccttttttttttttttttttttgagatggagtctcgctctgtcacccagactggagtgcagtggcgcaatctcagctcactgcaacctctgcctcctgggttcaagcagttctcttgcctcagtttcctgagtagctgggactacaggcgcccaccaccatgcgccgctgatttttgtatttttagtagagacggggtttcaccatgtttcccaggttggtctcaaactcacgacctcaagtgatctgcccgcctcggcctccgaaagtgctgggatcacaggcctgagccaccgcgcccggccgatgctgcctttttgctgaggggatgctgacatctctggtgtgtcttcatcttataaggacaccagtcctattggattagggccccactcgtatgaacttatttatccttcattacttgagggcccgtctccgcatagggtcatctggggcttccgcagatgcattttgggggcacacagttgagtccctaacagcgagtttctctttgtactcaccagcatttggcgtcgtggtttttactgtgatcattgtgatacatgtgtagcgatacctccttgtggttttgatttgcattttcccgatagcttgggagtgcttctttgccatctgcatatcttcaggggtgaaatgtctgttcatgtcttttgcccacttcctaattatgtttttttgaccaagttttgagtgttctttattgtagatttaagtccttcgtagacatggggttttcaagtatctgttcctagtctgcagcttgtcctttcgtcccctaaacaggatctttttggacgcaaactcagaccagttaattaaaaaaaaaaaacaaacaaagcggggtctgttgcagatccaaagtttttcattgtgaagtctgatttatttttccttttacgaatcacgccttgtcacagctaaggattcttagctctttatcttgaagatttgtctcctgtgtttttctgaaagttttaaaccttcacagttgcagatttatgtccgtgtttattttggtgaattactgtatgtggctggcatttacatgaagctcattgtctggcaccatttgtggatcttccatggagttgcttctgtgcctccctcagaaatcatctcgatgggctgggcgtggtagcccaggcctgtaatcccagcactttgggaggccaaggcacctgaagccaggagttcgagaccaacctgggcaacatagtgaaaccccgtctctactaaaaatacaaaaattagccgggcgtggtgacgcacgtctgtagtcccagctactggggagactgaggcaggagaatcgcttgaacctgggaggcggaggctacagtcaactgagattgtgccactgcactccagcctgggtgacagagcgagactccgtctcaaaaaaaaaagaaaaagaagaagaaatcacctggattgatttgtgtggctgtttctgygattttctttccattccagtcatctttgtatctgtccctctgccaataccacatagccttgattaatttagctgtgtagtaagtcctgagatcaagtccagatattactatctttaaaaattatgaaatattttaaaatgcagaaaaatacagtaacataacraacacctatgtcctactatccagaataaacgttaaccttttaacaaaatagtatctggggccgggcatggtggctcacacctgtaatcccagcactttgggaggccgaggcagggggatcatgaggtcaggagatcgagaccatcctggccaacatggtgaaaccccgtctctactaaaaatacaaaaattagccaggcgtggtggtgggcgcctgtagtcccagctacttgggaggctgaggcaggagaatcgcttgaacccgggaggcggaggttgcagtgagccgggattgtgcctctgcaccgcagcctgggcaacagaccaagactccatctcaaaaaaaaaaaaaaaaaaaawtggctctaaacctttttcacaattttggtagaataatgtcgcaatattcttggacttctgggaccttctccttcctggtggcgttttcaccaccaggagttcaatgcacatccttcctgctcattttccttccgctttccctgcactgtgtgtgatactgcgttagaggtgttaaaagtcacatcagtgatgctgtgtttttttgttgttggttttttgtttttttttttttgagatggacttttgctctgtcgcccaggttggagtgcagtggcgtgatctcggctcactgcaacctccgcctcccgggttcatgccattctcctgactcagcctcccgagtagctgggactacaggtgcccgccaccataccgggctaattttttgtatttttagtagagacggggtctcactgcgttagccaggatggtctcgatctcaccttgtgatccgccctcctcagtctgccaaagtgctgagattacaggcctgagccactgcacccaccctgtttttgttttttaagacaagatcttgctctgtcatccaggttggagcacagtggcttgatcatagctcactgcagcctcaaactcctgggttcaggtgatcctcctgcctcagcctccctaagctttgggattacaggcatgagccgttcccagaccttagtatacacttttggtcaggcaccacttaggtgctggatgtagatgtaaacaatgtggaggaaatttctgcttcatggtgtttgtagtctagctgagacagacggtaaacaggtatccgagtagtgtgtgatgtaatgttagatatcagaaagtgtcaggaaaaaggaacaagttaataaagagtggctgggatgggcaggtgcattagggaaggcatcgcagaagcggtgaggagcagctcctgagggacgcaagggagcaagccaggaggtgcccagggtcaggggccccttccaggcctgtggtgtgtgggaaggccctgggcaggaatgggcctgctgcgtttgaggaagagcagttgtgtcaatgtggtggcttggaaccaaatgcggggtgcggctggagaggaggaggctggggaggcacccagagacctgtggccctgctaaggtcatgcggcactgaaggcctttggagccttctgtctttctaaggtcatggggcgctgaggcccttggagccttctgtcctgctaaggtcatggggtgctgaggcctttggagccttctgtctttctaaggtcatgcggcactgaggcctttggagccttctgtctttctaaggtcatggggcgctgaggcctttggagccttctgtcytkctaaggtcatgcaacactgagacctttggagccttctgtcctgctaaggtcatgcggcgctgaggcctttggagccttctgtcctgctaaggtcatggggcgctgaggcctttggagccttctgtctttctaaggtcatgcggcactgaggcctttggagccttctgtctttctaaggtcatgcggcactgaggcctttggagccttctgtctttctaaggtcatggggcactgaggcctttggagccttctgtctttctaaggtcatggggcactgaggcctttggagccttctgtctttctaaggtcatggggcgctgaggcctttggagccttctgtctttctaaggtcatggggtgctgaggcctttggagccttctgcctttctaaggtcatgcggcgctgaggcctttggagccttctgcctttctaaggtcatggggcgctgaggcctttggagccttctgtctttccagtcatggcatctgaaaatgagaggagttttagttcctccttttttttgtgtttaatatattttttaattgacagataaaattgatgtctttgtcatgtacgctatgatgttttgaagtatatatgcatcgtggaatgaccacatctagctagttaacacatgtactgcatcatagttgtcagttttggggcatttttcagaatgtaatctgtcgttagtaactgtatagtcaccgtgttgtacagtggatctcttgagcttattcttcctagctaactgaagttttgtctttcgttagtttttcctttttgatctttatgccttttattaattttcctagctttcttgcattaactcgaatctccagtaaaatgttggcttacagtgctgagagcagacatcttgccttgtttctgatcttaggaagaaaacacgattaagtcttatgttagaagtcagttttttgtagttgttgtttctaaattttgttggtgatccagtgttccctattctgctaatgttgtttactacagtgattgattttttaatgttacaccaaccttgcattcctgggatgaataccacctggtcatgatgtagtatccttattatgttttgctggaatcaatttgccagtattttcttgaggattttttgtgtctatggtaatgagtgatctctttccttaatttggtatttatacccttctttggttagtgttatgctaacttcaagcaatgagctgggaacccttctcctctatctaatgaaagactttataagcttgttgtgatttcttccttaagtgtttgatgtaatttagcagtggagccatctgttttctattttctatttcatggatttccatttacttcctttcatctgtgtttttcctcacagatttatttattatttaaatattttaacagttgagataaaaatgagatatacaggctgcatgttttaaatgtttcggcacatgtcatgtatgtatgtgtgtgtcacacactgtatctgccacgctaatcaaggcagcaaacatgtgcgtcagcgccacggtctccctcctccccacggtaacccttcgccctgctttcctgttcccatcccaggaaaccactgattggccttctgttactatagattcatttgcattttctagagttttctgtacactaactgtatgtgtatatgtactctctttttttggcctggcattggccttctgttactatagatccatttgtgttttctagagttttctgtacactgactgtatgtgtatatgtactctctttttttggcatggcattggccttctgttactatagatccatttgtgttttctggagttttctgtacactgactgtatgtgtgtgtatgtactctctttttttggcctggcattggccttctgttactatagattcatttgcattttctagagttttctgtacactaactgtatgtgtgtgtatgtactctctttttttggcctggcattggccttctgttaccatagatccatttgcgttttctggagttttctgtacactgactgtatgtgtgtatgtactctctttttttggcctggtcgtttgtgttttctggagttttctgtacattgactgtatgtatgtgtatgtactcttttttcgcctggcatcttttactcggcatactgccttttcgtgtgttattcatgttgttgcatgtaacagcagtttcctcctttttattgctaggtagtgttagaggtgtgggtaatttgttcattcacctgttgatggacatttgggttgcttccatttttaggctattgcacatgaagctgctgtgtagaagtctctttacgcacatgtgccttcatttttcttgggtaaatacacagcagcgtaatgtcagggctgtattgttgatttatgttcacctttttaagaaatcgccaacatgttttccagagtgattgtaccattttccatttccaaaagctgtgcrtaagcattccagtcgctccacatcctcagcgacacttggtctgggcggtttttaaatgtcaagtattctgctaggtatggggtcctatcttcgcggtttaagtctgcatttctctaatgggcagtggtgggacacgttgtgtacttgtcacaagtatatctttggtgatgtgtctattcatatcttttgcacattaaaaattttgttgttttctgggcgtggtggctcacacctgtagtcccagcactttgggaggctagacccgcctgggcaacttggcgaaacctcgtctcttcaaagaataaaaaaattagccgggtgtggtgacgcatgcctgtagtcccagcttcttgggaagctgaggtgggaggatcacttgagcccagatgtcgaggcagtgggttgtgatagtgccactgcactccatcctggtgacagagtaggaccctgtctcagaagaaaaaaaaattgttgttacttggatttttaaaatattttctcgatagaagtcctttattaggtatatgatttgcaaaacttagtagtgatttatcttttcatcctctgaccagttttcaaaaagcagaaattcctgaagtccatttatcattatttttcttttatgggtcctgcttttgtgcttatatctaaaaaatcactgcctaaccttgggcatgtggaagcacagttggtttttgtatgttgcccttatatccaacaaccatcctgaatgcgtttgttatggtagcttttctttagtagatttcaccagattttctgcatagataatcatgtcacctgcagataaaaataattttactccttttttcatctggatgccttttatttctttttcttgactgatggcaccggcgagaacttcctcacagtgtcgaccatcagtggtgagaacaaggatccccgcctccttcctgatctcagaagggaggattcgacattgcaccacgaaatgcagtgttcctgttggtctctcacagatgccgtctatcaggctggggaggtttctttctgtcctcgtttgctgagagttttaaatttcatgatgtagtttttccactgcagaaacctaaaagaaaactaagcaaattagaccccaaaacaatagaattaaattgattttcaaatgttaaaccaactctgctcctgatgtcttggtgggcttggtttgctgttttatgaagaattcttgggtccacattcgtgagtgatgttggtgtgtattctcttttatgtcttttcctcttttgggcgtcggggaaggaggtcccctctcttgttctgggtattggtgatctgtcctctctctctggatcagtctgtctagaatttatcagtctcgttggtctttggagaactgcttgtggttttgtttttccttctattgacctctgttcttaggttattcctgtctgtctctggagtagaggaagtgaaaggcagtggtgtatgcactggggccgcgcacgctggggctgagtgcggggggccatgtacgctggggctgagtgcacggggccgtgtatgctggggctgtgtgtgtggggccgtgtatactggggctgtgtgtgtggggccgtgcacgctggggctgagtgcggggggccgtgtacgctggggctgtgtgtgtggggccgtgcacgctgggactgtgtgtgttggccgtgtgcgctggggctgtgtgtgttgggggccgtgtgcgctggggctgtgtgtgttgggggccgtgtacgctggacctgtgtgtgtgtggggccgtgtacgctggggctgtgtgtgttgggggccgtatatgctggggctgtgtgtgtgtggggccgtgcacgctggggctgtgtgtgtgtgtggggccgtgcatgctggagctatctgtgttgggggccgtgtacgttggggctgtgtgtgtatggggccgtgcacactggggctgtgtgtgttgggggccgtgtatgctggggctgtgtgtggggccttgcacgctggggctgagtgcggggggccgtgtatgctggggctctgtgtgttgggggtggggctgtgcacgctggggctgtgtgtgtggggccgtgcacgctagggctgagtgcggggggccgtgtacgctggggctatgtgtgtggggccgtgcaccctggggctgtgtgtggggggccgtgcacgctggggctgtgtgtgtgtggccgtgcacgctggggctgtgtgtgtgtggggccgtgcacgctggggctgtgtgtgtgtggggccgtgcacactggggctgtgtgtgtgggggccgtgcacgctggggctgtgtgtgtgtggggctctgtgtgtggggccgtgcatgctggggctgtgtgtgtgggggccgtgcacgctggggctgtgtttgtgtggggccgggcacgctgaggctgtgtgtgtggggccttgtactctggggctgtgtgtgtgtgtggccgtgcacgctggggctgtgtgtgtgggggggggccgtgcacgctggggctgtgtgtgtgggggctgtgcacgctggggctgtgtgtgtggggccgtgcacgctggggctgtgtgtgtggggccgtgcacgctggggctgtgtgtgtgggggccgtgcacgctggggctgtgtgtgtgtggggccgtgcacgctggggctgtgtgtgtgtgtggggccgtgcacgctggggctgtgtgtgtgtgggggggccgtgcacgctggggctgtgtgtgtgggggcatgtatgctggggctgtgtttgcggggggcgtgtacgctggggccattatgttttgtagaaaactgctggccacgccacaagtcaatttgtattttacttagtgaaggtatttttaaagcctgatatgttaaataaaatcatagcattgaactgacaagtctttttaattttcaggagggtttgcatttgtgtatgaagctcaagatgtggggagtggcagagagtatgcattaaaggtaatgaaccatttaacgccttctctggatttctgacgtatgtaaagggactgtctggtgacagtcttttcagggatgcgtccctgttacgtactttgtttccttttacagcctggacatacttgtcccttttgcttctgctgaatctcagcagccttgggcactgcaggagccttggtctccagctttgggcttcacactcctgtggccctgcctgccctgtggcaggggctgtgctgggggtgacctcatggtggggtcatgccctcttggcctccatgtgccaaaataagggctctatgaatacaaggagtttaaaagctgcttgtaaaaaatatttgttgctagcatttctgtaaataggggtcactgtgggagggtctgtactgtgcagttttgtcctgagacgtaagaaggccccatttgctgtcaccacgctgggcaccagggtggccccgcctttgagagtgggcatgagtgggcctgttgtcgtggtctgcacgcctgctgcccccgtgtctgcagagcattgccgctcttccttcttgtctgtctcattttactctggcccatttggggaaaggctcctgcttttgacttttcttgtgtccttgcatcacaaagatcttttgagggtcttgaacccccagcacgtttttacaggggtcagaggtggagacacacgaaacggggggagctgtattagacacattgcattgctctgttgcgtgcttatgtctgagatgaygcatcgggtggagtaggaaggtaaacttgctttcatcttttgtgtgtgctgtttcctgatacagaggctattatccaatgaagaggaaaagaacagagccatcattcaagaagtttgcttcatggtatccttttcctggaaccaggagccagcacggtggctttggcaggcacaggcctgcgtcaagctgtgaccgccagtggccaagaggctgctccgtgacgttgtctttcatgtgttaaaatcggctttttgcttttaccaaacctagttgtaggcgacttctaggaagaagcagttttttctgttttttttttactgccagggtaatagtagaagattcagaagtgttgggaatgaagttgttcctacccaagaggtctccctgcccagtggatgggctggttaccacagggggcccttgcccggcccggccccctcagctcctccggagacctggctgagagccgtgcagatggcctggctcccacaggccccgatgtggcttctcagccscccctctcgtcccttctcaggctgtcccagcatgactgggcggggcatctcccggcgctgacagaggatctgggggctgcactccctgtccactgccacatgtccctcctgagcctggagtcttcggccctggctgccctcagactctgcctctctttcctctcctagctctgttcactcggagagcccgccggctgcctgagtgtgggttcgggtggacacagccacgccgcagcctccctgcgcacagccccctgagggccctgcctcctcctgccacgcgcgggatggactttggtgtcgctgtggtcaggtgtgtgtggccggtgtgcctgcctttgtccccgccctctcctgcagctcctcctgcctctgtctgcctttctctcggtcgtccactgctctctccctcatcttccgctctgacgtctaaaattgtaagggttcgattcaagtattctgacttcagtgtgttaatattgtctacatttattttgaagtgcacagaactgtggacatggttatgtacgttctcctttaacaagacaactgcagaaaaagctttccggccacccgaacattgtccagttttgttctgcagcgtctataggaaaagaggagtcagacacggggcaggctgagttcctcttgctcacagagctctgtaaaggtaacgtcctgtgaaggccggcttggtgccatctaacccagcagaggccggcttgatgcctcctaacccagctgcatggctgtgaaacatgcccggcatcttctctcaagctgtgttggtcttagcgggaagcgcgggcagctctctgacagtagttctgtgagaggcccacgctgacgcccagtgagcttcccactgtcccggtgggccacctgcatcgtctcctcgtggagctgcgggcagccagagagccgggctcccatcctgcctgtctccagtggcagcacggggtagagcgtggtggccttccgtgagtggtgtttagcaggggtggaggagcgtctgtccttctcagggctctggggtccctgtggggtggagcgtggtggccttccatgagcggtgttgagcagggtggaggagtgctgctgtccgtccttgtcaggggctctggggtcctggcaaggagaagagaggccgcagaggtggacaactccaggtccctctgtgggtgcccagcctcatcagggttgagcccaggaagatggcacaacgactccatggtccgtttgtcaggacaggaagagaggccggtgggttggggtggtgctttcggagagttctaggggcagagtggtctgtgtgagtgactgcgggggatgtcgtgttggtgtcaccggagcccacgctgactggccggagacctggcctgaccctgctgagcctcaggctgtgtctgcaaaggggaaacaagacctgtgcctcrgagggcggctccacccccagccctgcctcgtgccgatgccctccagaactcctgtgccaggtgacgaggggaagtcgagcactcggggaggcctcagagctgtggcctggccggtgagggggtggtgacactagtgacccctgcgtctgtcccccaggcagggagagaggggagaggagaggccgggagcagcaggggagactgaggcagggagtcccacagaaggaagcctgtggggagggcacctgtagccgcgtgagatctgtcgtccacaagccagcccctgctcagcagccaggaggagctgttcccgcaggccggctagcgcaggcctgaagggacaggtaggggtggggcagcaggttagcagagagggcagcaggaggggcatgtgtccagaaatggagggcgagcaagggggttctgagctgaggggggacccctgcactgagcagggccctgagcgtcgtggaaggggccctgtgcttagtggaggggggactgcacttagtgggatgggggcatcccgtgctttgtggggggcctgcatttagttgggggggccctgagcttcatggagggggactgcacttagcggggggctctgtactgctgagggctgagggtaggtgtccctgtgctgagctgggggagccctgtgctgagtgagggagggtggactgtggggtgtaagctgcttggatatagcggctgcacctgtcagtgccctgttgggcagggtctcttctctgcagctgtgcctgggaggagctgggtgagacctgactgcctgcgggcccctggctctgcccatgcttctctgcctgggggtcccacctggcccttccttgatgccacacctggcagctggcccaggcccctctgcggccctccagcgcctgttgccagggttgtcctgacgtgggtggcggatgggtgcttgacgtggccgagaagtctcgggggttgggggtggtcagagccgcctgcaggctgaggaratgctgccaggtagccccagttcttcatctgacactgtggggatgtgccgcttgtgtttctcagtgttgtgttctgaaacgtcaaactggcggaaaagttgaaggcagcacaaggggcgtccattgtccacttcctgctcatggggttccccagacttgagcgtgtcccacggcggctttccctctctccattctaaccgtttaaaaataagtcgcagacgtcaagaccagaaagcctcataactctatacagcctgagagaaattccatgatggccactggtgtttgtgcccctgagaagatcctcgcgatttggtgaggctgtgctgtgtggtccgtgctgggcccttcccgtccctgtctctcccatccctgacacgccgctcccggcccctcccgtgcgtccatgcagtccgtgctgggctgtctcccccatccctgacacgtcgcacccggcccttcccgtgcgcataccggggcctcgtcaaggctcctgtgtgtgttcggttgaggtgtctgtcagtcaatctcttgttgttcatggcactgttttctctggatgtccctggactctgacacccgctcctgcgctgcgcttctagggcctcctccagagctgggaggtgctgaaaccagtgggattaagatttgtcgggagcacgcatcacgccgtggggcctcccgctcgtggtgttacttgtcagttttcattataaaagaatacatgctgattgacaaaatacaaataacacagagttaggccaggcacggtggctcacgcctgtaatcctagcactttgggaggccgaggcgggtgcatcgcttgaggtgaggagttcgagactagcctggccaacatggctaaaccccgtctcttttgtattgtaaaaatacaaaaattagccaggcatggtagtgggggcctgtaatcccagctactcgggaggctgaggcaggagagttgcttgaacctgggaggtggaggttgcagtgagccgagactcttgtctcaaaaaaaaccaacaacaacccagagttttatgagtgcttataaaaatgggattttactttatataattttcctttttaaaaaaattgaccgtatcaggcgtattttttttggagacagggtcttgctttgttgcccaagctggagtgcagtgattcatagctcactgtagcttcaaactcctgggctcaagcagtcctcccgccttagcctctggagtagctgggacttcaggtgtgcaccaccatgcccagctaattttaaagagtaaacttttcttagagacagagtctcactatgttgccaggccggtcttgaacacgcgagctcaagcaacacctgtagcactgggattacaggtgttggcccctgtgcctggctaagttttgtattttttgtagagatggtgtcttgctgtgttgcccaggctggtcttgaactcctgggctcaggtgatcctcccaccaaggcctcctgaggygctgggatcgctggcgagagcaccctgctcaggcctctttccacgtggtgcggtcgcttcgttccatccagaaggctgcttggttttcctggtgtggatgcatcactgcgtcttctgtttgaggcctgcgggctttctcctggagctgcagcctgcctgctgtgtgagccttgccgcaccctctgcccagcacacttggagtaacttggataaaggccagacggggcttcctgtgggtctagtgatggatgttttgctgattatctccctcgtttgtcatttccgagatcagaaagcctttgcgaggggtaaatcttggttctagacattccggctttggaaggcttgagcaggacgggtgtgaaaactgaagctgctcggcgtccagtgtgttcccaggatatgtgcacgagggagcggcggggacagggccggggccagcggctcatcgctgaccctgcatggggtggtgtgggaaggagaggggccgggcccagcccctcaagtcataaatacacgaggcagactaacrcatgcgcgcgccagctcactcctggggactgcctgtctggagcagcatgtgcggctgagagctgagctgcagggctctgtggatggcacagctgtgccaggggagagccgtggcatctctgagaagcgggagggatgtgggctcccccgtgcagctgcaggttcagggctcactggaggaggcctggaggtcgggctccggggatgtgcccrgtccctcccatgaggcaacccctccagtgtcctctgagggaagagccacataccggttccccactcagccacatacagaatttttacttttaaaaaccccatttattctcactgagaatgaggcactgaacaggggrcccagttaccactgaaacagactcgcccatccatgatggccagcgtagagggcaagtcacccccactctgactccccgggcctggcctcagcctctcccgggtctgttcctctctttctgagcaccccattccttctatgggtgcccctcatttttcctgagagcccccctgtttctcagagggtcagcacaaagcttttgagggagctgtggtgagggctgagagggctttcacctggggttgagggccagggccggcagagctgggggagtgggagggcccctcagctgggtgcaggtgggggcagtgctgggctgtgctggggacacgcaggtgggtccggtctgtgagtcgattctagcgtggcccagcctgagctgtggcaggtcccgaccggctctcacaccatgccttcattgtcagtggaattgagtcggctacacgctctgctgtgtgcaggcatcgggggctcagtgactcgccagacacagctgatccatgcccatggcaggtggttgggtggctcgaagagccarggagagaatgagtcccaggagaagggtgcacgtttaggtggtgtgggcagagttggttccttgggaggtgagcagaaggggcggtctgggaggcatcctggccgcagaagcagcttgtgaggggtcctgaggcagggaggaagggaggccagtgtggctgggagcgcaagctctggcagcgtgggggagaccctgagtgtgggttccgtgggtggtggtactggccttggctctggggctgcaggggtcgtggccttcaggggtgtggagtgggatgagcagagggtgacggtggctgctctgtagagagcagaggcaggagcacggggctgaaaagatggggcacaagatgcagaggccccagggatgatgccacacatggactgtggccagctgaagtgggcaagacccagggtaagatcagggtaggagcaggatgggttgggtctgcacgtctgtgggggctgcataggggtgctggggtgactggcagtgtgaatgcttcagtccccagcaggtcctcagccctgcgtgctgccccggccccacatccctggtttcctggttgggccagggctagggtgcctggaaggtgccagccatggcaggacgggctccctggggtgtgggtcacgcacaggcactgatactgtcgtgaatgtgagaatgatcatttgtcatctgaggacactgagtgttcacttagaggtttgagcacttgtgtatttgtagtcatttctctttgtatccatgttaatgacatgcctggctcggttgccaggacacagatgtgattctcacrttaacggctcgccggctcggctgctgagatgccagtgtggttctcacgttaatggcttgccacctcggctgctgggacgccaatgtagttctcatgttaacggcacgccagctcaactgctgggatgccgatgtggttctcacgttaacggcatgccagctcagctgctgggatgctgacgcggttgttgcttcggtgacgcttgggcgtcttgccccctggcctctgctctgtgtgtgacttgactgtggggctgctccgagcccacccctgccactgggtggtggtcccacacacggggctgaggtgggcatcctcatacctgcagccctttctgcagcagctgaaggaaggaaaggtgggagcggcactcagggtgggcttaactgggactgtggctggaaaaggcagcgtggcctggtgtggtggcgtctgcagtaacgtggcctggggtgtggcggagtccgtagcatggcctggggcatggcagagttcaaagtgtggtgtggcgtctgtaatgtggcccaacgtggcagagtccgtggcatggcctggggcgtggcagagtccgaagcgtggcctggtttggcggagtccgtaacgtggcctggggcgtggcgaagtccgtagcatggcctggggcgtggcggagtccgtagcgtggcatggggcgtggcggagtccgtagcgtggcatggggcgtggcggagtccgtagcrtggcatggggcgtggcggagcccctagcgtggcgcggcgtggcagagtctgtagcgtggcctggggccagggagggcagagcactgattgctccacggtgatgatgttaaccgtagagagtcgtgactgcaagttgtccaggttcttggcattttgaacaaactggacagaacgcccagcgaaacaaagaaagaatgaagcaacaaaagaacgaaagcgggaatttattgaaaacaaaagtacactccacggtgtgggggtggcccaagcagcggctcaagggcccagatgcagaatcttctcgggtccaaataccccctagaggtttcccactggccactttgtgctcacctcatgtaaacgaagtggtagcccgccatcagcctaatggttgcagaaagcagccaaccagaaggtcacactcctgtgcaaacatctgattggttacgaaaagcaatcagaagacagggtgaagttacagagttgcaaacgaagaggagatctgcagtcaggcagtttcccatctgccaggcagaaaaggtcaaagggagtcacctctggtcgttttgttacttaggtgtggaaagtcagggttttcctttccatttagttctgggaagtccgcgtgaaacagccctaggttccctgtctcyggaccctgttctcctgcctccatgtgagtttcattctcttttagggcagctggtggaatttttgaagaaaatggaatctcgaggccccctttcgtgcgacacggttctgaagatcttctaccagacgtgccgcgccgtgcagcacatgcaccggcagaagccgcccatcatccacagggacctcaaggtagtggctccctccacacgcggctgccaaggcctctgtgtgcgggtcccactcggttaggagccgcccatcatccacagggacctcaaggtagcggctgctgaggcctctgtgtgcgggtcccgctcggttaggagccgcccatcatccacagggacctcaaggtagcggctgcygaggcctctgtgtgcgggtcccgctcggttaggagccgcccatcatccacagggacctcaaggtagtggctccctccacacgcggctgccaaggcctctgtgtgcgggtcccgctcggttaggagccgcccatcatccacagggaccacaaggtcgtggctccctccacacgcggctgccaaggcctctgtgtgcgggtcccgctcggttaggagccgcccatcatccacagggaccacaaggtagtggctccctccacacgcagctgccaaggcctctgtgtgcgggtcccactcggttaggagccgcccatcatccacagggaccacaaggtagtggctccctccacacgcggttcacagcctctgtggggggctcccgctcagttaggatgcaggggtgagagcaggtgaggctacaccatctcacctagaagatgtgcgtgagcctctcaacagtggaagcggatcttccagaaacgttgcttttccagccctgaagaaaattagcatctgtctcacaggcctttgccgacagagatcccgggatggccccgcctccctgctgggggccttcacgcccagytgggggtgctcacagcctggagcttccgtctggaataccaggtccccatgctggatgcttgctcactccagtttccgtggggagctgtggacgagggtgcccgccggtggtgtcagttcaggaccctattcctgctcaccccacactccttcctcggccgcccccccaccgccccccggtggtgtcactataggccccgcactcctgctcaccccacgctccttcctcagtcccctggtggtgtcagttcaggccccgcaytcctgctcatcccacgctccttcctcagccccccagtggtgttggcccaggcccccaactcctgctcacccagtgccccttccttggcccctgggcagtcctggaccccacagtgcctccctggttcggcctcttggagctgggaggaagcctggcgctcctctgcctggccctgtctcaggcgctggggtcgggggccggaccccttgcctactcagcttgaggggagctctttgcacttcctgactgtccccccactgcacctccccttccgttcaccggcagactctcctgcccatctctcctgtcaccacgggtttctccgaggcgtggcatcccggggttggcgtgatgtgggcatgagccactggctgcatgtaaaagggccgycctgcccaccacacygccacacagatgcttctagactggggctgsgctcgcgctccatccctgcccaccacaccgccacacaggtggttctgggccggggctgggcctgcgctccgtgctgctgccggcactgcgcggtttccatgtgatgtggctgcttcccacagccccacagaggacactcctgccccgtgggctgtccatgccctgagctgcctgtgttgattttggctggcctggtggggagtatagtctgacgggttgtgattttgccttttcctgatgttaatgaagttgaatgtttgttatagtcattcgggtcttgctcttcagtaaacttccttttgtttcttgcctttttcaaagattttccactggcttgtgtgtttggttcgttggagcagcttgtgtattctcataatctgctaagtgtcgcctgtgctgccggcgtcttctggtttgtggcccagttttcactcctgctgttgtgttttttaaaaaacctaggacgttgtgaggcttctccrttatctgtgaagcctgtgcctggcctgcccatggtgggcctcgtcctccgtgctgaggcttttgctgaagaggttttttggggttttttttttttttttttttttttttgagtcagtcactctacagcccaggctggagtgcagcggcactgacggggctcactgccrcctcggccgacttggcccaggtgatctcccacctgagcctcctgagtagctgggaccacaggcgcacaccacgcctgcctagtttttgtattttcagtagaaatggggtttcaccatgttgcccaagctggtccagaactcctgagctcgagtgatccacccgcctcagcctctgaaaggggtcgattccaggtgtgagccaccgctcccaggctgccaaagttttaaagccttatcactcccagatacttttgtccatgtctctggggacgtgaggacatttctgttttttttttttttttaggcggagtcttgctctgttgcccaggctggagtgcagtggcacgatctcggctcatgcagcctctgcctcctgggttccagcgattctcctacctcagcctcccgagtagctgggattacaggcatatgccaccacgccgggctaatttttgtacttttagtagagacagggtttcaccatgttgtctaggctggtttcgaactcctgacctcaagtcaccctcccgccttggcctcccacagtgctgggattacaggcgtgagacaccacgcccggccaggacattttttatgtggttttgacaccattatccgcagtgaggtgggaggaaccgagccttgtctcttgccctcctgttctcagccttccctggttttcccaaagtgtggcttctctcagacctcgctaatcgggagcggcgcctctggccacggcttgtggaggatgccctgtgctgtccttggctccccgccactgcccaggccaaggggacgaggaggccagtgaggccccagccccgtggcgtctcttgtggagcacggagctgtgtttcagatcctgctcccagcacccgcctcagctgctcctccagctgctgaaatctacctggcctgtgtccagaggtttcgttcatctggaattgaccttgtgtgacctgaggtgggagctgtatccttgtgtctacctggccctgcaccccgtgcatcagctcatgtctgcccatgcagccacctgggccccgcctcctctccagcgtctgctcgtgggtgcctaggaggcctcagagccccccagctctccccgtgtgccctaggtgggggatccaaggccgtggctctccacgtgtgccccgggtgggaggcccaaggccgtggctctccacgtgtgccctgggtgggggatccaaggccgtggctctccccgtgtgccctgggtgggggatccaaggccgtggctctccmygtgtgccctgggtsggggtgcctaagccgtgggcacccatgctgagctgttcttaactgcacaggctcattccgcctcagcctgcctcagcccacccagggccaaggctctggcaggcagcttccctctgtgtttctctggttagggctgccttttctctacttggctgtacactcctactttatagcacaggtgtcttcacgtagattttgaaaatgggtaagtgtggcctttttcgtttgtcccctgaactcagagggcctagaatgccagggtgtaaggtggccgactggacagatgccccatggcagaagcctgtgggcaccgccatagagcctgctcctgagccccaggccctttcgctcccatggccaccgctgtggagcctgctcctgagccatgccccaggccctttcaccccttctccttcctttcctccctccctctcttccttctgtttcttctttccttgtattttacttttctaaaagtacattctgcccagcacacagggttgcttttgagggaagcttcttcaaggttgcaagcaagacccctggtttccagaaacccatgcgcctgaggccccrttctgacggaaggggctgcagggctccatgaggggccagtcctgcccgtggaaggtgctgtttgctgtctgggtggttcttcctgaggagtctctgagtggtggattttctcatgacaccgagaccctcctggttcgcatttttgaagtgtgatgggtcgtgtagcggggcttgagtgtgtattttaaggagaacagaaacagaagggttgaaytggtgaagaatccgtgtctgtgagccaggcctgcacttcacagcactggccttgctgctgctccacagcggcgtggcgggaacccaggccagccctgcagcccgcgtgtgttcacctgtggcctccgccgtgggagtctggacggctgtttgcggaggggcaggcagcacacgtggccccactcgcctgccccgtgcgtcgtcctgctgtgcgcacagcttcgtctctgttggctgtagaatgggaacgggcacaggtggccccactcgcctgccctgtgcatcgtcctgctgtgcgcacagcttcgtctctgttggctgtagaatgggaacgggcacacgygaggggatgggcactcctgggccttcagtggccgtgtgccactgcatctccccgctgtgtgctctgcatccgagccagggtcgctgatcttttctctgggcgtcctgtgaggggagcctcgccccacgctctgcatctgattttcttgctcagccctgtggttcagaggccccggtcctgtatgtggcccgcatctcctcrggggccagtggtggccttaggcttyactgggtttctctggtcggccatgggtggcatgtgtgtccgtttctttcccttgtttatggtgagccatcctgtctgcaccacgtggacagcctgttcagcttgctggtccgcggagcaggcgtcctctctaggactggggtctgcagggcgctgtggttggagagygtctgcatctaaccctgggcgtccccttgcactcttggatgccacggctctgcactttgctgtcctggggcatggcgggtgctgctccctcagcctgtcctgggtgcccatggccttagtttgcattttttctcctgtcgatgaggctggcttatcagaacttgggcttcctctgggaaaatgcctgcctttcctcgacttgccttcctctcgctgcctgtgtgagcccataytgaccgcgtgcatgccgagcaccttccgtccgtggctggtgtgctgccctctcggagccctgtgctgcctgtgggagcccgtactgaccgcgtgtgtgccgagcaccttccatctgtggctggcgtgctgccctcttggagccctgtgctggcattgttcttcctctccagagggatgcctgtgctggccatcctgccacgtctgtgctgtctgtcttgttgaagaagccgctccttccctatctcagaaggagctcctctgggccatcttccgaaagatctgtggtttgcctaaatgttggggctgaggcttccttgattgtgtgagctgggggcgaggctttctcctttcgttccacatggatgcctggtgctggcagctgttttgccatggctctgccattaagatgggtgttgtgtggggcgtgagcactgtggggctgagtcactgcgttgctgccttgtcacgcgtgcagcctctggcgtccgtggcttctcagcagcactcgctggattccctgtttggcccgagctcccatgccctgttatcagagctgcgccagaaggtgtaatgtgggcttcacaattgtgtggccctttctagttctttgtgtctctgtatacttttttttttttgagtcrgagtcttgccctgtcacccaggctggagtgcagcggcgcaatctcggttcactgcagcctccgcctcccaagttcaagcgattctcctgcctcagcctcctgagtagctgggactacaggcgcccgccaccatgcctggctaatttttgtattttttagtagagacgaggttttaccatgttggtcaggcgtgtctcgaactcctgacctcaggtgatccgcccgccttggcctcccaaagtgctgggattacaggcgtgagccaccacgcccggcctgtgagccccattattaactggattatctttctttgatttatgggtggtttttaattttctgctttttatttttctgaattacacatattacatttgatcagaagtaatttaagacatctttgaggaaggctcatttactgaactctgtgaaatccctcagcccctcggggcccgcttctcaggccggcccacccgccagggcccctctgcctaggcctggagcggcccctgcaccccgagctgctggtgcrgagctggctgtgtccgcaggtgtgaggtgctgcaggcacccggcagccgtggccctgggcgagtgctgtctgcgaagggccctggctgtgtctcacacccgttcgttttccctgaagtcccatctctgtctacgccaagttcacggggctgtcttgtggaattttacaggttgagaacttgttgcttagtaaccaagggaccattaagctgtgtgactttggcagtgccacgaccatctcgcactaccctgactacagctggagcgcccagaggcgagccctggtggaggaagaggtgagctgagtggggcctatgctgggggaagctggcccttcccacattccacgccctgagtgcggagtgctgttttcygccggggtgctttgagtctcgctctgtcaccaggctggagtgcagtggtgcaatcccggctcactgcaacctccgcctcctgggttcaagcgattcttctgcctctgcctcccgagtagctggggttacaggcacacaccaccacgcccagctaatttttgtgtttttggtagggacggggtttcaccgtgttggccaggatggtctctatctcttgacgtcatttgtgatccacccgcstcagcctcccaaagtgctgggattacaggcgtgagcaatgtaataaacagactttattttttagagcagttgaaggtaacaggaagtggagctgaaaacacagggtggccccatccatgccctctcacagcccctccttcctctgagcccctcacgtccttggctctcctccgaagcttcttttcccagagatgggcagatagatgccgtctctgcccacacgtagcctgctctcaccctgtgtcttggagctggaggagttaacttgcgctctctgcacttgggccttcttgctcttgtgtcttgcattggtagctgactgtcccggcctcaggcaggtcattcctggaaarcaggtcttcgtgcttttcagcatgagtggagggcgctttatcctgctttccrtaagctctcattttcccattccctttaagaaattgtggcctgcccaaggccgtgcgctgtcctgctgtataactgcagagcccacttgccccctgctctcctgtgaatctgcagctgaggatggggtttgtgtgtctgccgtgcacggagattcactgtytcctcacagctctgcggccccagcctctgcctctcacaacatgtctgccatgcacggagattcactctctcctcacagctctgtggccccagcctctgcctctcgcaagtgcctccgtgtgtttgtgaggctctccattgttaaccttgaaccagtcgggtgagcttgggtggacggcttcctcctcccagataccctcacgtaccctggggttctgggtgtcacagaagctgctctgggtgcggccactctggagcggggcccttgtgccaggtgagacacccttctcctcagcaagcggacttggtgcgcagcaggccaatacgtcggtgccgacatgccatgaagcacgggaggccgtaggagattgagggaggtgaatgactcagtcctcatcgtaaggagcgcgctgaggccgaagatgagcagcggagctggtgcatggggccgactggcctgaggtcatcccggggcatagtgtgcgggacaggctgcccctcagtctgctgtgcatttggaaagctgcacggaagtggtgcaacataaaaaatactgtttgtgggatgcaacttttcctttgaaatgtttgtattttttcagatcacgaggaatacaacaccaatgtatagaacaccagaaatcatagacttgtattccaacttcccgatcggcgagaagcaggatatctgggtgaggtctggcgcctctcagtggcagtgcctggctccgtgcgccctacttaacctgaggcggcgtgggccgggcacctgccactcggaactggcctgcctcctccaccccctcttcccctcccgtccccttttctttttcctttccttaagaatcactgtggctgccactgtttttttgggtttttttggagacagggtcttcctctgtcacccaggctggagtgcagtggtgtgacctcggctcaggctcaccgcagcctcccgcccctgggctcaagggatcctcccacctcagcctccygagtagctgggaccacaggtgctcaccaccatgcccggctattattttgtatttttggtagaaggggtggtctcaccatgtcgcccaggccggtctcgaactcctgagctcaagcggtccacctgcctcagcctcccaaagtgctgcgattacaggcttgagccactgcaccctgcccaaccttgactacttctaatagggatgagtcgagtagcagttgggggcgtcctgtgcggctgggtctgcctgaggctcccctcggccccgtccatggcttgttgtgcatctggccctgagtgccttggcccaggagtgtccctgccacaccccagccttgctgcgctcagagccaggccagagtgagggctgagcctgatggctggggtggtctcctgcgtcctccctcatccctgcatctctccaaggccatgtccccattgaccgagggtgaccacgcgtggagggtgtcctgccttgtggttcttttgacgtccccttaccccgtcattcagccaccaggtgcggcagttggccctccgtagtgtatttgcctacggaccgggtcagccgtgccatcagccacagcacatgggctgaaggctgagacagcacgtggggctgcaggctgagacagtatgtgggctgtaggctgaggccctgtgtcccttgaggagtgtggaaggatggggccacgtgtgtggtcattgcctgtgttcttggcccaccctggtgactggtcctctgcacatcccgcacgaggacactcctggccggctcttgctcggcctggggtcccggtgtgagctcttactcttggctggataagatcctgatgccgaagtaatcaccagtcccttctctgggctcacatattgggtgattgacgagaagtcgctgattgttcaaggccagttctgcgaaaatcctgagcagactgaggaggctgcttcctgcagcttctgccctgtgccctacaccctgcatatggggtcagttctgaaaagtggrtctctgctgttgccaaggacaggacaggtgccttgcccctcgcatagcacacagcagggtctgtgctggtcccaccagctcatagatcttcagtgcatgagtgtgggaaccccggaattttgaaaggaaccwttatttatttatttatttatttatttatttatttatttgagacagagtctcgctttgttgctaggctggagggcagtggcgcgatctcggcgcactgcaacctctgcctcccgggttcaagcagttctttgcctcagcctcctgagtagctgggactacaggcatgcaccaccacgcctggctaatttttgtatttttagtagagacgggatttcaccatgttggccaggctggtcttgaactcctgaccttgtcatccacccgcctcggcctcccaaagtgctgggattacrggcgtgagccactgcgcccggcctgaacggaactttttaatcttaagagcctagagtccgtttaacactgtcacctggacagttctttgcggtgaatagaagtggagcatccaggcctccccgtgccgtgggaagcacgccgccagctccgcacagtcaagtgatgtttgtgtaaccaccgactatacccctaggatccccaaggaaggagccacccctcggccagtcaccatgtctgcggtgctcctctcacgcccttgtccccttgggctcgggcatcacccctgctctcccctcagacctgggagtcacccctgcactccccgcaggcccaggagtcayccctgcgctccccacggctccgacgtcacccctgcattccccgcaggcctgggtgtcacccctgcactccccacaggcccaggcgtcacccctgcgctccccacggccccaacgtcacccctgcgctccccgcggcccgggtgtcacccctgttgttcccgcaggccccgstgtcacccctgcatttcccatgttcccgatatcacccctgtgttccctgcagtccccagtgtcacccctgcgctccccacggctccgatgtcacccctgcattccccgtgggcctgggcatcacccctgckctccccgcaggcccaggcgtcacccctgcgctccccgtgggcctaggcatcacccctgctctccccgcaggccctgggctgcatcttgtacctgctgtgcttccggcagcacccttttgaggatggagcgaaacttcgaatagtcaatgggaagtactcgatccccccgcacgacacgcagtacacggtcttccacagcctcatccgtaagtcccggtggaatgcgtgcgtggggcaggaccctggagcacagaccccgcgtggctctggagaccccgctccccttggggcactgctcacctggccccactcccgcccgtcaccatagttttgacaacatccctggggggggggtttccagagagctcccctgccgcccaccccgctggtgaatttgcggtgctctgagtggtgatttttgatcattttgttcggtttttgttcttccctttgccgctcccttcttgcttctgacgtcactgatgtgtrtagagggagtggcctctggtggtctgtgacctctgccagtgcagggggtgctgacccgcctggggaaccgtggggccragcgcgctgtgcttctgctgcaggcgccatgctgcaggtgaacccggaggagcggctgtccatcgccgaggtggtgcaccagctgcaggagatcgcggccgcccgcaacgtgaaccccaagtctcccatcacagaggtgagggaggcacacgtgagccccaaatcccccgcagtggtgaaggaggcacacatgagccccakatcccccrcagaggggagggaggcacatgtgagccccagatcccctgcagaagggagggaggcacacgtgaacccyaagtctcctatcacagaggggagggaggcacacgtgagccccagatcccccgcagaggggagggaggcacatgtgaaccccaagtctcctatcacagaggggcgggaggcacacctgaaccccaagtttcctatcacagaggggagggaggcacatgtgagccccaaatccccccacagagaggagggtggcatgtggctgtgctgcttcgtccggaccctgcaccctgggggtctctgcccacttcagtggggagccacaagctcttgagggccctgggctcctgcaggagcagggtcaccaccgcagcccagggccgagaccccgggggcatgctgggaccattgccaaggtcttcgcactctgcacgcgctcctctggcctccttgaggtttgcaggcgcctttctagattcttcccctgacaggacagcatgaattgctcctgtgtctttgtttctggggtctggtgtccaagccaggtcagccagccctcagctctgggcgtcctggggtgtcctgagttgctctgcgtctgtgtttctgaccctcagctcagctctgggcgtcctggttgcagttgtgtcagggctgggcctggccagggtccactcccaggcaccggtggctgctggcagcatcagggcctgggggctgggagactgaggcccacagggccrtgtgctttgtggaagtgtgaggcctgggagggagcagcacgtgttggctggaagatgctttcctcagagtcttttctgacccagccgtggacagggtgcagcatctccatcaccagatcctcgaggcagagcagacacgcggcccggccctcacccacggggagcagggaggcccctgggcatcccagctcagggcccagtcaggacacgcagggcccctctgcagatctcgcaggggtctgtgtccaaggacccaggactcttggctcctgcattttgtcccyttttcagcccttgggtcgtttccactccctggtagctggaagccggaacttccaggggccactgcagtggagctgacccaggcggtgggtgtggagcgtggggagaaggtcagagctgctgcccggagtccctgtctgaggacaggaccctgtgggacaaggaaggtttgggctgtgtggagggtttgcagttccttgggggccgcgtgggtacagagacctgggagcagggragtgctgggaagcccagtgcagacggggagaggctgtggtgcccctctctggcggccatcatggtgggtgcaccagcagagggagccctggtgctgggtgctggaagcattttgaggtgtggggcgctctgaggcgggagagttgatgtcactggtggcctctcagcaagcttccctggggctgtcagagagcggcaggaagggatcactcctgggccgtcctgctctttagcagcctgggcctcgtgtccccctcgcttggtggctctttacagaaaatgcctgcccactcccccggaggtcacagaggacagtgggctcgcaggggggtgtgggcctcttgctttgtcgagtgcgctggagggattcttgatggggcgggaggaggtgccgctgggcagatgggcagaatcaggcccctagtgatggggcggggtcctcagtgcttctcatctgagtgcttctaggccgggaccccgtggggacagacgttagacccctgcttaagccaaccgactcccccagaaaacacagtccatgatggagctgagttcacaatgaaataaaatactgcccccaggaggtagtgagcctcacagggtggcccccagaacccaggagctgaagtgatggaacatcctgggacagacaggccatgtgtctgcttaatatggttgggcatgcgaggtggaggctgcagtgagcccagatcatgccactgcactccagcctgggagacagagtgagactccgtttcaaaaaaaaaaaaaagaaaaaaagcctgggtgcagtggctcacgcctgtaatcctagcactttgggaagccgaggcaggcgaattgcctcagctcaggagttcaagaccagcctgggcaacgtggtgaaaccccatctctactaaaatacaaaacaaattagccaggcgtggtggcgcatgcctgtagtcccagctactctgggaggctgaggcaggagaattgcttgaactcatgaggcggaggttgcggtgagctgagatcgtgccacagccctccagcactgcagcctgggtcacagagcaagactctgtctctaccaaaaaaaaaaaaaaaaatgttggttggacagactgggaagagagagaaaaggaaaaggaacagaagctgtagcccaagagtctgaaaagctgggctggagtgctgagcacctgcaacagccccaagcgaggcaggccgcggggtgaggggatgagggctgcgtgcgtttgttgagttccagctgatgcttcagcctgtgggaagttcctcccttgcactgtgtcatagatcagggggcagaaggatgggctctgagggcacccataccgtacctctscccgacgtgggcaggcgtgagttgtcagtttagagaactgacctctgcattttcattgtcacagctcctggagcagaatggaggctacgggagcgccacactgtcccgagggccaccccctcccgtgggccccgctggcagtggctacagtggaggtgagtgccctgtcctgtgcccgccacctgtccctcgctcctgctgcaccccgggcacccgcagcacattgggatggagtctggggtccttctctcccggggcctcctctcccaccagagatgactgtgaggtcagggtccctgagcacaccctcaggttcggcagttccctggggctcacagagctcagcaaagctggtgtcttggtgcagttcaggagggggtcaggattcggactaaagccagccaagggaagaggctccagggcagggcccaggagaccgggcccgagtgaccaggcggcctcgctcaggggttatgtgggaggcagcctgcgccgtggccaagaccccagcatagatcacattgtcgtgtctggcacagcccaaggccccagggaaacagacaccccttttggggctggagggggcatcccaggttccttcccaggagctgggaatgaagggccaggcctgctgtgggcaaggtgaaccatttactacagtagcgaccctgaggccagggggcaggagcaggcattggacagtggagggcggtgggggaagacagttctgccgctagtgtgaggtggccccttctgccgcatgaggagtgggcacctgtgatgggcctgggtgtccctggagggccctcagctggtgaggagtggagagggccctggagacagacgctgcatgctcttggaactccgtgccgggagtgttccagaaggttccgggtgagccgtcgaggacatggccctgacaggcagcggctgggtctgcagctctgcatggcgctgacccctcccgacctcgccccgcatccccactgcggtgtgggaggtttcacctgggtccttcacctccgcttcccagggaggagctcagctccatgtctggggcaccccggtccgtgcagtgtgggtcccacacatgcaggtgtagtggctggctgggtctctgctggctggaggaagggtgagtcctcgagctgctgggttctgcagtgcccccatctkctcggtgctgcctgggcctcggtctcctgtctgcatgagggactttggccaggtgttttttttttaacaccacttgtgccaccaaagccgcctgtgaagacctcactcgcaggacccaccaggccaggggccaccactctgccttcacgtccagggtcatggtggcctgaagctgtggccgtgaggccggactatccccacagacagagtcccagccccagctgtgctgaggcggccacatagcccttccgcacccagaytgaccatttcctgggtctctggaaaggctgaggacagggtagacctgccagtgctgaggcctggcttcccgctgggtacgtgtgggtcaggggcctggccataccacccactccctgctcctgctgcctgggcccagccagcaacctgcacctggggaggtgggaccgagcgcctggggaggtgggaccragcrcctggggcctgggcccagccagcaacccgcacctggggaggtgggaccgagcacctggggcctgctgagactgtgtctccctgcaggcctggcgctggcggagtacgaccagccgtatggcggcttcctggacattctgcggggtgggacagagcggctcttcaccaacctcaaggacacctcctccaaggtcatccagtcygtcgctaagtgagtgtgmggctccagagccctggacctgccgcaygctcgttccaggctgcagccccggcccttgcttcctggctgcggtggaacagctggtcatcaggccccacaggggcccctgaggcagtgggacagcatcacccgcttctcccagggagtcggaatgagcccagcatcccacagagccaggcagatccctttcctttcatcgcctggggggcaaggccctgctgrggagatgcctgggccctcccctcccttgctgcaatgtcgcccctcactctggggcgttcctggsttgttcccgggactctgtaaattgggtgaaacctcggtggtggcgcctcactgagccagtccttgagttaaagccctagttactcagacttagaccaggtgagtcccagcctgtggtgggagaaagtctccctctgggtgggctgtccaagggcgcgtctgtgcgggggtggccccgacatcggcccacaggcccggcagcctctgctcacggaacactgggaatgttccagagtgcggcccctctgcgttgcggggtccatgcgctggctcttctgaggagctgaacgcccaggagcacgctggctgctcatctggccctgcggtcgcaccagctcaagggcgtcggctatgtcaggaaacagcctaggagctgggctggactggtgcccgtgatgcaggaactgcggcccctggtgggcccacgttccttccacagctggcgacaccttcgggctttttcttatgttttttgttctgtgctgtgatcactgttttgtgtccccagcaccaggtagacgtgtgtgcacttgtgcctgcatgtaccgcagcgtctgcacatgtgagcgtgggtgcatgtgtctttgagcatgtgtgcatgtgagggaatgggtgtgttaacatacatatgtgaacatgtgtgcatgtgtgtgtaaatgctggtgtgagtatgtgcataggcgtgtgtgattgctggtatgagcatgtgtgctggtgcttgtgagtccttgtgcttgtgaatccttgtgtgagctgagtgctcgtattgtgtgcaggcacgtgtatgagcacatgtgcatgttggagcatgtaygcgtgtgtgcatgtgtatgcatgtgtaggagtgcytgtgagtgcgcgtgagctgtstgcatgtgtacacgtgtgcgagtgcctgtgagtgcacgtgaactgcatgcatgtgtacgcatgcgcgcgagtgcctgtatgagccgcgtgcatgtgtacgcatgagtaggagtgcctgtgagtgtgcgtgagctgcgtgcatgtgtacacacgcatgcaagtgtgtgtgagccacatgcatgtgtacgcatgcacacaagtgcctgtgtgcgtgagctgcgtgcatgtgtatgcatgtgtgcgagtgcctgtgagtgcatgtgagccgcatgcatrtgtgcacatgcgcgcgagtgcctgtgcctgagctgtgtgcacatgtatgcatgcgtaggagtgcctgtgagtgagcatgagccgcgtgcatgtgtacacgtgtgagtgcgcgtgagccgcgtgcatgtgtacacgtgagtgcgcgtgagccgcgtgcatgtgtacacgtgagtgcgcgtgagccgcgtgcatgtgtacgcgtgagtgcgcgagccgcgtgcatgtgtacgcgtgtgtgcgcgtgagccgcgtgcatgtgtacgcatgtgtgtgagccgcgtgcatgtgtaagcgtgtgtaggagtgctgtgcgagcgcctgtgtgtgtgagctgtgtgcctgtgagtgcgtgtgggccgcgtgcatgtgtaggagtgctgtgtgagtgcctgtgtgtgtgagctgtgtgcctctgtgtgtgctgcatgtttggctgtgtggttccattacctgtgtgccttgtccttgtgcaaccttttggaaagaaacctgctcttagtgggcctgcatatccccagagcaggacgtgagcccactcgcacctctgggcacctcctctgtgacgcctcctgcctgagttgtggctgacagaagatcagaggcagctctgtctgtctggtgccagcgcaccgcccactgggcccagggctgtggctcctgcagggtcctgacaggtgacactgcgtgtggagcgtcagcagggctagccatggacccaggggggtgagagactctccagcgtcatcttggtgagagtgatgttgggatcagagtggaaacaagacagagaggatgcggcagcaaagccataagtgaaagtcactaggaacggtcactttcggcatcagtgaaaatggtctccatggccgcagcacattgtggggacaggcagagtggagtcagcagagggaggaggcatgtggggcgttcagggagccgggcacagctccagagtcctccctgggggactccaggccacgctccctccccagcagctgtggggatggtgggagctgctgtctgctggaagcctaaggccgcaggggctggttctagaaatggctctgctgggacccatgggttccaggccctaggaggacacagtttggcttgagcaggcgctgcttgcatggcactcaggcacagctagctgctgcttgttaggggatggtgggaaccctcctgacacccccaggttccagctgagggcagccctgctgtttgttttgctctgccttctgttcacatcacgtgcttgaggcagatgaagctgcataacctcgtgtttgtaaagttgacttagaagcaacagtgagttctggttgggcctggaggctcaaaagatggctgggcacggtggctcgtgtaatcccagcacttcggggggccgaggagggaggatcacttgaagattgagacgagcctggacaacacaacaacacagcaagaccctgtctctacaaaaataaaaaattagctgggcgaggtggcgtgcacctgtggtcccagctacactggggcctgaggtgggaggatcgcttgagcccaggaggttgaggctgcagtgagttgtgattgtgccactgcactctggcctggagtgagcaagaccctgcctcaatttaaaaaatgaaaaaaaaaaaaggacagtgaattcatttgtgcttctggctctcccccacggacaagcccaggagtcaggacctgggtggccatgagcccctggctgccctggtgcttgctgttctgaagccagggcctcggggcctgagccctgtgtctgggccctggtttctgtcccgtcagcatccggtgcagccctagcacacacacacctgtggtacacgtgcctgaggcctacacagccaggtccatggggcccccgcagggctgctggggtgggtgagatgtgcgtggatcctgtggcactcaatgcccacctttgcttaaggcgtgtcagcttgctgtgcttgccgctgcctgccgtggtacaggagcagtgggggtttcaccatgttggtcaggctggtctcaaactcccaacctcaggtgatctctctgcctcggcctcccaaagtgctgagattacaggcatgagccaccgcacctggcccctatttttgtttttctaccggtgattagattataggtccagtagccatgctttgtgtggcctgtttgtctcttgctgcaaaagtggccaagcgtcaggctcaccgtgcctccccgtcttcccttgttgctttggaagacccgcatcctgtgtcagcacctgctyggtgggtttagacgccttttaaaacgtttgaacgcacggaagacccgcatcctgagtcagcacctgctcggtgggtttagacggcttttaaaacgtttgaacgcacggaagacccgcatcctatgtcagcacctgctctgcgggtttagacggcttttaaaacgtttgaaygcatggtcactttcaggcgatggttcggtcgtgtgtatttgggtcattcatctctctggacctttatccaggctttcctctgatggggacagcacctctgcgatgtgcctagctgaggttgctcctagcccagcctttctggtccccgcagcctccggcctgctctgtcctgggagggaggctcccttctgctccttccctcacaagaacagcttggccattcttacacagctgctgctgccagtgaattgtgggataaacctgtcagggtccttgcagagttattgagggttttgatctctgtgttaccgattccgtggacccagtgttgggggcagttggtctgtagagagttggctgtggccacagcaggggcttctaggcactcagggcagggggccctctctgcctccagcggcgtctgctggagtcscactgctacaaccaccaggcctgggcagcgcgtggagcctggcatgacccgtgaccatcgtccaagccacccttgctctccagccctccccttccaccggtgttgccatccctctcccagcccactcctgggccgtgcctccctggagagcgcaggggaaggggcagtcagacagcggatgtctctcctgtctcacccatgcctccaycagctgcaggctgtcatttccatccrtttctgatgtaggggtcagctccacagcacrcacacagccgggaagctgcccacacgcctgtgcacacacrcgttcctcctgggatgcggcctctacagtgagagccccacggcttctccaggcctcgggctctggcttaagccctgtgacctaactgcrgagtgtttcttgtcataaccaagttctcttctttttaattccagttatgcaaagggtgacctggacatatcttacrtcacatccagaattgcaggtatgcgtgcyacatgaggctgtgggacgcgccccggcccttccctgtgtgcccagtgagtccctgttgtgtgtcagggcacaggtgcctctgctccagccttctctgtggccacrgactcacaggggtgacctggggccccttggcaggcaggcggcctgtgctcagcacctccaggcgcagcagtggacagggtcagygccagcctggcctcccatggctccctgagrtcatgccaggaacaacacaaggccgtgtccgtggaaaaccagggcctctgtgcaccaggcatcccagtcactcatcccgacacctggagacagggcaggtgtcagaaagctgtctcaggaagtcccagccaccggctgatgggcgtgtggctgggtccatgctcctaggtccacccargctgrgagtccacggagggtgagggggccggctgtgtgggcagtggctggtggagctgccggaggctgcgcttgcccgggggcgtcrggagcagcgaggccgcagcagcagcctggccacgaggtgcgcatctcccaggtgctgaygcaggtctgcttgtttcagtgatgtcattcccagcagaaggtgtggagtcagcgctcaaaaacaacatcgaagatgtgcggttgttcctggactccaagcacccagggcactatgccgtctacaacctgtccccgaggacctaccggccctccaggttccacaaccgggtgtgtggccacaggctttgtcttggtgccactctggagcttccttccgctccagtgcaggggcatagctgagggctttggccagggtggggctgtgatgggggcggccggaggtctcctgaggggctgcagagcgtgggacaggagggggcgaggtggggtctctgttgctctgaggatgccgcttgccgggaactctggaggccccagctcctcactgcttcccaccagccagagggtgctcgaggccgaggcattccttccagacacgacacttgtcagtatgcaaagggaccyaaagcccaggaacagctgactgagctctgtctgcaaggccagtggcagccctggtgctcaggtctcgcgcaggtggacgcctgttcatgacaccagctggcggaggcccccgcactgcaggcaggctgtccctcctagctgaccaaggctggggcggggctcctctgccgtccgtgccaccgtgccctgtccccacaggtctccgagtgtggctgggcagcacggcgggccccacacctgcacaccctgtrcaacatctgcaggaacatgcacgcctggctgcggcaggaccacaagaacgtctgcgtcgtgcactgcatggtgagctcgagggccgtgggctggcgccgtcttctgtcaaagttcattatttcatgcatagttcaacaggatctgagcgccagtcrtgagctggggcctgttcttcaccctgggacacggaagaaagtccctgtgcttggtgtctttgggtctggaggggacagatracagatggccccgcccttccctccccatgtggcccttcctggccttgacctgcatgcccgtgtggaggccactccgctgtgtggggagcccacctcccctcctgctcggtggccacctaagagtcacttccagtttcccgatctgcagctcgaggcttagtggtgcttgagcctccsagggtgtggcagctgccactgtgggtgatggagttgaggtttccatgaggggtcttttgcggggtacggggcaccagcagagcctgttggagtggccctagccctgttcttcgttagggaaccttcagtctctgttgggctccattsttgcctcggcaggcacgttatgtagctccctaaacatatcccagcttcagagaggaacagccctgcgtccctgcagccacagggtgggtaggatgcccgaggacccygcgagcccttgtcctgcatgagtgcgaggcgcacgcgagacgtgtctgtctgtcctaggacgggagagccgcgtctgctgtggccgtctgctccttcctgtgcttctgccgtctcttcagcaccgcggaggccgccgtgtacatgttcagcatgaagcgctgcccaccaggcatctggccatcccacaaaaggtactgcgtggccctccggggacrggggacagctctgtgggcccgtgtggcactgccgcccccgctgtggtgtctcctggagggccagtcggtgccgctgcaggcgctggtgggaaaggcaggcccggcctcgcggagccatggctgagccctgggcttacggccrcagagcccggggaggatgggccctcagccgcggtagtcctgactgctgtggggcagcacctgcccagcttgtgcatggatcctaggttctctgacaaatgccatgtatgtggtgggctctggtggataatgcacgtgaaaatgccgtgtggagcacctgacacaggtgccgtgtggagcacctgacgctgctcagacatgagtacagtcacagcgtgtttagggccctgccaaatacaggcttctgtgccgctccacctcagcgcgcagcaggctctccctggccgtgtggaggaggctgtttctcaaacgggagtgtggtcacagcgtgtttagggctctccctgtttctcggggctgcaggtgtccacgccygaggagtccaycccagcagaaagcctcccctggccttggtctccatgaggacctggtgaggctggagcagcctcctagcctctgaaagagcaggtcttgacctggaccacagaggccccaagggttagggcccaggagcaaaggccggccccgtggccccaccgtggcrggagggaagaggagggacccaagcgtcaggggactccccattctttatcccctctggatggggcgcacagcctgtggacggggcgagggtcaggaggccattcctgctgctgtggatccccarggagggccccacctcgtttgctcacagccttggggggaggagatcattgccgccccatccagctttgtcttctgtgtgacccccggcaagaggagtgcaaagttgggagcccctccacacattgagctgaaagccattggcacccccaggccaggtgcggtggggcctgttcagcagggggcgtctgagaaccagggagtctctttccctgtggcatgtggctgggcttccatgacccccaaatcccacagctccttccttggaggagcagagagatgtgcagagtgctgctcccaccgggcagctagctggaccagcttcaagttcatggccttttcacatcactggcccagaatctaaggagagtcaggtgcctgtgggaggaggtgtgtgtgtgctgtctggggtggacgtaactggaccccagaagagaaggaggccagaaagagtccaaccggtggaggccaggtgtctcagtgggcgagtgaagccttcagggttgcaggactggaagggtccttgccctctggaaggcacagtctctgtgggcacccacaggacagatgggagagtgagggccgggcaagggggcgcagctactataagggaggcccagacctggccgagaccctttcttctgcctccagatggaggagacgagagaaagagctgcactctgtgactctgggggaaactgaagtaactaattgatgtgctgaggacgctcatgcagagtgcacggtccagtggggcattcgtcagagccgtggaaagaggaccctcatgcagggtgcgtggtccagtgatccacatgtcagagctgtggagagaggaccctcatgcagggtgcacggtccagtggggcgttcgtcagagctgtggagagaggaccctcatgcagggtgcatggtccagtggtccacatgtcagagccatggaaagaggaccctcatgcagggtgcgtggtccagtggtccacatgtcagagctgtggaaagaggaccctcatgcagggtgcatggtccagtggggcattcgtcagagctgtggaaagaggaccctcaggcaggtgcgcggtccagtgggccactcttcagagccgtggaaatgccaggaaataagcaaatggaaatccccgaaatgagaacgccttcgacatcgctgaggctgagtcagtggcctttggagccaggtcgagagatactgaaactgaatcacagagagaaagcgtggggtagaacaagcacccaagagctgcctccacctcaggcaggggcacacacacgtggagcccagaaagggaagagggaagcgggagcagtgaagaaatcatggctgagaatttcccagaatgagtaacagataccagtccacaggttcaagaagctcagaggtcaccaagcaggatgaaagcaagatgaacacatgaaaacccactcgggtgcataccggtcagaactcctgcaaaccgagcacagaggaagtgttggaggtggccagaagaagatgcatcaggtacaaaaagaaagatgtcagccgcaaggttctcgtcagaaagcctagaacaaacagtaagggtttttcttcggtgctgtaattaagaagtcaacaggaagtaaaaggaaaacataaaccttgtcaagagaaggcgaaaagaagaaaaaagaaaccaagaacagatcaaacaagtaggaaacagccagcaagatggtagattttaatccagccacatcagtgttcaggctgaacatgagtggttttgtttaaaagacaggcattgccatatgggacagaaacgcacagctcggccatacactgcaggaagtcctctttcagcacggaggcagaggtgggttcagaacaggatggtgggggaagagcgtactagtcattgctacatgacccgacacaacacactcgggcttagaaccacacacatccattctctcgtggtctccctggaccttgaggcttagctgggccctctcctccgttcaaggtgttggccgcactgactctgagaaagccgatttctctttcatttctgaatctgcttccttggccactcgggctgttggcaggatttatttgttgtggctgaaggaccggctgtcctggctccctgctgactgagctgggccacagtgtcctgtggctgggaagatggggtctgcaccgtcaccatagaagtggtgtcacctgcctggcccgcacaagctccgggagagggcctcctgcagggcatgggtgccacgaggtgggaggcagactctggggggtttatgctccacagaggcaccacgggaacgccagccacgggaaagccagagctgtgctaccaaggtcagagaaaacagattccattccacatccatcaggcaaaaactgatcaaattgaaaggagaaccagacaactcatttgtagggtagacctcaatattttcgtctcagtaatccgtagaacaagtagacagaccaccagcagggatatagaagaaccgaatgtgccaacccatgaaggctgacacagctgtagagcgttctaggacgttccacccaacaatagaaaaacacacatttatttctttcaaatgcacatggaatatgcaaggagaaagatcagatttggggctataaacwcacctcaatacatttttaaaatttgaaatcagacaaactatgctgtcaggccacagtggaataaaaattgaaatcaataccagaagaatatctggaaaactctctaaatctccacctcccaggtttaagcagttctcctgccttagccctcccgagtagctgggattacaggtgcacaccaccaagtccggctgatttttgcatttttagtagagagagggtttcaccgtgttgcccaggctggtctcaaactcctgaccttgtgatccacctgccttggcctcccaaagtgctaggattacaggcgtgagccaccgcgcctggcctcaaaattaagcaacttctaaataacccatgagtaaaagtgggagtatcacgagaaatttaaaaatatcttcaactagggcgtatttttaagactctgtcttaaaaatacatatatgtatacacacacacatatatatataactaaatgaaaattataacatcagatttgttaggagcaactaaaacattgctacaagggaaatttctagcatgaaaaactyctattcgaaagacaaaatcagctgtgtggtcccctctcagggcacgtcacrtggtgacgcggcacgtctgcccccaggtacatcgagtacatgtgtgacatggtggcggaggagcccatcacaccccacagcaagcccatcctggtgagggccgtggtcatgacacccgtgccrctgttcagcaagcagaggagcggctgcaggcccttctgcgaggtctacgtgggggacgagcgtgtggccagcacctcccaggagtacgacaagatgcggtgagtgcagctgcagccccacgctrtgctccctccycctcacccctccggaaaaccgttaaagaggaaccctggccttgccggggacaggcgcttgctgaggcggacgtgtttggaactgtggcgtctgtggcaggtcacttgggatcctggtcagcagcaggaggtcacagggatccgagtgtccaggagacttgagaatgggatcctggtcagcagcaggaggtcacagggatccgagtgcccaggagactttagaattcttgtgaggctcttcatgggggttattctttattggttattacacattttagctaagtggacaatttctcattctgttttttgttgtttttgtttggttggttttgggggtttttwaaatttttctcttgtcattctgtccttagggactttaagattgaagatggcaaagcggtgattcccctgggcgtcacggtgcarggagacgtgctcatcgtcatctatcacgcccggtccactctgggcggccggctgcaggccaaggtgagagagcctgtggcttgcccggtgctccccactcacgcctaggctcatggggggctgggggccacagtgcgctcacttctcaccgagggtccagggtgctcgctgtttggtgagtgccgtgggctctcatgtggcgactgccccacagcgccccctgcttgccccgtgcacttgacgcggcaggatctcaacctgaaaagcctggcgtttccatcgagactgagtttgagggtccacttggggcagcccccacggcagtcccgtgaagcagcttgtgggcccatgcgttctcctcagggttacctgccacacacagaccctctcccgcttcccccacaacatgtggcacgggggcgccgtccatgcctccagcaccatgagccgctctcagatctcgcccattgggaaaaattggcctgtggccccaggatctggattcaccctccacgtggggtgtcgtgtttgctctctttgcagatggcatccatgaagatgttccagattcagttccacacggggtttgtgcctcggaacgccaccactgtgaaatttgccaagtacgttggtaccgcttgtgctcggtggggagggacaggtgccctgtgccgcagcacctgcatgtgggccggtcgtgggagccccagggggagtggcgggctgtgtgactgctgcttggtggctctgggcctgttcctgggccatcctggagctgcgcgtgtgtaggctgctggggtggacccggtggctgctgctctgyccccccgttggtgtgtgtgtctgttagaatttagccctcacacccgggcgtggcgtaagcaggtgagcgggtggcggctgcatcttagcaaacgttcctgagcctgctgtgtgcagagtgccctgccaggcggaggctggagatgatgcggggcagtcctgtctggaagctcacactctgttgttagctccctctgtaaacaagcgcagccacgggatggcccccacccctgccatgcccagcacctgttagctctctgtcctcttgacgttggtgcccaacagcgcataccctgccctctgcaggctcaggtgcagatgcggtgagcagcagagcaggctctcacacccgggcgtcctgattctaactggaggtctgtctttttttttgagacagagtctcgctctaacgcccaggccggagtgcaatggcgcaatctcggctcactgcaactccacccaccaggctcaagcgattctctcgcctcagcctcctgagtagctgggattacagatctgcaccaccacgcatggctaagttttgtatttttagtagagatgggtttcactatgttggccaggctggtcttgaattcctgacctcaagtgatccacctgcctcggcctcccatttaactggagatctttctactcaatcacaggcaggcttatctgccaagacacagtggaacaaacattgttccaggagtcagagggggcacccacgggggctcccaagacagaggctgtggctgcaggkcctgctgtgttccaggctctgtgctcttggttcctacccagtaaacaaagggaagccttgggccagccccacggggatgctggcggactctgcaccttgggaggggtgctggcctggcctgggtgagctcaggaagagctggcgcctgctgctgtcagggacggcctgcaccgggagaccggggygtctycttgtgtttttctgtctctgtgattctttttttacatctcttgtctttgttgtgtcttacgcttttctttttttaactcacatattcgcaactttaataattttgtttcttttttcctcctttggaggaagaaaaacacccagtgctcttagagttttcagccacggtggaggcggtgcttaaaatagtgttttaaagaccaaggtactgatgatgaagaggaaaatgtcggtgaaggacctgtcggggacttaaatgctggaggcaggaggcagggactttggtaactgattgattattcaagaaagtcgggggaatgatgggaatttcaccagagatctggaacataaaaaggagacagatgtgaattctagaactgaaaaatattacagccgaaatgaaggcttcagtacatgattaacagtggaataggcacagcagaacagactctgaattggtagaaaagatcttctgacagcagcgcagagaagaaaggatggaagaagacacgtacagagagggtcacgagagagactgtggcactgcaggggcctggcatgcttttacttgaagttctaggagaagagagagagtggaacagaaataatacttgaaaaatcattggccaaaaattttcctaaactgatggaggacgtcagaaccacgaaatcaagctctgcagacgccaaagaggatactttttttttttttaacaaaaagaagaaaagaggttcagtacctcagagcatcctggttgaattgctggaacccgaagagaacaatctccagcccgaggacaggacggggtgggaatgcatgacctgcagagtgacacccgaaggcagctgaggcgcgccgtctctaaagtgctgagagaaaaatacgggaattctatatccagtgaaattatccttgaaatatgaaagccagttaaggatgtcttcagccaagcaaaggatgagagagttgattgttggcagaactgctccatttcagcaagtatccaaggcaagcctgcaaagcctgcagcctagggaaggaagggcagggaggctggaatgcatgactctgtggtgaaatgacaccagcaccagctgcttaaaacaccaatactaacgtcctgtgggttttaaaacctgtttggtagtaacatatctgacagcaggagcaccagcgcgtgcgcacacacagacagcaggagcaccaacacacgtgtgcatgtacacacacacaagcaccagcgcgmacacacacacacagccgaggaggggattaaccgagtgaatgtgtttcaggagctccrtcaccaggaagcagagaatgtaccaatccctagggcagattaaagatgcaatcaagaagaaaaatggaacaaaaaatatgtgatgaattcgccagaacaacgtagagataaacaaacaaacccaggtgggatatagatagaaaacagccagctggtagaccgacgccctgctgtgcctgtcagtcatcccattgaaggtggatagaagacacactccagttaatcgggctggattaaaaaccaagctcacacaaaactcaagtctatactgcttacaggagccatacttcaaaacccttgcacacgaagacctagcaaggctgaagtggaataattggaaattgcttaccatgcagaccataacaggaagaaggctggtgtcactgtccatatcaggtgggatagaccaaggcaggaggtgacgggtgacgttgcaggggcgagggcagtgacatggcttcagtacaggcagcacaaagggcagaaggaggggtgaagttgacaggcccacgctgatggccgcctctctccccaggcagtggaacaggtagacaagaacaggatatagtttttttttttttacaaggtttaaccaacttgacctgagttttgcaaacttcagcgaatacttggagaaatggcatctgttcaagtgggcgtttattaaagtggactccacgttgggtcatacagcaagtctcaaggcatctcaacagtggattaaagtgggaatcagtgacaggaaaacacccagagaccgtatgctcgttaagtgacctgtgtgccaaaaaggaaatcactgttgaaatgagaaaatattttaaacacattgataatcaaaataccacttaccagatgtgtggggtgcatctgaagcagggtttagaggaaatgtgtaacttcaaatgcatacattaaaaggaagaaaggttggttgcgcacagtggcttacagctgtaattccaacactttgggaggcaggaggattgcttgaacctgcgagatcaaggctgcgctgtgggcgagaggcgtgttccctgcgtggtgagcctgcgccgtgcctgggcgagaggcgtgttccctgcgtggtgagcctgcgccgtgcctgggcgagaggcgtgttccctgcgtggtgagcctgcgccgtgcctgggcgagaggagcacagggttgcagccatggcacagatgtaacagctgagcctgtcaggagtccgctctgccctgttggagctagtctggcaggagcctgcgggcagtgtcctctgcagtccagggctctcgggagtggccagccctgctcacagacctcattgtgccctcagcgccaggctgggtgagccgagcctgcaggcccagtgcccagggccatctcaaggggcagctgggggagggaggctgggcatgagcggcactccctctggggctgcccaagttcggtctgtcccaggacccaagcccgtctggccgacctggctccctgcacactccctccctccgtgcccctcccactgtgcctctccgccctcggtygtggccggtctgagcctccgctgcggtggccgtcggattctctgctggtgcctgcaggctcctctgcagacgttgcctcctccacatctccacgccagctgtgccaccgctgtgcagtccctgccacccctgacgacagacagcggcacgcaaagaggctcgggygcagggggaagctcgtgttggccccggctggagtgcacatcagtcccggcttcggccgtggccacctccgcccagagccttgagtgggcattgagggggcgctgctctgcgtgaggttggccacccctcagggcgggcacagggtgctctcccctcgtgcagggagaggatgttttagagggtgagcaggaaggggtgaactagaggcctttcacacatcacaggcatgtgtggagctcagagaagtgacagttaaaaccagccgtggctctgacccacacaggccgccgggcccgtctccctgccctccctcggcggatcccactctgctctgggtgttcctggccctgcagacactggcagcctgggtttcccaggaactggccgccactcttttgtgtttcttctttattttcttaggtgtataacattcaacatgtagagattttaggtggcgtaaaataagacaggcatggggagcctgctgcccgctggagagcccaggcttatcagtgcagtttatgacagtgggatcagagatgatcataggaaatgtgtgaaatagcctggaattccttagagagctgtggggctgggaaatggtcagtgtcaggtcacacctgcctccccgtgcggccaacaccccaaggcgggccctgctgacccctgcccctgctccccacccacatggccgacaccccaaggtgggccctgctgacccctgccctgctccccacccgcacggccgacaccccaaggcaggccctgctgacctctgccctgctccccacagctcagcctgggctgcctccccagccccacagtgaacacagctttgtttcccccggaatcatgttcccaattccctggcagccggattctagaggtcttggttttatgggcatctgttgacagttgtggatttttgtcagggcggacgtygtcatttttatggaaaacacatttagtatcccagagtgcgtgctctgagctgccgggtggctgcagtctgtgtgtgctgggtagtgagggccagcgcctgccttggaaccctggggtcccacctcagagctgcctgcctgggtgccggagtctccagctgtgggatgttgtcccgtctgctctgagcaygtggcctcccctggagttgcaggaaacatggcggccccgcccggtgcccctctgccttgaacacagtcgcgggcatccccactgtgacgtccgaggagcgagtgaaatgatgctcttctggggccgtgaccgggggtgctggtgccctgtgggttcctgggacagctgctgggtcagctcacagggctccagcttccgcaggcgggggtggccggctgccctggttgttctcgccccgctgcctgcagctgccacctgtttccatgcacgtttctttagtgaatgtccaaggacttacagactacttgggtggccttcctaagtggtgtctacttgtaaccgcaggtatgacctggacgcgtgtgacattcaagaaaaatacccggatttatttcaagtgaacctggaagtggaggtggagcccagggacaggccgagcccgggaagccccaccatgggagaactcgagcatgagggggctgaaccccaaaatcctgttttccagccgggaggagcagcaagacattctgtctaagtttggtaagatcccgcaggtgaattaggtgaaccctgttctggtgagtgtctctgtggagagagacacctttggctgagctctggcagggctgggccccacgcctgctgctgcacccaggccctgagcagcttgggctgcaggaggttttggaaactccgtcgtggatgttggacaccaccaccagctacaccagagaaggactcgcaggctgcaatttctgaggcccatgggcagggacggaggcagagggaggaaaacccaggctcctggagcgaagcggggttttgtcccaggcgtgtgtctgggtcagatttttgtcatgtgtgctggacacacgtccactctcactgtgagcctcaggcctgctggcagcaygtggaacagaaccctcgctcctgtcgctcttcacttccgagcagtttcraaacggcagcccaggaagtgctggcaggtgggcccagggccgtccactgctcatgccacgcttgttctcggctcttggtttgcagtgtttgctttttctttctgagcatcttcagcgtccctgaaagaggctgtatgtgtgacctgtgcgtgctgtgtatgtgtccgtgggtggtgtgtgccgtgtgtgtgtgtgcacgagtggtgtgtgcattcatgtgtactgtgtatctgtgtgctgtgtgcattcgtgtgtacagtgcatctgtgtgtgctgtgtgtgcgttcgtgtgtaccatgcatcggtatgtgctgtgtgtgcgttcgtgtgtaccgtccatttgtgtgtgtgcatgcatgtgtactgtgcatccgagtgtgtgcatgtgtgtgtaccgtgcatctgtgtgcgtgcattcatgtgtaccctgcatctatgtgtgctgtgtgcattcatgtgtactgtgcctgtgtgtgtgcatttgtgtgtaccatgcatctctgctgtgtgtgcattcgtgtgtactgtgcatctgtgtgtactgtgtgcattcatgtgtactgtgcatctgtgtgtgctgtgtgtgcattcrtgtgtaccctgcatgtgtgtrtgtgctgtgtgtgcattcgtgtgtactgtgcatctgtgtgtgtgcattcatgtgtaccctgcatgtgtgtatgtgctgtgtgtgcattcgtgtgtactgtgcatctgtgtgtgtgcattcatgtgtaccctgcatgtgtgtatgtgctgtgtgtgcattcgtgtgtactgtgcatctgtgtgtgtgcattcctgtgtaccatgcatctgtgtgtgctgtgtgtgcattcctgtgtactgtgcatttgtgctgtgtgtgcattcatgtgtaccgtgcatctgtgtgtgctttgcattcgtgtgtaccctgcatgtgtgtatgtgctgtgtgtgcattcgtgtgtactgtgcatctgtgtgctgtgtgtgcattcatgtgtactgtgcatctgtgtgtgtgctgtgtgtgcattcatgtgtaccctgcatctgtgtgtgtgctgtctgtgcatccgtgtgtaccatgcatctgtgtgtgcattcatgtgtactgtgcatctgtgtgtgctgtgtgtattcatgtgtaccctgcatctatgtgtgtgctgtctgtgcattcgtgtatactgtgcatctgtgtgtgctgtgtgtgcattcgtgtgtaccctgcatctgtgtgtgtgcatttgtgtgtactgtgcgcctgtgtgtgtgctctatgcattcgtgtgtaccgtgcagctgtgtgtgtgcattcatgtgtaccctgcatatgtgtggcgtttgatgcctcagtggtgggttccttgtgcgtgttcatgtgtgcgtgtgctgtgcccaagtgtgcacgcatggcccagagtggcatccgagtggatagcaggaatctgttcagagagcccctccccgtcatgtcattggtctgctttaccgatggcctggcctgccacggtgctggcgcccgcctggctgcacttcccagctctggggtcagtgttgccccgaggctgctggccagtgccrgtgccctgacgccctccctctcctgcagggaagccggagcttccccggcagcctggctccacggctcagtatgatgctggggcagggtccccggaagccgaacccacagactctgrctcaccgccaagcagcagcgcggacgccagtcgcttcctgcacacgctggactggcagggtaggcagcgtccctggacctggccacttgcagagggcaggcccctggtctggaggtgcccctggggcagggcaagcgtcttgggagacgggcctccggcagagctgagttgcacctcagtggggctgtgcacccggcatgtcagcctgttctttaatggctcacgagctragaatgatttcatatctttttaaaggtgaaaaaaaaagaacatgcccacaaagtctgaaataacaaccctcgctcttcatcccagtctgtgggcctggggaggctggcagcatgggccatgctggcggggcccctgggtacaggggaagggcctgggyggagggacagactgtcaccacctggggatcccacacctctctttgcccacacccccagtgggctcccagcccctctgaggcttttcaggaaaacacctgggcgccatcactggacctcaccccagacacaccccaagggatgcacctgccacttcctgtcccagcacccctggccttcccatcgggctcgtcccttctgccgcctgttcccagagcacccttgattggtgttcctaccccctagtgctgccatgtggcccccacttgactcagcctgaggcaccgcagaggcccaggcggagagagccacaggcagacccttgaggcagaggctggaggtgggtgygctggagacgcctcaggaacaacrccccaccgcccgcccagaagcttctgcagcactcgccagggccctgggccaaggaggcgctgaggggccgtgccatggggacattggtgctggccatgtgggttcgccaaggccctgggctgaggggacrcgccgtggggaccctggtgttcctgcagcacttgccaaggccctgggccgaggaggtgycgaggggccatgccatggggaccctggtgctggccacgtgtgttcaccaaggccctgggccgaggaggccctgaagggacgcgccgtggggaccctggtgctggccacgtgtgttcaccaaggccctgggccgaggaggccctgaarggacgcgcygtggggaccctggtgctggccgtgtggtctcactagcctgtggttttgtttccttttcgcagaagagaaggaggcagagactggtgcagaaaatgcctcttccaaggagagcgagtctgccctgatggaggacagagacgagagtgaggtgtcagatgaagggggatccccgatctccagcgagggccaggaacccagggccgacccagagccccccggcctggcagcagggctggtgcagcaggacttggtttttgaggtggagacaccggctgtgctgccagmgcctgtgccacaggaagacggggtcgacctcctgggcctgcactccgaggtgggcgcagggccagctgtacccccgcaggcctgcaaggccccctccagcaacaccgacctgctcagctgcctccttgggccccctgaggccgcctcccaggggcccccggaggatctgctcagcgaggacccgctgctcctggcaagcccggcccctcccctgagcgtgcagagcaccccaagaggagggccccctgccgctggtacgtgtttctgttctgaaggcgagtggcttcacagtagatgagtgatgaggctgagtcattctcactgcatgggcgtgtttcgaaggtgcttgcaggaagggaacgtgcccttcccccacctcccccaggagcagcctcggggtcatgtcagggttctgtgctgcccacctgagctcacgggccgggagctactggcttctccatctcagcagtgttgctgtgtccctgggaaagtcatcctgaggcgtggggcacggggagcccctgggctgactgcctcagtgcccctgcgagggcagccgtggggtctgggctgcccagctggrgtggcctcttgggcaggcctgactccagagctgggctcctttgtcttcaggcagccgggctgagtyctccccatgcccgcctgtccccacagctgacccctttggcccgcttctgccgtcttcaggcaacaactcccagccctgctccaatcctgatctcttcggcgaatttctcaattcggactctgtgaccgtcccaccatccttcccgtctgcccacagygctccgcccccatcctgcagcgccgacttcctgcacctgggtaagygcctctcgcctggcagccagctctccatggccgcctccctcaggaccgcagcctctggtgggaaacagagctgtgggtctcaggcagtggtggggctggactgtgtggcctccgggtgcgctccttgcggcccaagcatcctgcaggacgtcccagaggtcaggacagactgctccctgctctgtctccccaaaccatccccaaacctggaacaggttgtggggccctgcagtgcctcagtcgtctgtgactggcaacaggtgtttctccaggcctcctcaggcccaggccttgcagctgttagcagagaaggccacctgcacccagagcttgtgtagggaccagaggtcagagggaggcagctgggggacccagggtccgggaagctgacctggtctgggtgtagcaggggccgtggggcaccgtatccatggggaggaggtcaggcgccggggcacagcatggcttgtttagacagacgccggtggggccaggccctgggagagggctgcgcgcccctccagtgtggtcctaggggaaggagcctgggttctctctcctgaggaggcagcagcgtggtccacggcgyactctgggktgatgatggtgaccattgcaggatggcttgtgggcgggtgtgtggagtgcagccttgcagcgttggggcgggtgccgccagaggtgtgctgcgtggccagagccagggcagacaggacctgctgggccctctgtctgccgaaggcagctcagccaggtggagccacctcgggctctggtgggttttaggagaggcgggaacgcaggctgtggggatggcggcagaaagtggggtcctgacaaaccctttyggatrggaatgcgcagatgcttgttctcagcctggcctgcgagctgctccgcctgctggtgcccctacgtccactcgctcagttctgtgtgatgggatgcatcctcaggacccttcaggaagagagaggccgtcagcccagcctcagctcagcctgggtgcaagaggtgtccgctcctagggccctgagcacagcctggcgccccgccacatttgcctgctgctgagacaccaaactgtgctctcttctggttccttcttcccaggggatctgccaggagagcccagcaagatgacagcctcgtccagcaacccagacctgctgggaggatgggctgcctggaccgagactgcagcrtcggcagtggcccccacgccagccacagaaggtatggccaccacccaccaaggacagggctcccagacgtgcagytgctgtggcccgtctctatttcacacgtacctgtaacagggccctctctgcgcagagaaggaaggaagggctggggcgtgcttggtggtgcgggctccgcacacaaggctgtggtatgactgcagcggcctcactcacccggtgtgcctggggtacgtggggacacagacttggygtcccagagctgcagtggctcctgagcatcagcagcacccccgaagggtcctcctcccacccggcagggcgtctgcgtctgtgatgcgatttcatgccccacactctgtggaccacgtgctggctctgcctgtagcaccccgtggctcttccctcctgaaggggtttgtgactgaggccgaccccatgggtcttgtctcggtgttgcggccgatgccscatgccctgtcaggaagggggtcatgtacagcagtcgtgtttgcgacgccccgtgccctgtcaggaagggggtcacgtacagcagtcgtgtctgtgagcgtctgtccttcccgtcaccctggagccggccctcccgcggcrtctggtagcgcggatgcgtatgctgcagctgcgtcttgggccggcctcagcgatgtcgcgggtttgcttccagaccacagtcaaagcgaacacccctagaaagccagtcagattttgttttcccagtaagcataagagttaagggggttttttgtgtggggttttgtttttgtttttgtttttgagacagggtcttgctctgtcacccaggctggagcatagtggcgcaatctctactcacttcagcattgacctcctgggctcaagcgatcctcccaccccagcctcctgagtaactgggactacaggcatgtgccaccatgcccagctaagttttaaaatttttttgtggagacaaagttttgccatgttgctcaggctggtctagaactcccgggcttaggcgatgcatgcacctcagcctctcagggtgctgggattacaggcgtgagccactgcacccagctaaaagttatatttacattatactgtagtctggttttttgtttgtttctttgggagatggagtcttgttctgttgcacaggctgtggagcgcagtggtgcaatctcggctcactgcatcctccacgtcctgggttcaagtgattctcctgcctcagcctcctgagtagctgggattacaggtgcctgccaccacgcccaactaatttttgtatttttagtagagatgaggtttcactatgttggtcgggctggtctcgaactcctgaccttgtgatccacccgcctcggcctcccaaagtgctgggattacaggcgtgagccaccacggcctggccatagtctgttaagcgtgcaatagcattatgtctaaaaaataaatatagttaccttgatttagaaatacttcattgctaaaaaatgctaacgatcctgatcttgctggtgggggtcttgcctcaatgtggatggctgctgactgatcagggtgctgattcctgaaggctggggtggctgtggccatttctgaaaataagacgatgaagtttgccacgtgattgtctctccctttcacaaaaggttccctatggcacgcagtgctcttggatagcgtttacccacatggagcttcttccgtcctcccaaacctgccactgctgtgtcaactaagtttaaggaatattctaaacccttggcctcatttcagtgttcacagcatcttcaccaggactcgattccatctcagtaaactactttctttgctcatccgtaagaagcaactcctcatccattcaggtttcatcctgagattgcagtaattcggtcccatctgcaggctccacttctaattcgagttctcttgctgtttccaccacatctgcagagacttcctgcactgaagtcttcaactcctcaaagtcatccttgagggttgagatcagcttctcccaaactcttgttcatgttgctgttttaacctcttcctgtgaatcgtgaatgttcttaatggcatctagaatggtgaatcctttccagaaggttgtcagtgaactttacccagatccatcagaggaatctggcygctatagccttagaaatgtgtttcttaaatagggagacttggaagtcgacacgactccttgatccaagggctgcagaacagatgttgtgttagcaggcatgaaagcagcgtgactgtctgcgtacgtctctgtcagagcttttgggtgaccagctgcattgtccgtattgtcagcgaacagtcatattttgaaaggaatcttttttctgagctgtagatctcaacagtggacttaaaatattccataaaccatgctgtacacagatggctgccatccaggctttgctgtgccatttctatggcacaagccgagtcaatttagaatccttttttttttttttgagacagagtctctctttgtcgcccaggctggagtgcagtggtgtgatcttggctcactgcaagctccgcctcccgggttgacaccattctcctgcctcagcctcccaagtagctgggactacaggcgcctgccaccacgcccggctaattttttgaaacccctagagacggggtttcactgtgttagccaggatggtctcgatctcctgacctcgtgatccgcccgcctcagcctcccaaagtgctgggattacaggcgtgagatcatcagtgatctcagccggatcttagcagatgacttaggccgtcttatatctgcatggagagtctggcgggtgcagccgcttcatcagtggtctcagccggatcttagcggatgacttaggccgtcttatatctgcatggagagtctggcgggtgcagccccttcatcagtgatctcagccggatcttagcggatgacttaggccgtctcatatctgcatggagagtctggcgggtgcagccccttcgtcagtggtctcagctggatcttagcggatgacttaggccgtctcgtctgcatggagagtctggcgggtgcagcctcttcatcagtggtctcagctgcatcttagcagatgacttactgcagcttccccgtcagcgcttgctgcttcaccttgcacttgtacgttgcagagacggcatctttccttcagcctcagcccctgctggcttcacttttcttctgcagcgtcttcacctctttccaccttcatagaattgaaagagttgagaccttgctatggattaggctttggcttaggaggatgttgtggctagtttgaccttctctccagatcacccgaacttcctctgtatgggcagtggggctggtccgaccttctctccagatcacccgaacttcctctgtatcagcaatagggctggtttgtgttcgtatcattcgtgtgttcactggagtggcattctcatttccttcaggaacttttcctttgcattcacaatttggcttgctggtgcaagaggcctagcttgtagcttatctcagctttcttttttttagagacagggtcttgctcttgttgtggctggagtgcagtggcacgatcatggctcactgcagcctcaacctcctgagctcaagggatcctcccacytcagcctcctgggtagctgggactacaggcactcatcaccatgcccatctaattttttaaatttattttttgtagagatggggtccgtgttgtccaggccgaccttgaactcctgggctcaagcaccctccttcctcagctgcccactgtgctgggaacacaggcatgagctgctgcacccggccttcctctgcttttgacgtgccttgctcactaagctcagttgttcctagcttttgatttcaagtgagacacttgcaactcttgtgttcacctgaacgcttataggccgttgtaggttctgaattggactgatttcagtaaagttgtgtctcggggaatagggaggcttgagaaggagcgagacggggagtggctggtctgtggagcagccacagcgtgttgtcagttaagctcgccgtcttctatgggcacagtccatggcaccccaaaacaattagagcagcagcatcaactcatgggacacacatcaccaaagcagatgcaatcatgaagaagtttgaaatatcattacagttcccaaaatggggcacagggacacagagtgcrcatggcgtgcggaaaatggtgccggacagagttgacacagccctcagcaggtggaacacacactgtctgcagagctccgggaggcacagtgcacgatgtgccagggcctgggtgcccgtcccctcgagtgcacagtgcgaggtgcgccagggcctgggtgcccgtcccctcgagtgcacagtgcgaggtgcgccagggcctgggtgcccttctccccgtgtgcacagtgcgaggtgcgccagggcctgggtgcccgtcccctcaagtgcgcttcaggacgtctttgcccaggggcaactgccrtctccggtttgtctcctggttggatgatcactgtgaaggtgtctcgccagtttgatttctttcttatgaatgaggttgactcttagtttgagtggttttggttacgtgtatttcttttgagaatcatttcatgttctttgcttattttttggcctcaggaattcatctttttcctcaaatagatccacgagggctctttatacatgaagagcctggttttaatgactgcatggcactctatcaagtagctctaccacggttttttttttttttgagacagagtgtcattctgtcactggggctgagtgcagtggcatcattttggctcactgcagccrtcaacccctgggctggagcgatcctcccaccgcagcccccctgggtagctggggccgtcaacccctgggctggagcgatcctcccaccgcagcccccctgggtagctgggaccacatgcatgaaccaccgtgcctggatgatttttttattttttgtagagacagggtatttctatgttgcccagcctgtattttatgattttatacttaggatattctcaaatttatgctattataaagagtatcctgaagagcattcacattttagatagattccagaaagtggtactgcagaatcataatcataatgatatgagcatggtttggttctgggtgtgagctgtgaagctgttttccctgaggagcagcatggggcatggaggcagcgtccgccacacacacctctgtcctggctggtctcgtgcacgcaagccatgcaggtgccagctctcaggcaggagtgaggctgtcatgtcgtaaggaggcgccatcggaggtcccaggaggatgtgtttcgcttcagatggtgcttgttctaatgccctgtgccccttctccaggccccctcttctctcctggaggtcagccggccccttgtggctctcaggccagctggaccaagtctcagaacccggacccatttgctgaccttggcgacctcagctccggcctccaaggtaacgtggagggcactttgggggtgtggaagctgtttccttgtaggaggtttattctcgtctatctgactctgagctgcccaaagtgaagtctttgcctctgttcactaagacccccaagcccagagcacagtgagcccaaggggacagcgtgtctgcacctgttccaggcgactgccaactggcaagctaaaaccgggagttgctgacactggcactgctgccagcccccaccggcattgtggtgcgtgatccatcctgtcctcagggccatgggggccatcggggaggcggggtctctgcatggaagtggggtgtagctgggctctgctcagtccccgaggctgtgctcggagcgtgctagctgtcggccacaagaaccgagcccaccctctccagtcctgcgtctgcctcaggcccggcccgggcgctgtggtctgagtctccggtcccacgtctgcctcaggcccggccccgggcgctgtggcttcaagtctccttgggctgacctgatgcccctgggtctctgggttcactcccaagatgcatccccctggggtccctgtggcttctcagaagaagcgtcggcggcggggggatgatcatctgaaggggcctcccttgcacttgcctggccgtcgggtggaatgctgggtgggaagtggctccaccttgggatgcttgttggtgccggtgacccccggacgctccagcatgcagccccaggctatggcmtctgctcctgctcagctccggragcatttcccgtctcctcatcgtttctcctgtccttccctgagtgcctcaaattcctgtgagcaggtgtcggcgttggatctctagggctggcttcgagtcctcactctctcccgggctggctttgagtcctcactctgctcttgcgagctcrcatctgaagtgccttctgttctgtcatgaagtcccaagagttttttcgtctttgaatgttctttttatgtttcaggtggttttggggatttactatgtcttgaggacatccatgagcgtttctgtcggtgtggttttgtattttatttccctttgtggcctctgtcttgtrttgtctgagagcacggtggggttgcgagggccgtgccctcgggaggagacctgcgtgtgccttgactgccctgggcagccggcactggggcagaaggagtggactcccagggatccccgccgtttgtgtcccagacacagccccagccctccgcctgctggctcggtgggcggcctgaaaccatcctgccttctaggaagacagcaattctggaagagcaaagccgatacaactgaaggaaaaaatagacaaacccaaatcatagctggcgacgtcagcactgctgtcccgacacatgayggagcagctgtactgaaggctgcaaggatgtagaagggcagaggcgccagccagcagggcccaccagctgcaggcacggacctttccatgcaccgtgggagcctcctccacacaggccctgtcctcagagaactaggattctgcagcatgccgtctgaccacaatgaaatagaacggaagaatcttcacacttgggaacaaaacagcacactttcaaacgacacctgggccagagaggaggtctcaagggagacgatgcgtggagctgagtgaagatgcaagtgcagcctaggaaagcccagggccccatcaggcagtgtggagacacccgcagccgtgggggcttgctgtggaaaagctggaatgccccagcagtaacctgagctctctgcacaagacatttggggggaaaaaaagggagcgaaataagcctacagcaagcggaaggaaagaaagaatgaggagccacgggcagtgcagtggaacacagggacagaggccagttctgaagcccacagacctctcccggggctgctgggaagagtgacccaggtcatcgatatgggggatggtgcaggaggcaccactgcagaccccgcaggctctacgagggtcacgggtgcaggcgcctctgtgcagtatgcttgacgacttaygtgaaattgataaattcctcaaaaccagttcctgccacaacttacccaatatcaagtagatcctttgaaaaattctataaatacaaagaaaataaattcataattaaaaacttcccaaaaaggaaacctgcggacccacctgggccactggagaatttcaccgaatgttgaaagagaatgccaattccaccctctcacaggaagcaggagagacggagcactttctaattgattttacgaagctcatactatcaccctgataccaaaatcagacagaaacagcaccggaaagggaaactgggactatattccccatgaatatacacacagatcctcaaccaaacttcagcaaataggatttatcggtatataaagagaattctacaccaagatcaagtaagatttattccaggaatccaaggctgacatttcagaattgttaacaaaatctatttaggttgctgcgaaagtaattgtggttttgccattgaaagtaatcacaaaaaccgtaattacttttgcactaatctgatatcatattaactggctgaagagycatgtggtcacatcaacaaggcagaaaaggcatttaacaaaattcagaaagtcagcaccttttatggcagcactgtcagccagtcatgagcagaacgtcrtcagcttggtaacaagcatgtctagagacccacagccaggccaggcggagtggctcacaccgtaaccccagtgctctgggaggccaacgtgggaggatttcctgaacccaggagtttgaaaccagcttgagcaatatagtgagacccctgtaagaattagccagctgtggtggtgagcagctgtggtgagcagctgtggtggtgagcaartgtgggcagctgtggtgagcaggtgtgagcagctgtggtgagctatggtgagcaggtgtgagcagctgtggtgagcaggtgtgagcacctgtggtgagcagctgtgagcacctgtggtggtgagcagctgtggtgagcagctgtggtggtgagcaggtgtgagcagctgtggtggtgagcaggtgtgagcagctgtggtggtgagtaggtgtgagcagctgtggtggtgagcagctgtggtgagcagctgtagtgagcagctgtggtgagcaggtgtgagcagctgtggtgagcagctgtggtggtgagcaggtgtgagcagctgtggtgagcagctgtggtgagcaggtgtgagcaggtgtgagcagctgtggtgagcaggtgtgagcagctgtggtgagcaggggtgagcagctgtggtgaggtgtgagcagttgtgagcagctgtggtgagcaggtgtgagcagctgtggtggtgagcagctgtggtgagcaggtgtgagcagctgtggtgagcaggtgtgagcagctgtggtggtgagcaggtgtggtgagcagctgtggtgagcaggtgtggtcccagctactcagcaagctgaggtgggaagatcacttggatygcttgagcccaggaggtcaaggctggcctgagctattattgcatcactgcactccagtctgggcagcagagcaagaccctgtctccagaaacctgcagccaacatcttttttttgtttgtttgttttgagacaagagtcttgctctgttgccctggctggagtgcagtggcataatcttggctcactgcaacctccacctcccagtttcaagcaattctyccgcctcagcctcctgagtagctgggattacaggcatgcaccaccatgcccagctaatttttgtatttttagtagagacakggtttcaccatgttggccaggctggtctcaaactcctgatctcaagtgacctcccaaagtgctgggattacaggtatgagccaccctgcctggccaagccaatatcatttttaaccatcctcctaaaatcaggaacagggcaggagtgtcttttctccacttgtacttgtcggaagtcccagctgctgccatttggcaagaaaaggagatcaaagttacacgcactacaaagggagaaataaaattactcctgtctgcagatgacacgattgtctgcgcagggactctgaagcaatctacaaagatcttttagaactatgagttcagtaaggtcgcaggataccaggtcaacacacaaaaatctgtcctatttctgtttacttgcaattatataaggaagccaacatttaaaacagtaccatttacaatcaccttttttttttttagaaaaaataaacatttaggtataaatctgaccagacatgtctagggcttgtgtggtgggactacaaaaccaaccgtggcgaaagagaccagaggagatgcgagtgaagggacggacgctgcactcacggcctggaggctcccgagtaaggtggccgttctcctgtgtgcatctgtagcctaacgcagttcctaccaacgcctcagcagggattttcctagatacaaatgagcttactgtacagtgtatttgaaagacagatggactagatgcctggaatagtttatttttttgagatggagcctcgctctgtcgcccaggctggagtgcagtggcctgatctcggctcactgcaagttcccttaccgggttcacgccattctcctgcctcagcctcctgagtagctgggactacaggcacccgccaccacgcccagctaattttttgtatttttagtagagatggggtttcaccgtgttagtcaggatggtcttgatctcctgacctcgtgatccgcccgcctcggcctcccaaagtgctgggattacaggcgtgagccaccgcacccagccatgcctggaatatttttgtaatggaaaaatgaaatgggagaagtcactgttcctggctttgaggcttactctgaagccacaaatcaacattgcggcgatggcagacagacgcgtctgtggagagaagagaggactcaggccacacaagagagaccagcggagctttgacagaggcagaaaacccgttcatcagatggtctggagcacctgggcagcggtaggcaaagccctaagccctcgttctacagaacagctcatcagaatgcagggcmtttaggtgaaaacctttgtggcctggggctgggcagagttcgtagactcgccacccaaaccacacccataagaggacaggtggacccaacttcagagctctgagcatctgagctgcggactgggagaagatatttccaaaccacctatttgacaaaggactcatctacagaatataaaaatacagtcaaaaacaaactgaaagcaatccagttagaaaatgggcgagagcgcagggtcctctgcctacgaaaaccagagacctttgttcacttgtttatctgctgaccttccctccactattgtcctgtgaccctgccaaatccccctctgcgagaaacacccaagaatgatcaattaaaaaaaaaaaaaaaagaaagaaaatgggcgagagacggccgggcatggtggctcatgcctgtaatcccagcactttgggaggctgaggcaggcggatcacctgaggtcgggagttcgcgaccagcctgaccaacatggagaaaccctgtctctactaaaaatacaaaaattagctggacgtggtggcacaggcctgtaatcccagctactcgggaggttgaggcaggagaatcgctggaacccgggaggcggaggttgcgtcagccgagatcttgccactgcactccagcctgggcgacagagcaagactctgtctcaaaaaaaaaaaaagaaaatgggcaagagacatgaagagacctccagcacattgacatccgatggccaggaagcacaggctgagacacccagcatcaccgaatgctggcgcggaggaggccggagcgcggaggaggcccgaacacggaggaggctggagcgtgtgtctcacgcattgcccggggggcgagccgcgtgcctcatgccttgccggggggacttgccgggggacgagccgcgtgcctcacgccttgccggggggacgagccgcgtgtctcgcgcattgccccgggggcgagctgtgtctcatgcattgccagggttgagccgtgtctctcaggcattcccagggagtgacaagtggcagggccgctctggagaacaggtggtcggtttcctacgaagctaaacacacagctactgagctaccgtgggacatttatcccagagaaacggaaactctcattcacacacaagtccgtaacaggcgttcagagacgtgtctgttgtagccaaacagtggcatcaacccaggtgtcctacaggtgaacggttcaataggtggtctgcacaccacgagatggcccttggcagggagggggagtggcggatgccccgagccctagtgaagagtgccagtccagaggctgcagctgttggtccccttctagaacataactaagatgacagtctgggcatggtggctcacacctaccatcccagccctgtgggaggtgaggccagcgggtctcttaagcctaggagtttgagaccagccatagtgagaccatctccaaaaaaaaaaaaagatgacagaactgtagtgaagcattcaggtcgtgattgctgtggtgctgagaggaatccgtggtgcggtcagtggcgcggccccgcactcacacacacgaktccagctggccacgtctggtgcatctgtaggtggcgcggctgcccgggctcagtgcttctctgaggttatgagagacgccctccctgggggatgctgggcgcaggtgctcagggtatttacagcttcctgctattctgattattccaaaataaaaagttaaaggatcgggccaggcacggtggctcacgcctgtaatcccagcactttgggaggccgaggtgggcagatcacgaggtcaggagatggagaccatcctggctwacatggtgaaatcccacctctactaaaaaatacaaaaaaaattaaccgtgcgtggtggtgggcgcctgtagtcccagctacttgggaggctgaggcaggagaatggtgagaatccgggaggtggagcttgaagtgagctgagatcacaccactgcactccagcctgggtgacagagcgagattccgtctcaaaaaaaaaaaagttacgggatcagccctgatttgatgtgctgcgagaggcagtggccacgtgacagatggtggtggccctctaggacgctacagacgtggggacactgcccccaacccccgtggacaagccctgggtctgccttggctcctgggggtggggtgctgcctccacagctgccctgtcctggtgtctgccctccatccagagtgttcccgtcgccccagcacctggcctgtgctccagcccctggagaccttcacacgtgtgggtggagccggcacctctggacggcctcgagtgatcggtgttctattttgcaagcgcatgttttcyaatatacrtggtgctctgcgttatagaaacagtagttgcccctcatggacaaccagatgccgagtttccgatctccrtctccacaggctcaccagctggattccctccygggggcttcattcccaaaacggccaccacgcccaaaggcagcagctcctggcagacaagtcggccgccagcccagggcgcctcatggccccctcaggccaagccgccccccaaagcctgcacacagccaaggcctaactatgcctcgaacttcagtgtgatyggggcgcgggaggagcggggggtccgcgcacccagctttggtgagtcccccactctctgttgctgtggagtttgcagagacctccctgaattggctaaaggtagaacctatgttgttttcttcatctcagagcccagtcctgggacaggcacggccaagccactcagagaacgacgcggtttccgatgtgtgttcactggtctctctctgggtcaggcctctgggtccctcttgttccagtgacaccttcttgacctgtttttaacaaatggcctttgcaaccctgtcttgtcttccctcttctttactctggaggcatcaggatggtagccctgttcccgggggcagcaggtggaattgggcctgtgtgtytctgcagaaagtttctgttcttaactgggctttgtggctcacgcctataatcccagcactttgggaggctgaggcggacagatcgctggagcccaggagttcaagaccagcttgggcaacagtgatacctcctctctacaaaaaatgtaaaaattagccaggcatggtggcgcatgcctgtggtcccagctacttgggaggctgaggcaagaggatcgcttgaggccgggaggcaaaggctgcagagagctgagatcacgccattgcactctggcctgggtgacagagtggagaccctgtctcaaacaaaaaaaagtttctgttcttttctagctcaaaagccaaaagtctctgagaacgactttgaagatctgttgtccaatcaaggcttctcctccaggtctgacaagaaagggccaaagaccattgcagagatgaggaagcaggacctggctaaagacacggacccactcaagctgaaggtgggtgggtgggcagctcttcctgggagcccagaggcctcaacccatggcccctggagcatctgctgtgccttatggagccggcgtctccagacagcaacctttcacccctggagcatctgctgtaccacatggagccggcgtctccagacagggacctgtcactgccgatgggcctggcagccctcaaggacagggtggcctgaggccaggggggcagggcagagtcaggccccaggctgtgctgctccccacgtgcccagatggctcagcgctggtgggggtggggtgggcgggcgttacaggagtgagtgccccggggtgtttgcagagactgttgagggcaggcgtctcttgggggctgctctgggtactgagcctcccaacccaggacgctcactgggggrtgaggatgcagcggtcaggctgtcactgtgccggccctgmgacacgccctgctctgtggcttggccgatgcccagctctgcaggccacatgcgcctgtgaccttggggtcctttcacaggcaccagggaccatccccttctccctcggagtctggggcctgggatgggccaaggggttgcaccaccagaaccagggtttgtgtcctcggtgaacatctggctgagacgagggtccctctggccccaggccctgaaacatgaagaccacctggccctgtgtcrtccggagtgggctctatatagttgagggcagggcgtgcagtgggacagtgtctgtgagccgggctgagcccaccccacgtgaccaggcacttcctcagcgtcgtgcctcagtttccgcggtgcagaggagragggcaggcaggtgcccagggctcggcaagctccgtgtctcccgcagctcctggactggattgagggcaaggagcggaacatccgggccctgctgtccacgctgcacacagtgctgtgggacggggagagccgctggacgcccgtgggcatggccgacctggtggctccggagcaagtgaagargcactatcgccgcgcggtgctggcygtgcaccccgacaaggtgagcagagctgccaggcggccgcttgaggccttcaggggcgggggcgggggnnnnnnnnnnnnnnnnnnnnnnnnnnnnnnnnnnnnnnnnnnnnnnnnnnnnnnnnnnnnnnnnnnnnnnnnnnnnnnnnnnnnnnnnnnnnnnnnnnnnnnnnnnnnnnnnnnnnnnnnnnnnnnnnnnnnnnnnnnnnnnnnnnnnnnnnnnnnnnnnnnnnnnnnnnnnnnnnnnnnnnnnnnnnnnnnnnnnnnnnnnnnnnnnnnnnnnnnnnnnnnnnnnnnnnnnnnnnnnnnnnnnnnnnnnnnnnnnnnnnnnnnnnnnnnnnnnnnnnnnnnnnnnnnnnnnnnnnnnnnnnnnnnnnnnnnnnnnnnnnnnnnnnnnnnnnnnnnnnnnnnnnnnnnnnnnnnnnnnnnnnnnnnnnnnnnnnnnnnnnnnnnnnnnnnnnnnnnnnnnnnnnnnnnnnnnnnnnnnnnnnnnnnnnnnnnnnnnnnnnnnnnnnnnnnnnnnnnnnnnnnnnnnnnnnnnnnnnnnnnnnnnnnnnnnnnnnnnnnnnnnnnnnnnnnnnnnnnnnnnnnnnnnnnnnnnnnnnnnnnnnnnnnnnnnnnnnnnnnnnnnnnnnnnnnnnnnnnnnnnnnnnnnnnnnnnnnnnnnnnnnnnnnnnnnnnnnnnnnnnnnnnnnnnnnnnnnnnnnnnnnnnnnnnnnnnnnnnnnnnnnnnnnnnnnnnnnnnnnnnnnnnnnnnnnnnnnnnnnnnnnnnnnnnnnnnnnnnnnnnnnnnnnnnnnnnnnnnnnnnnnnnnnnnnnnnnnnnnnnnnnnnnnnnnnnnnnnnnnnnnnnnnnnnnnnnnnnnnnnnnnnnnnnnnnnnnnnnnnnnnnnnnnnnnnnnnnnnnnnnnnnnnnnnnnacctaggagcaagggtgggctccacactgcccctgtgccatccccgcagggccaaggtggcctccggggctgtcgggctggtggaggaccaggggcccctggaaggagaaggtgaccatggtgagcccccaccccacagcagactcgaggaggccctgaatcatagccctgaactcaccgccaggctcttcctgttttcagagaataatgactgcacgtttgctatgcacccgccactatttttagctcttttaaaaaataatgagaagctaaataggtgctgagattttcacatcaaggtcgtctggattccggctccgggtctggccaccccaactcagatgctcctgctctgggggcagctcgggccacgctccctctaggctctccagcctcagccctgtgctgtgcggccccctcctctcctgctgccgcccacgtcacacccaagctccaaactaatcccccagaccccgccccagacccttaactctgaaagcttgggtcgcttctccccggcctgtggcaaacccagccaccctgcctggacaagtgagtccacctccctctggctggctgcacacccttcctccgtcaggggcctgagcctctggttatgtgtggagagcagcgggtggccggtccaggctaggccgagactgcggaggatggaggaaggtgtggagtgcagcaggtcactggtccggggtaggctgagatggagtgcatagaatggaggccaggacggtggggtctgggttgcaggacaggaaaacccccatccaggctgacccagctcagaagggagtctgtggcccccacctggccatgctaccgccagaatttctcctcttccaaccattcagctcagcatggagacacgcaggtgcacaggcatgtacaagccgtgcgcacacgcagacggctacacaaggtcacacacggtgccacccagacacctgcgcacacgcagacacggctgcacagggtcacgcacggcgttacccggacacctgcgcacatgcagacggctgcacagggtcacgcatggcgccacccggacacctgcgcacacgcagacacggctgcacagggtcacgcacggcgccacccggacacccacacgtgaaaggcccaggatgcaccatcttcccagccggccactggcctgagtgctacccacagtcactgaggctccattctgcacgtgggagccgggtctgcggtcaccgagcctgtgactatgctccgtcctgcacgtggacacaaggtcatccttgccgggttgtaatgcatagaccacgtgaagcttgaagagagactgcacctgtgtgacacccccttgtgtgacagcatcttctcggtgacttcacggagatacaaatggcagcggccaagcagcgatgctcacatcactggtcctggaggaaatgcaagttggagccacagcaagatgctgccgcacccactagggcacccagtcaagacccaccaagccaagtgtccccacgcatgtggagaagcccacaccctcacgcagtctgggtgggagcttaaaatggcacaactgctttggaaaaccgcttggcagtcttttttttttttttttttgagacggagtctcgctctgtcgcccaggctggagtgcagtggcgggatctcggctcactgcaagctccgcctcccgggttcacgccattctcctgcctcagcctcccaagtagctgggactacaggcgcccgnnnnnnnnnnnnnnnnnnnnnnnnnnnnnnnnnnnnnnnnnnnnnnnnnnnnnnnnnnnnnnnnnnnnnnnnnnnnnnnnnnnnnnnnnnnnnnnnnnnnnnnnnnnnnnnnnnnnnnnnnnnnnnnnnnnnnnnnnnnnnnnnnnnnnnnnnnnnnnnnnnnnnnnnnnnnnnnnnnnnnnnnnnnnnnnnnnnnnnnnnnnnnnnnnnnnnnnnnnnnnnnnnnnnnnnnnnnnnnnnnnnnnnnnnnnnnnnnnnnnnnnnnncaggagttggagaccagcctgaccaacatggagaaaccccgtctgtactaaaatacaaaattagccgggcatggtggcacacacctgtagtcccagctactcgggaggctgaggcaggagaatcgcttgaaccttgagaggcggaggttgcagtgagccgagatcgcgccattgcactctagcctgagcaacaagagcaaaactccatgtcaaaaagaaaaaaaaaaagcaaaatagaaatttcgtacacagtttagcaatctgctcctaggtgttgacccaagagaaatgaaagagcaaggccacacagacgtgttcaggaacaacccatgatccacgcacagctggacatacgaaggagctgtgtgcgtccacgccacggggtcctgctcagcatggagaggggtgagctgctggtgtgacggcgccacggggtcctgctcagcatggagaggggtgagctgctggtgtgacggcgccacggggtcctgctcagcatggagaggggtgagctgctggtgtgacggcgccacggggtcctgctcagcatggagaggggtgagctgctggtgtgactgcagcacagggcatgcccaggtgtgttagtctgttctcacactgctataaacacatatctcagacagggtgatttataaagaaaagaggattaatggactcacagttccacatagctggggaggcctcatgaaagttacaatcatggcggaaggcgaaggggaagcaggcacgtcttagctggtgggaggagggagagcgagtgagtaaaaggggaaagtgctgcacgcttccaaacaagcagatcttgtgagaactcactatccggagaatagcaaggggaagtctgccccaggatctagtcaccccccagcaggcccctcccctgacatgtggcgattacagtttggcaggagatttgggtggggacacagatccaaaccatactgtcagaagagcagcaagctcagtaaatggggccagatcaaaaggagggaggtagtgaacgactccattcgtgtaaaattccagcaaatgtgaagtccgcgacaggccagcagcagatccgtggctggcgggtgtgggcggaggaggatgtgctggcttcaggcaagcacgcgtcaaatgcctcaaactgtgctcctcaaacgtgtgcagattgcatttctgtcctgcgggggctcagaccctcaatagtaagctccagtgggttaagcaggctgctttccaggtggcccgtgacacccccccatcccccagatgtccagctgccctcaggccacctccctgggctcccatgggcctcctctccctgtgcccccagggagctccagggctctgaggaaggccaaccccagaggtgtgggcatctgccccaagatggaggccccccccaactctgtgggcctccaagtgggaggacttggctgcaaggagatgaggggggcactgagtcatgcaggaggccagtgtggctggaatgaggttcagatctgggggaggggctgattttgtccctgagctgcttttagcagaaaagctgagtgctgaggtcagctgaggctgaagtcctgcttatgtcttcatctccaggagctcatccccgctcctgcactgtggccatagctccaggcagccgcgcgccgaccccacccacaggcctgggtggagctgaaggtctaagccccatgccagaccctcatccaggcagcgacccctgggcacagggggcatggcagggacaccgatttcctcctccttctgtcagtttggacaaagattccagggccacagaccaccgtctggccgccccaaactgctttctccaaaagggcttgccccaaagctttgcccaccgagtcctggagctgctgagcgtcctgccgggcctcaccttaggtaagaaacagcagcagcctcagcagctggctgttctcaccttcactacctccaggagctctgaggaaaagcacagcaacccaagggcagggggaggctgtgctgccagttgggggtggcccctgtgcgcataccagcatcagagccccttcagatggggtgggaacctgcccccagccccaggtgtgccgggcagtcatgcgcaagctgaggatgctggtctcaggtctagggcaccccctttgtggaagaggctgcagaccccgtagatgtcatgggcctcagattaggatagagggggcttccggttggtctaatgactggagaagggcccagaagaggcaggtccatgcggcacagcccccacattctggccttggcacttccccaagatcaaactccaagtccctgctgccagccccctcagctgctgatgtggttggctctgtatccccatccgaatctcatctcgaattgtaatccccacatgttgagggagggaggtgattggatcctgggggtggtttccccctggtgagtgagtgctcacaagatctggctgtttgataagtgtgaggctcttctctctttgtgcagtctctcctgtcgccttgtgaggaagtgcctgcttccccttccaccatgattgtaagtttcctgagacctacccagccatggggaactgtgagtcaattaaatctctttcctttataaatcacccagtcttgggtatttcttttttttttgagacggactctcgctctgtcccccaggctggagtgcagtggtgcaatctcagctcactgcaagctctgcctcccaggttcatgccattctcctgcctcagcctcccgagtagctgggactacaggcgcccgccaccacgcccaccaaattttttgtatttttagtagagatgggtttcaccatgttagccaggatggtctcgatctcctgacctcgtgatctgcccacctcagcctcccaaagtgctgggattacaggattgcaggcgtgagccaccatgcccgacctttatttatttatttatttatttattttttaagatgtaatcttgacctgtcgctcaggctggagtcagtggagcaatctcggctcactgcaacctccgcctcccaggttcaagtgattcttctgtctcagcctcctgagtagctgggattag

SEQ ID NO: 96916 - DNA, 29062 bp, Homo sapiens
aaactttaacgtaatcacatctgcgatcacatctgcaaagttcctttatctgccataaaatgtagcctttacatgttccagggattaggatgtatacatattttgaggggccactattcagcctaccacaattggacttgatcaaaattttaaatttttgctctgcagaagacccaagaggatgaaaagacaagctacagaatagaaaagattttcaaacttaggtacctgacaaaggactggtttctggaatgtataaagaaccctcaaaactcaacaagtttttaaaaaatccaattagaaaatgggcaaaagacataaagagatatttcactgaagaggatatacagatggcaaaaaagcatataaaaatgttcaacatcattagctatgaggaaagtgcaaattaaaaccataatgatacatcagtacacacctattagaattactaaaataaaaaaaaatagtgacaataccaaatgttagccagaaaatacagggaaactcaatcatgcatacactgctggctagaatgtaaaagggcatagccactggggaacagtttggcagtttctttaaaaactaaacacgcaactaccattggaaccatcagttgcacttctgggcatttatcccagagaaataaaaacttatgttcatacaaacacctataaacaaatgttcatagcagctttattcataatagccccaaatcgtaaacaacccagatgtccttcaacaagtggatggttaaacaaattgtgctatatccatacacggaaccactattctgtaacaaaaagaaacaaactattgatatttggatgactctgcagagaattacaccaagtggtaaaaagaatccttaaagcttacatattatatgactctatttacataacgttcttgaatgacaaaattacagaaatggagaacagattggtggttgccagaggttaaggggagggcgtggttggggagcaaatgggtgtggttaggaaaggagaaagagggattcctgtgctggtgaaaatgttctggaccttggctgtattttattattattattattattattattattattattttgagacagggtctcactctgccatccagagtagagtagagtgcagtgagctgtgattgcaccactgcacttgaactcctgggctcagatgacccacctgccttggcctctcaaagtgctgggatcacaggcatgagccaccttgcccagccttgactgtattaatatcaatattttgctggtgctattgtattagagttttgcaagatgttcccattggaggaaactatctacaattatgtcaaatttacaattatctcaaagtcaaaagtttaattgtttaaaaagatatacaaaatgcatgcccaaattttatactagatttcataggcatgaaattcatcaaaactttaaaattctcttcttcaaaagacaccgttaagaaaatgaaaaattaagccagacactgggggaaaatacttgcaatgcatatatctaacaaaggactagtatccgtactatataaagagctttcacaattcaataaatgcaattaaaaccacagtgagatatgacttcacaaccatgaaaatggctaaaatgcaaaagtctgacaataacaagtgttagcaaaaatgtagggcaagcgaactgccacatatgactgttaagaatataaaatggtggctgggtgcagtggctcatgcctgtaaatcccagcactttgggaggccgaggcaggtggatcacaaggtcaggagatcgaaaccatcctggctaacacgttgaaaccccgtctctactaaaaaaaatccaaaaaaaattagccaggcatggtggtgggcacctgtagtcccagctacttgggaagctgaggcaggacaatggcatgaacctgggaggcggagcttgcagtgagctgagatcacaccactgcaatccagcctgggtaacagagtgagactccgtctaaaaaaaaaacaaaaaaagaatataaaatgatacacatattttggaaaactgtgtagcagtcacacctagatagctacccgagagaaatgaaagcatgtattgacacacagacttgtataggaatgctttttcataatggccctaatctggagacaacccaaatgttcaccaacagagaaatggataaacaaattgtggcatatatgagcaatagaataaaaacaataaactattggctgggcgtggtggctcacacctgtaatcccagcagtgtgggaggccaaggcaggcagatcacaaggccaagagatcgagaccagcctggctaacatggtgaaaccccgtctctactaaaaatacaaaaactagctgggcgtggtggtgcgcgcctgtagtcccagctactctcggggctgaggcaggggaattgcttgaaccagggtggcggaggttgcagtgagccgagatcgcgccactgcactccagcctgggcgacagagtgagactccctcaaaaaaaaaacaaaaacaaaaacaaaagcaataaactattgatacacacacagacatgaatgaacctcaaaaccagcgtggtgagcaaaagaagacagacacaaaagactccaccatatggttccatttgtatgaaattctagaacaggcaaagctaatctatagtgacaggaagcagatcggtagttgcctgaggctaggggagaaagagaactgactccaaaggagtagggggaaatcttgggggtgatgaaattttctatatcttgattgtggtggtgggtataaatatttgtcaaaatcacccagtggtactccagacatgtgtatttcattttatgtaagttataattcaataaggttgatttttatttttatttttttgacagggtattgctctgtcactcatgctggagtgcagtggcacgaacacgagtcactgcagcttccaactcctagactcaagtgatcctcctgcctcagcctcctgagtagctgggactacaggacaccacacccagctaatttttattttatttctgtagagatgggggtctcaccatgttgcccaggcttaggttgattttttttttttttgagatggagtcccactctgttgcccaggctggaggcaatggcgcaatcttggctcactgcaacctccgccttccaggttcaagcgtttctcctgtctcagcctccccattagctgggattacaggcaccctccaccatgcctggctaatttttgtatttttagtacagccggggtttcaccatgttggcctggctggtctcgaactcctgacctcaagtgatccgcccgccaaggcctcccaaagtgctgggattacaggcgtgagccaccgcgcccagttgcttaggtttatttttaaaagacaaaatacaagcccatattttgttttagattcaacaggcacaaaactactgtttcgatgcttaaatttttggttgcctgttagtttctaaatgcttactcttaatgcctgtacttaatccttcctcccctatagatgtggagaaatttgaatttctggctgtggtccaagaccacactttgagtagcatcaccctactccactttgccaactacccgggttctccaacaggcattcccacaggctccccttccaaaccttactctagaaagctgggaggccagggacaggggggtccaggcagagcccggggtcactgggtcttgaacaccggcttgccccgcagccgcagcactctgtacgtgttgaggccgggcacgtcgaagccgggtgacagcccgtggtgatccaaggggtagaagttgaccagctgcccgtgctgggcctcgagcgagagccacgcgtcgccgagtggcagtgcgcaggggaactcgtgggccacgtgcagctggaagacgcggccgtgcaggtggcgcagcgccagggtgcggaacgctggaggcaccagcgcctccacgcgcggcccgaactggcgcaggcgcagctcgcccgccggcccggcgcgcacctcgtagaaggtcaggttggcgaaggtgaagtagccggcgaaggggtgcgcggtgggcggcggagccgggccgggctcggcctcccggagggcgcgctccagggcgggcaggagctcatcgtaggcccgcgccaccaggtcgggcccgggcggccgtggccctgccagcagcagcaccaggcccagacgcagcgggggcaccagcgagaaggtggcggcgtagccgtccagatcgccgtccttgcgcaccacgcggtagccccgctgcgcgtggaactcccacggcgtgcccgtctcgttggcgaagtaggcgcccgggcaggccagcagcggcgccagcagcgtcttggccgcgtcgggccgcaggagccgccggggcccgccgcccaggagcgccacggccagcttggccaggtcggcggcggtagagtacatctggcccgacggccggtaccagcccaggtcatagagtggcgccggccgcccgctgccgtagaagcccgcggccaggcgcgcgcgcacgtcgggcgtgaggtcaaagcccgtgtctgccatccccagcggctccagcacgttctccgagacccagcgctggtagtcgccctgggcggtgtgagctgccaggacgtgggccaggagcgagaaggccagcgtgctgtaatggcatctggaaggagagcagtggcaagtgggacggggcccttcctcacccgcccgcgctgtctgaaatgccaccagtttcatgggactgggcggggctgggaaggaacctgctcccctgcatcccaggtggtcagacctggaagagactttggagcactgactctgactctcttctacatctgggaagaccaaggcccagagaggggcggggaattgcccagggtcatacagcaggatggaggagagctgagctcagcggtgcacctgggaaagctgtcacacaaatcttattggtccttcacactttagtatgatttaccttatctaatggaaaattaaaggcttacactgctctggggaaacaaaaatgatagtgaccatgtatgaggcaaggtctcacccctcccttcttccaggctgtagcagacaccagtaaccagcaagaggcctcttttctttcccagagcaaatacagtttcagaatctctaaaacagaaaggtgcaaggatgtgtgaaaattcacaaattctcctaggcattcctgaactctgggccaacttccttatttttgcagatgaggaagattagttagatgagtttcacagagataaagtgcaccacccaaggtcacattgccatagttatttgcagagctgagaggaggactccagcctgaagatgtccaagcatctcctctctctgcatctcctggatcatttcttccttaagggaagtggggcctgaggttcagcatttggagaagcagagggacaaatttggaaaagggtcactgaccagcggctcagaagggggcccctgaagctggggagtgccagctgtcctctgtccagccccacagccccactgctcccagagtggggcttctctgttcagtggccacccagctatccactccccatctggtcagcaacccgtttatttccaacctggcaaaatctgtattcaccttgcttatttgctcacggtgtctccctcacaagagtgcaaactccacgaggagcaaaccgggtgtttatcaccttctgggcaaagtaggtgctcaataaatgttaagtgggtaaatggaaaaaacattccattcaaacagaacaggattctgggcccagctctcccctgtcttgctggcctcccctctctaggtcttgccctttgcagctggggagcaggtctctcccggctctgccaacctaggatgaggtgatgtgggctctttgccaggcaggtgtgtctccccaggaggctcctaacatgaggctgggcatcagggtatgctcctcacctggttcccgggtccactaccagcacatcgtccttgagcaggttcagggcctcctgggtgctgcccttccacagcagtgaagtggagcgcagccttctgggcagccctagggaggagcagtggtcagacttaccgggcccggctgagggtgggatggtgggcccctgggtgcactccctccccaccttccgtgagttgagagataacaacaacaaatcagttttttaaaaaagaaaatcagcctagygtggactccagtcctgccttctcttcctgcctgtgtgtcactgggcaggtcactgggcctctctgagtcccagtccttcatctgtaatataagggaaataatccttgtacccaagggctgattagattagattggataaaatgtttagtatggtgcctggcacatactaactgctcaaaaaataattgctatcatcaactatagaaagtttggggccgggcgcggtggctcacacctgtaatcccagcactttgggaggccaaggtgggcggattgcctgaggtcggagttcaagaccacgctggccaacatggtgaaaccccatctcttctaaaaatacaaaaaaattagctggacgtcttggcatgcgcctgtaatcccagctactcaggaggttgaggcaggggaattgcttgaacctgagaggtggaggttgcagtgagctgagatcgcaccactgcactccagcctgggtgacagagtgaaactccatctcaaaaaaaaaaaaaaaaaaagagtttggtccaggtgtggtggctcacacctgtaatcccagcactytgggaggctgaggcgggaggatcacttgaggcctggagtttgagaccagccttggcaccatagcaagaccctatgtctacaaaaaataaataattagctggactcagtggcacgtgcctatagtcctagcttcttgggaggctgaggcaggaggattgcttgagcccaggaagccaggttgsagtgggccatattcatgccactgcactccagcatgggaaacagagtgagaccctgccaaaaaaaggagaaggagaaggagaaagaggaggaggaggaaggagccccagttctgtgtgtgggagtgacaccaaccacatccattgactgagactcaggcctgaacacactttgtaaaatgatgacatggtgggcacttgagggattcctaccttttggagttgatgggtttatgactgcagatatgaccaaaggcgtctggggcagggcagayagtacctgtcttcacccccttacctgtgtcaatcacagcaaaacccagcacccctccctctaaagaccaacagagggtccttcagaagctttcagagcaatccctcygcayctgccttgctctgttcctgatcccgccctgcccaattcccgtgccccagcttcatcttccagtgccagcctgctcctgcccccaaccttgtcgacttcatcttgacttgttatcatagctttatgattataaaataatttattataataagtaattaatttacatgatttaagaytcaaaggaaatcaaagartatacaatggaaaattttcgtcttacccttctccctagctacccatttcccctccctagaggcaacctaatgtttcaatctctttagctcccttccaaagatatttgatgcatatataagctaatatatactacatacttgtgttatataatatgtacattacacatattcatatacacatatccattatatatgtatatattattttaattatttatatggtagcatacaaaatatgctgttacatgcttttttcctacttagtattctatcttattccatctcagtacacgcagaacatgattatcctttttttaggtctatacagtgtttgattgtacagctgtgtcatagttcatttagccactcccctattgatggacatttaggttgtttcagccttttgctattacaaacagtgctgtagtgatcaactgtgtattatacatcccccatgccagacataggtgagtacatctgtaagagaatttcctagaaatgaaattgctgagtcaagggggacatacgttttaaattktgatattaccaattgccctccatacggctgcaccaatttaaattcccagcattgatgggtaagaaggtctgttttaccacaacctcagcaactcagggcgtcatcatgttcatctttgccaatctgatgggggaaaacatgtctcagtgtagttttaatttacatttatgttgttatgaatgaagttgagcaccttttaatatttcttaatattcttttttttttttttttttttttttttgagacagagtttctctctagtcacccaggctggagtgcaatgacgcgatctcagctcactgcaacctccgccttccaggttcaagagattctcctgcctcagcctctggagtagctgggattacaggcgcaagccaccacacccagataattttttgtatttttagtagagacagcgtttcaccatgttggccaggctggtctggaattcctgagctcaggtggtccgcccgcctcaaccttccaaagtgctgggattaaaggcgtgagccaccacgcccagcccttaatattcttaagagtattttctgtgagctctcaattctgttcctctcctttacccatttttctgctgggctgttggtctttgtaataatttgtaggtgacttttatatattaagggaaattaggtcttctgtgtagaattgtttacaaatataaactttttttctttttagagactggatcttactatgtcattaatcatagctcggtgcagccttcaactcctgggctcaagtgatcctcccacctcagcctcccgagtagctaagactacaagtgtgtaccaccatgcctgggctattttttaaaatttttagagacggggtcttactatgttgcccagactggcttagaattactgggctcgagtgatcctcccacctcggcctcccaaagcactggggtgacaggcatgagccactgagcctggccacatattgactcgttgacttgctcttgccttatcaacttcattttgacctgcactgatgggtaagacctgccaactcatcttgatgtttctacttggtctaaatttccaggcttcagttcagcttttacctcgagagatgtttctttccctggcccaccacccacatcccatgagagggacgtagggccagttcaggaagcagagccaagagtgagcccagcctggctggatgagaacctgttcctcagcttccccacctgaaatggtttgggtcagcctgagtcagttctgagactcacctgagagctggctggccatccttcgaagggtgacaggtgaaggccttggggcggggcccacctgctccagcccgtccatcaggccctgctgttcggctgatgccaggcccagcgggttgttaatggtgaaggtgctggcataccgctccagagggtcatctagggaggccacgatgccctcctcccacagacggtacagcatgaggacaggaaagatcttggagatgctggagatcctagataatgttgggaatacaagcagtcaaagggcatcctgttggccccacaacccacctcctgcccccatcctgcaactttttagtgttctagaaaagcactgcatccctgcttaagtcaacatctccaacagaaattaaccagcctctgtggagctgcctttgggatgcttgagaacgtaaccagaagccgaggggctgaggtgggatggatatcctgggccaggctcttttccagccatttcccattcagggacagacctgrgtttggatggtgtctctgcctctcactggccatgtggccttaggcaagtttctagacccatctaagattcagtttcattgtctgcttcaccggttgtattaataaaagaatggaacgaggttgtgcatgcaaagtgcctgtctacgttcctaggaggtggtaagtgctcagtacatgytagcacatataactgttggccccatgcctggcacaaagcaggtgcaatttaaatgcaattccctcaggactcctgtaaaacccacagtgtccccaggaacaaatgtgttcactctgcatcatgaactttgaggatcctgcaggcagcatgcagaaggggagactccagatatgcaacagaatgtccccatctgtttgcatctgggccactgctgccacttgacagggacctggggcaaggacctaggaactggttatggttcctttgtggcacatggtcagggttggggggatgggcacaaggtagccttttctagtttgggaggtttagggctaaggttctttccagaagggattccttcctgaccytttacccctgtgatgtaacattgggaactcactggacttcagtcctctctggacttcggtctcctcttctataaaactgtcaagacttcataataggccctggcagattagaccccagccatgattctcttcagtatccttacctcctaggtctcccttgccctcccatcccttacccctccacaggaccctagagatcacccagctgacctgtacatggtgtactcattgggggccccagaagccgggtctgagccattcttcttcccaaagttccctgtccagagcacagtatcattgtggatgacaactgcagacatggcagccacgcctggggcagacattgcctggcgcaggatctggtccaccttgagggaaaagaacgggtgcagtgacaggcccccctgccctcaccctcagtaatcatctgcaaagccaccctcgtccatagtcacaccctgcatgcagcaccccagtgagcctcccagctatgccccatgggctggggcccccactgttgggcttctkcataagatgttttctcaaagaaacagtttcttagcaaaataaaaaaggagagggggttaaaacgactgctttaaggctgggcatggtggctcatgcctgtaatcttagcactttgggaagccaaggcgggcagatcacctgaggtcaggagttcraggccagcctggccaacatggtgaaaccctgtctctactaaaaatacaaaaaattagctgggcatggtggcgggcgcctgtaatcccagctacttgggaggctgaggcaggagaatcacttgaacccaggaggcggaggttgcagtgagccaagatctcgccactgtactccagcccaggcagcaagagcgaaactccgtctcaaaaaaaaaaaaaaaaaaaaaaaaaaccagctactgctttagtcaaacccatgtctgacgccctaaaaaacctccaataggcctagcctraacccctagtgttggggaattcactattaatacagtgcctgtaggccctctttgcacgtttgtttggttatttatttattttatttgtttttagatgaagtctcaccatgtcacccaggctagagtgcagtggctcaagcacagctcactgcagcctcaaccttycaggctcaagtgatcctcccgcctcaacctgtggagtagctagaagtacaggcacatgctaccacacccagttaattttttaattttttgtagagacggcgtctcaccgtgtagaccagggtggtctccaactcctgacctcaagcagtcttcccacctcagcctcccaacatgctgtgattacaggtgtgagccgcctcacctagcctgaacatttattgaaaatacctcatcattttcaatgatgaagtgcaatgatgacgataacagctgacatttattggacatttagaatgtgccaggcatggcataaagtgattttcatacattgtctcctttcatcctcgtgagtcagtgctaatttctgcccattttacagatgagaaatgagagcctatgagatatgaggtgacttgcccaagtggctactggctgatggaatcaagattggaaccctgtgctaagtccagccccacttctttttttgttgttttggttttttgttttttgagaccagagtctcgctctgtcacccaggctggagtttagtgacatcatttccactcaccgtaaactccacctcccgggttcaagcgattctcctgcctcagccccccgagtagctgggattacagtcatrtgccaccacgtgtggctaatttttgtatttttagtagagacagggtttcaccatattgaccaggctggtcttgaactcctgacctcaggtgatccggctgcctcagcctcccaaagtgctgggattataggcacgagccaccgcacctggcccctacgtcttaattaactgctggaccaccttgccacgtgattttacatatccttggctgagctcggtccacctccacttcccatccctgcactaactttgcctttcttttcctcgctttgtcaccctggctggagtgcagtggcacgatctcggctcactgcaacctccgcctcctgggttcaagcgattcttctgcctcagcctcctgaggagctgggattacaggcatatgccaccatgcccggctgatgttttatatttttagtagagacaggctttcaccatgttggtcaggctgctcttgaactcctgacctcatgatccacccatctcggcctcccaaagtgctggggttacaggtgtgagccaccgcgcctggctctaactttgcctttctgagcctctgtctccttctctatagakagggactcatgaggaatgcatgtaagtggttacatggcaatggcgcattccaggtgctcaacagaaggcagcatggttattattgttgcttttatgaaaatttgctataactcctgaaagccacatagcacccttctgctctctccccttcacaaaaacctttcaggtatttgcaagcagtgatttttgtctctgcattggcccacacgttcccttctcagcactcaacagccctttccctttaactattcctcggatgatagttttgagtctcccccaccatgctgcggctcatattcttctgatcatgtttcactcatctccatgtctcccatsgtgggtgacccaagtggctgggctctgactggcacagactagagctgactgacacctgcctctagggtttggccatcctgcaatggtaaattttgtgttggggagcatggagtgtttaatcatatcgcggtggcctctgcaatgtgggctctgtcatcctctcctgtctcagcttccctacttcccacctatggcctctcagttctctgtatgtgtcatatactttctgcagcctccaggcccttccacgtgctgttccatctgtctggagcacacctctccatccccagggtccctcaccacacacatgtcatctgggtgtctgctacttattcacatctcagcctagacaccacttcctycagaaggaggaactgaccctaaggcctgttcctttgtgcccccaaagtcccctaaacttttcttaccctcactcttgccccaggattataaatgtttggtatcttcaccgttcctctcrcttccagattagtaatttcttgagagcaggtcagtgtcttcttcctgccatatccatagtgcctcgcacagagtagatgctcaagaaatacatgttggacggatgaatgaatgaatgccactgccagcacagagggactgccctccccttcatcacccaggcccagcccatatgcccagtttcctcctgggtcatcactgaccttttccagggcctccttcaacacggggagtgggtgagccaggggcacgggctcagggtgccggggacacatcctcacaggggcagaggtctcctctggtcccagggaacctggagggaacatcacatggtgaggaggggacagagatcaggataggaatctagggggaaagtggcagcaaaggccagagcagtgcctcaaggacagccctccccagccgagccgagccgggggatatcagggtccagagaccagccctagcccctgaggggcctagggagcaaagtgtgcccttggggaggaggcacagccctgcaggccacagctcctggttggtggtcactgtactcccctctctcttgcttaaccagcttcccatctcctgtggtcagtggacttagaccattctggctgcgtggggcaggctcagccacatctgtctgtctgacctgctgtcgtcctgattatgtgtttgggtkgacttcgagccccacttaggacccaggcctaaaccacagcgacaactcattctctcaccagagctgagcatcagggctttgggggcctgagtctgttctgcctttgtccgggtgtgtggcttcctcggcacctcaggcgagaaggtgaagtgctggcaggacaggattcaggctgtgatatcatcacagcagcacccaagcctcttcctctaaggctggagtggggtgtgaagggggatgagcatcctccaggactattaatacatcctcctcgtcttccactgtgccctgagactccaccccaaaactgagacaaggtccctgcggtaggtttcatatgaccataaattcttgagacagagtctcaccctgttgcccaggctggagtacaatggtgcgatctcagctcactgcgatctcagctcacttcaacctctgcctcccgggttcaagcgattctcctgcctcagcctcccgagtagctgggactacaggcgtccaccaccacgcccggctcatttttgtatttttagtaaagccaaggtttcactatgttggtcaggctagtcttgaactcctgacctcaggtgatccacctgcctcggcctcccaaagtgctgagattacaggcatgagccaccgtgctcagccataagaccataaattctgtcagctccttccacctkcgaagctgrctggcttygtgacttgctttggccaaaagaatgaggcggaacaaattgcgacctttctaggctaaaccttaaggggcttactccctgcgaacactgccaccttgtggacaggtctgggatagcggtcttgagagcaggagtccacgctgagggagacaccgcccccctcaacccgacccccaagccgacttgcccagtgcaccagagagagcccaagctagaccagcagcagagctgccagccagcccacagaatcatgggaaataatcacttgctttgtctgaagccagtaggctttggggtggtttgttacttarcaatagataactgacgcagacccaaacaggaaaattacaaaccttagggaggatttctcaacaaccccatgacatgggtttcacagaatagggtggtcccagctagagcctaggctttgctcagcctgggacccaggtaggggctagtgtccacagtggtgctcctcctgctttaattggcaaacaaagggcctggtagttatcactgtcagtggtggctcctttattgggccttgacccgttcaggaaggagaggctccaaggcttggcagctgctgcccctgaacacctgtgagttgttcctattgaggtcttagatacagctgcaggaaggtcttgaaagggggctggagcctggagattccatcatggtggccaaaggcagaggaagggaaacaccgtttgctcttcctttggtgtccttgaattttacccccaaactgggtgtcttgaagaaaccccagtggcatcaggatcctcattttatacacraggacatcgaggcacagagaggcaacaagactgtcccaaagatgcacagctagtgagagctggactcagaatggagtccagagcttctgagtctaaatcttatggtcctcccctacacactagaatcaggggtggcagctcaaagcccaggaggacccagggggctatggggaggaactcaaggctgtctctgcactcaccggtcttcagcttggggaggtgatactgccacaggaagcagccagtcatgaccactgagagcaggcagaagaagctgcagatggccgggaggagccacttcttcttcactttcagcaagttgggccaccagccatcctgggagagcaaggacataaggtacagtccccttgggggtcagtcagagggaagagagggaccctaaccctggcccctcctaggcctcaagttagccagacatcacaagagcccacagctttggataaatttcacagttgtgaaaccaatgcccttcccagtgtgactctttcaatagttctgccctccaagagcacccacccctttgcttgctgtaccttgttcccctatggacttagtgaaatatcgtaagaccagctgaaatgccacctcctccaggaagctttcctcaactctcctgtattagtctgttctcacgctgctaataaaggcatacccaagactgagtaatttataaaggaaagaggtttagttgactcacagttcaacatggttggggaggcctcagaaaacttgcaagtatggcacatatttcattcttctacttatataaaatgtctagatagacaacccatagagacagaaagtacattacaggttgccaggggatgggggtagcaaggaatgaagagtcactgctaatggctatgagtttttgtgggggtgatgaaaatgttctaaaattgattatggtgctaatggcacaatcttgtaaatatgctataaccactgaattgtacacttaacaatggtgaattttatgtcatatgaattatatctcaatacaattccttgaaaataatagtacctacttgtattcagttgcaaggattaaatgagttaataaattagaacagtagctggcacacggtaacactacatatgtgttagctattattgattgcctcctatgtgctaggcactgagccagatattgaggatatactgatgaacagaaagggactctttcctgccttttggaggtttacagttttacgaggagatgggtgttaaccaaatacattgcattaactcctccttgcctacytccctttctcaaaggcacatcttccacttctgtcctacaaacgtggtatttctcccccttccctcctctgtcctcagtacacacgcaatccctcagtggtgagttaccaaatgagaaatgaaaggagacatcactacagatcttacagagaaatattatgaacaactttgtaccaatccatttgacagtttaaatgtggacaaattccctgaaagacacaatccccaggtgatctcatgcacaaggacaccagccacatgctcatggtttccgattctcttctgcccagctctctcccctctacttcagactcccatttcaactgccttccgagcatttccacctggaagtcctcaagcacctggaactcaacatccaaarcagaaaactcacttgtttcaccccctcctccttctctcttattttcaacatcacctcatggcacctgcctccacttagtcatgcttcagggtctgcctgggcccctctatctccttcaatccctacctccagccagtcatcaagccctcctggcctgttacaattagaaaatatttcaagcttactgaaaaaaatacactgggcccagtggctcactcctattatcctagcactttgggaggccaagatgggaggatcacttgagcccaggagtttgaggccagcctgggcaacatagtaagaccctttctctacaaaaaaattaaacattggctgggtgaagtggctcacacctgtaatcctagcactttgagaggccaaggcgggtggatcacttgagcccaggagttcaaaaccagcctgggcaacatggcaaatcttcgcctctacaaaaaatacaaaaattagccaggtatagtggtgtgtgcctgtaatcccagctactcaagaggctgaggtgggaaaatcacttgagcctgggaggtggaggttgctgtgagccaagatcacaccactgcactccagcctagatgacagagtgagaccctgtctcaaaataaataaatataaaaataaaaattagccaggtgtggtggtatatacctgtggtcccagctactcgggagtctgaggtgggaggattgcttgaacctgggaggtcgtygaggctgcagtgagccatgattgcaccactacatgccagcctggatgacagagcaagaccctgtttctctctctctctccatatatatacacacacacacacacacatacatagatatacacacacatatacacatatatataatggtkccatacayatatatrtakagagagagagagasagacagacagacagacttataatgtaatgaatccttgggcactcaacactcgactttgttgaatctcaacattttatcatattttctcatatatttacatttttcaaatatgctatgtccttgcttatttactttgtctgttcagtttccccatcccataaggattgttgtttgttttgtttactgaggtattcccagtacccaaagcagttcctggaacatagcagaccctaataaatatttgttaaatgcctgactggatgaaaataaaacatcctaggtggagttgaagtcctctgtgtacctttcatggatctcagtcccttcctgctctccccaaatgtaacacccatgcttgatcttggtgtttatcataattatgcacgtgtttattcttttactatgtgtttatgtttccataaacagcatgtagtattgttttttttgaacgtaaataaatgatttcatactgtataatcctcctgcaacttgctttttattcagttagctaactacarttctgggttattcattttgacttctgtggagtgtgttgttgtataaacatactgggtagtgtagtagttagagcccggggccagactaccttaaaaacgtgactatttcacagtccagttgggaatcctgtgctagaagtgaaatttctgggtagcaaggtacagccrtcttcaacttagccacatactattctgttcctctctaaagttgtcattccaatttatgctcgtcccacctttgattctcattgctattaatatttctaatctgcatcttcttggtgactaataatgttgaataccttttcatgtatttattgtatgtatttgggtttgattttctgcagttggactgttctcccttgcctggtctttttctattctcttttctttacttattagagttcttcatatactcttgtttgtggcttgattttcactctgtgttgataacttttgtggagagacagaatagtgtagtggtgaatccatggccagattgcctgatttgcaatcttagctcagccacttaccactgcgtgaccttaagaaaatcacttaacctccctgtgcttctgtttcctcacctgtaaaatggggacgataatagtgcctaactcataaatttgtaaggattagatgagttgatgtataaaaataacattgtctgacacattgtaagccctgttagctattacggtatttggggattgttttgagacagtctcactctgtcacccaggctggagcgcagtgatgtgatcagtttttgcattttttgtagagacagggtctcactatgttgctcaggctggtctcaaactcctgggctcaagcaatcctcccaccttgacttctgaaagtgctgggattacaggcatgaatcactgtgcctggccaactattacagtatttttgaataggagggcttttggttttgattttggttgttgccaaatttatcagtattgtctttttggtttgcattgtgtatatggtgcgtgtgtgtgcttaagaaatctttcttttcacagaggtcagaaatagaggtttttgtacttttacacacaaaagaatttttggttatagaataaagtagggatccaattttatttttccatttggataatcaatagtccagcactatttattaaatacaccaacctgtcccccactgactcatatgccaactctgaagtatatcaacagtctgtacatactgacatctgccttctgggctctgttccaggagagtctygctgagtttatgttccatccctccctgtccaaccctgcactctcttccacaacaaagatctctcacatgttgagcacagtgtgccagacgctgttctacaggaaacaatctggcaagagagactttctatgatccgactccagcgaactccgccagcccattccctgcccctcccctgccccctgtgtctttatgcccccacctcccgcatcattgcccctctctgtacttttgcacctgccattccttggggctgtggtttccttttatccttttccatcagaaaaactgtgttcttcccttaacacccataggcatctgtgaagccttctcattcttccccaggcagagcygctcatggtaactggctactactggcttctttgtctgggtccctacaaggtaaggattctctccagcaccagcagagaattccctcctggctcttatgccttggacacctagtaccccacctggcactagcaggttctcaggaaattcttttgaactttacatggttctgcaagttgaaagacttgggttcaaatcttaactccactcctgagtcagttgtaactctggacaagtctcttcccctctctgagcctctacttctccaggtgttgaagagggttggctacttgtaaagagtttacttttacatctggaaatcttgtgtgatttcaaaagtgtctttcagctgtagaatctagggttctcactgaaatcatctttggtcataatattcaaagactggaaacaacccaaatgctcctcaattggtgagtaaatagacaaactatagtacgtctgtacaagggaatactactcagcaatgtaaaggaacragctactgatacatgcaataatgtggatgaacctcaaagcatgatgctaagtgaaataagccagactaaatggttacagactatagaatacaactcatagaacattctggaaaaagcaaaatgataggaacagaaaacaactcaatggttgtctggaggtagggatgaggtagactacaaaagagcagaagggactttggggaggtcatggaactgtgctatatgtttatcgtggtggtggttatgggattttatacatttgttgaaagtcatagaactctgggaggccgaggcaggaggatcacttgagtccaggagttcaagaccaggctgggcaacatagcaagactctgcctgtacaaaaaaatagaaaaaaattgccaggcatgctggcatgcacctgtagtcccagctacttggaaggctgaggtgtgaggattgcttgagcccaggaattagaggccgtagtgagctatgatcatgccactgcactccagcctgggcaacagcgcaagaccctgtctcaaaaaaaaaaaaaaaaaacaactcwtagaactgcacagattttatttcatgtaaatgatacctcaattgttataaaataaagcaattaaagatcccaaaagcaytgggattctctacctgttggaggagtaaccccagatacaaaggagtgaatggaaggctctcagatattgccactggatcatatggaagatactcccctcctggyatgaacacagagctgcaggggcagtgaggaccccttggtgggaaggcagcctgctatcccctaactggcacctaaggtgtaaccagcagatccttagcttatttttaggtgaagaataaaattcagaggcattaattgacttgctgagtccatgggcagtgaatggcagagctgagattcaagctctgtaagatgcaccacccccctcctcctcaaaatgcagctgggatctctacacccccaatttgtagccctcctctggggcctagcctcatctcgtctgtctccaatctcaggatttattccagcagacccgaagatgggtcagtatttaatctctaagctgcttgccagctgctcacagtttgacttgcagtagccactagaaatctctttcctttcccttcccagctggaaattgctggcagtaggggagggcccaggaagaaccaggctctcccaaaccccacctataacacggctccaccaccccccaacccctgctccttctcaggtgttctgtgccccaatcaccctcacctccttcctcatgctcacggcccactctgggacaactactctttgtccagttattcattcagaaaacaatccccgagggcttgctgtgctctgggccacatctgcccccaaggagccagaaggacagtggcataatcagacacaagggcctggggccagggaagtaggacttgactctggctctgccgttactagttctggacaaatgacctcacccttttgagtctcagatttctcatctgcataatgcagataacaattgttcctacatcttatagggtttagttgagaataaataagatagtgcatgcaaagcccatagagagctgttcaccagttggtagctagaggtgtaataaagggcttcagggctcacagatacagatgagctcagcctagggggagggaggaggaggagagagtcattgaacaggtagttaggaatgagcttgggtcactccaggcagaggcctctggggatgtaaaaaggaagaggagttagtttctggtttgttttgataattcagtgagtttatgtaaaacatttgaaactgttcctggcctgcaggtgcaagctctagagatgatgatgatgatgatgatgatgatgatgatgatgatgatgaaggtaacgtgggggggatttagcccaatatttgaagccagaaggacggtggcatggtcagacatgtgtcagaagctgacacatggtgacagcttcttgaggctgtgcctcacctgggtcttcattctctccaaggcatggaagattctggctctttgaggattcaggtctacaccacaggagatcccgtaagcaggaaactgagtcagaggagtgaaggcaaaaagaggtcctgaggggctggaaaaagaggagggggacagagaaaagctagaaaacaaggagggtagacgaggatgcgggggatcaaagcagccctcctcttcccatggctccccctcccaggtgagagaaacagcaagctcagaaacccctgccaggtgacccggcatcccagtttgtccaggactgtcttgattttagcactgaaagtcctgcattcccagaaacccctcagtcccaggcaaatgggaccattggttaccctgtgtgccccgcattgaattccagctcctcttccccacccccagcctgcggagaacaatctggtcaggccctcaggctcttggccacaacttaccctctccagaaggttccagcaagaacagggcagttagggccccagtttggctgacagtgcctctgggagtcccctgtgttccagaggacaggaatggcttcctgggctctgaggcacaggctttaccaagctctccaggggccggcagatgtggcgcctaatttccccggtgctaatccctcagagtgcctgctgccatggggattagcttctggggtccccaagcagcggggaagcgggggagatctgtcagggagcattgggtaacatcatgtgacccgagtgctccacgctggtgaagaaaggaacactctctccaaaaggagtgtctgccaaacccagtgtggaaaagggatgtcaggaggccaccagggtcatttccagctgggaagggaaaggagagagatttccaggcttggtctgaccccacacaagctcctcaggcacctctgaggaaactggagcacgaaggaacccagtttaaggaccactggggtcagcctagttgtgaaatattcaggtaacctgggtccaaatcttagtctgtcactgccagtgtgagcctgtgtgaccagggatcataacctctttgcctcacatctataaaatggggacaataatactagcttggttagcgtgcaagttaaatggaatgcgctcttgaagcaggcagcccagaacccggcacctagtaagtgctccataaattttggcttcttgtcatggacttggcttttttttttttaaagacaagaacagctgagcatggtggcttatgcctgtaatcccagcactttgggaggccaaggcaggaggatggcttgaacctaggcgttcgacatcagcctgggctgagacctcgtctctacaaaaaatttaaaaatggccaagtgtggtggtgttgccctgtagtcccagctactctggaggttgaagctgaagcattgtttgagcctgggaggtgaaggctgcagtgagccgagataagattatgccagtgtgctccatcctggatgacagagtgagactctgtctaaaaaaaaaaaaaaaaaaaaaagacaaagttgtgctctgtcacctaggctggagtgcagcggtgcaatcaaaactcactgcagcctccaactcctgggctcaagcgaccctcctgcctcagcctcctgagtatctgagactacaagcatgcactactatgcccagctaattattattttttaattgcttttggtacagatgggggtctcccttttttgcccaggctagtcttaaactcttggcctcaagtgatccccccatctctgcctcccaaagtgctgggattataagtgtaaaccaaaaataaaattctaaggcccccaaccgtctgaatggacttcctcctcagccagcacattcttaaaatttaacctgaaagaccgaaagactggtttaggccttgacggggagtaggggtcaaacatgcctcatcatacttctccagcataacatcacataacaaataaggaaagaaatcaaaatagtttaaccccaaatatatttccttgttatatcttgaaattgccctgcaaagtttgactcttgtgggaaaaatctacattctgtagagaatcctccttttcctcttccatttgcagacccaggagataatcaacagtcaggaacccttttaagtcccataagaaaacattttataacctattctctctgaagcctgctagctataaacttcttctgcacaataaaactttggcctccccagtcttttatcttaacccaaacatttcctttctattgatctcaggtcctcaaactcaaccaattgtcaactagaacattttaaaatttacctatagcctggaagcccccatatcgagttgtcccacctttctaaaccaaaccaatgtacatcttaaatgtatttgactgatgtctcatgcctccctaaaatgtataaaatcagccaggcgcggtggctcacgtctgtaatcctagcactttgggaggccgaggcgggcagattgcctgagctcaggagttcaagatcagccagagcaacataacaaaaccctgtctctactgaaaatacaaaacattacccaggcgtggtagtgtgcacctgtaatcccagctacttgggaggctaaggcaggagaatcacttgaacctgggaagcggaggttgcagcgagctgagatcatgccagtgctgtccagcctgggcaacagagcaagactgtctcaaaaacaaaacaaaacaaaaaaaaagctgcaccccaaccaccttgggcacataatctcaggacctcctgagggctgtgtcatgggccatggtcactcatatttacctaatatttctcttcaagtattttatagagtttgactctttttgtcgacataggtgtgagccaccactcccagccatgacctggcttttatgtcaaacttctacctggcccctatggcagatatcagatctctctctgtgaacattctagaagattttctattgattttagttgatacaaaagataaaacatatattccttctcaacattagatgaggttgcacattggggttacttggagagctcttaaaaaccactggtgtctgggtcccactgcagagatccccagaggcgcagcttggatgccgcagcctttgaagactccttggtgattcgactgtgtggccaaggttgagaatcagtgccccagatcagtgtgtgtcccacttacttgtgggtaggagcatcctagcgattgtgttacatggtaggttctgagccagtgagccggggtggtatctgagagcctacatttctaacaagctcctaggtgatgctgaggctggtgtaaagaccacactttgaggagcgaggctcctctgcaactcacggatcacaccagcctccacctcattatttcaacggagccttgaattgctatctccttctactaatgctcaggattggggatggatggaggcaagccttctagatcttcttctgtagcccccatagccaaaaatctgagtgattttgtccaaacttcacattgtatggctggcaaaagaggctcacagaggggaaatgactcaccaaggtcacatagcaagtttactgacaacaattgatctgggacccaggtctttttcattgcacttggctgtttggttaatcttctctgtggctcagaactggcagcccgcttcttggacacagactgcctgttgacaatgtaccacatacggtctttagagccccctgtgctatgtcctctggtctccacaatcccaggaggcagcttctattctgtctccattttacatccgaggaaactgatgctccggaaagggaggtccccaagaaatggcagaactgggtttggacccaggagtcctgtcgttccccagacactgacaagactcctcggttgctgtgaggattaaatggaatgtgctcatgaagcaagcagcccagagagagcctggcacctactaagggctccatgaagttcggcttcctacaatgactcgggtttttttgtttgtttgtttgtttgtttttgagacaaggtctcactaacactacctaacactaatcagtctatgggcaaagactgtgtcttattcaggtctatgtccccagacctagcactcctgggttctgcagtccttgcccccaggacaccaccccctccctgagaaccactcccttgctcctagcccagttctgaaggcagccatttttcactgcagagaccagccctgcccctcccgaatttaactagacgggaacccacagcgtgtcatacagcacagtggccccaggatggcagtagatgcccatgtgtaagatctctggcccagcctgagcctcctttaaagggtaatttacttgcatgtgtctcttcctccaggcccttgtccaggggctttccatccatgaaccaagatattccccacaatatccccatagggaggaattattcaccatcatttacacacgaaagatcatgttcatcctttgcccttcatggccgcttcctactctttggggaaaaaccaaaaaccttacatgcgtagtttaaacctatccagtagatgtccctatgggtcaggctgcaagagttcaaattccagcttccccacttattaccggtgtgactttggttggatttcttggcttctcttggacctcaatgtgctcatccataaaatggggtaatgaagtagaacccacctccttgcagggaggagtgaggattgcatgaaataatacacctaaaatgtacaatccagtagctggcacgcagcaagtgctcagcaaatgttagtcactcttattaccatgagtctcattggcctctcctcctgggagaaactaattgtcctcaccctctgcatcaggacctttaagaaagaagaatgtgggccgggcatgatggctcatgcctataatcccagcactttgggaggccaaggcaggcggatcactggaggtcaggagtttgagaccagcctggccaatatggcgaaaccccatctctactaaaaatacaaaaattagccaggcgtggtggtgggcacctgtagtcccagctacttgggaggctaaggctggaaaatcgcgaacccagaaggcagaggttgcagtgaaccgagatcacgtcattgccctccaggctgggtgacagcaagactctgttgaaagaaagaaagagagaaagagagagagaaaaaaaaaaaggaaggaaggaaggaaggaaagaaggaaggaagcgaaggaaggaaggaaggaagaagaatgtgggccaggcacagtggctcaagcctgtaatcccagcactttgggagccagaggtgggcagatctcttgaggtcaggagttcgagaccagcctggccaacatggcaaaaccccatctctactaaaaatacaaaaattagcctggcatggtggcgggtgcctgtagtcccagctacttgggaggctgaggcacaagaatcccttgaactcgagaggcagaagttgcagcaagccgagatcacaccacttcactccatcctgggtgacagagcaagagaaataaagagagaaagagggaaggagagaaagaaaagaaagaaagaaggaaagaaggaaggaaggaaggaaagaaaaagagaaagaaagatgaaagaaagaaagaaagaaagaaagaaagaaagaaagaaagaaagaaagaaaggaaggaagaaagaaaaagaaagagaaaggaaggaagaaagaggttgaaaagatatcaaatcaaaggcaaattaaactttaaaaagggccagatgtggtagctcatgcctgtaatcccagcactttgggaggccgaggtgggtgggatcatgaggtcaggagatggagaccatcctggctaacacagtgaaacctcatctctactaaaaatataaaaaattagccaggtgtagtggcatgcgcctgtagtcccagctactcaggaggctgaggcaggagaatctcttgaacccaggaggcagaggttgcagcgagccaagattgcgccactgcactccagcctgggcaacagagacatactccatctcaaaaaaaaaaaaaaaaactttac

SEQ ID NO: 96917 - DNA, 13377 bp, Homo sapiens
ttcccctgacctcgacacaagtacattcttgtcattcctttcactccaggattggagtctctccctcattatgctgggctgggaagaagcaaatggcttagtggtcagcagtgtggatttgcaaatcagaccacctgggttcagatcttaggtctgacagctgtgttaccctgggcaagtcctcacctttctgtgcctgtcccctctttgctgtaaaatgggggtactaatacttaagtcttcccttcccccacagttgctactaacaaacagaaaaacggtacccatgtgctccagggtcacctctgacctttttttcctccagatgtccagctcgccgctgtccaagaaacgtcgcgtgtccgggcctgatccaaagccgggttctaactgctcccctgcccagtccgtgttgtccgaagtgccctcggtgccaaccaacgtgagtgtcctctccgtggagactggcagacgaggtggtgggtgggaaagtcttttgtatcactgtctgtctatccatgctccactcctgtgtgtctccctaaacttgttcttttcctctattcctagggaatggccaagaacggcagtgaagcagacatagacgagggcctttactcccggcagctgtaagtggggccaaggccgggctgaggggtgtggaatgggacattgagaggataaggttgggtggggcaggccctgacctagagtaccccctaacctggcaggtatgtgttgggccatgaggcaatgaagcggctccagacatccagtgtcctggtatcaggcctgcggggcctgggcgtggagatcgctaagaacatcatccttggtggggtcaaggctgttaccctacatgaccagggcactgcccagtgggctgatctttcctcccaggtacctcttcctagcacccttccccctttcccccttcccgaggcaccactgttcccggtgccacagccatttcatctttttccctactgcacacccttacagttctacctgcgggaggaggacatcggtaaaaaccgggccgaggtatcacagccccgcctcgctgagctcaacagctatgtgcctgtcactgcctacactggacccctcgttgaggacttccttagtggtttccaggtatcttgggggtactacccagccttctgcccagttttctcagagcccatctctggtttattcagtagtgttcaatattgatttaatgggtcggcctgaatgtcaggttttgtgctgggggactagagtatgcaggcagcagttagcccctggccctgccttttcttttcttctttttttttttttgagacggagtcttgctctgtcgcccaagctagagtgcagtggcgcgatctcggctcactgcaagctacacctcctgggttcacgccattctcctgcctcagcctcccgagtagctgggactacaggcgcctgccaccacgcccggctaatttttttttgtatttttagtagagacggggtttcactgtgttagccagggtggtctcgatctcctgaccttgtgatccgcccgcctccgcctcccaaagtgctgggattacaggtgtgagccaccgcacccggcctggccccgccttttcaagtggggaagatgtgtacagacagtacagcatagtggttgtgggcacagactgtagagccatactgccttgctgcaggcctccagccttggtagtgtgacttcaagcaggttgtttcatctcctgtacctttgttttcctgtttgtagtcagtgcgtggtagcagcactgacttcatggactttttgtgagggttaaacacgtggaattgcagctggcatataaggactggatgggtgtttgttaattaaaaagtccaggccggaaagaggtgctctggaagctgagagttgtccctggagtatcccaggttgccagggcactgcagctaaatcctgatggaggagtaggagctcaccctggtggggaaggatggacattcaggcagagagcaaaatcccaaagatcatggcggagcaggcgtcgtcttgagaattggaagcaggtgggtgtggtaggagtgagctcagactttggctggagacagagttttactccagtgtctcacagggcatggcagacagacagcagcgggtgtttgtcaaataaatgagtcagctcttctccaaactccctcctcccagctacctcttcacctttcctggtatagtccaggggttcattttcgacccccacagagtctgatacacagtaggtgctatgtgtttgtgaaagaggctgacccagcaaagcctggatgtgtttgccttgaggactgcctgagtcctccacaccagccctccattttttccccttcaccccaatgctgggcctgagcctccatctctccacaggtggtggtgctcaccaacacccccctggaggaccagctgcgagtgggtgagttctgtcacaaccgtggcatcaagctggtggtggcagacacgcggggcctgtttgggtgagtggcagcccacctccctccctgtccccttttcccccaactcctaccaagcccaggccaagactctaggctctccctgccctcatcccttctcagctacccaggttttgggttctgtgttttcatctctccccatgtggcacaagtaccatcttacatcccagcagtgataggctgagtttgctcagcaagttttcactacatcttgagggacccgtgggacctgtatgtgcatgggacacaggcaccagccctattgcttccctctacaggcagctcttctgtgactttggagaggaaatgatcctcacagattccaatggggagcagccactcagtgctatggtttctatggttaccaaggtaaggagaccagccctagggttcctggcaggcaggtgggctgcagtagtccttcctgtctgctcttggtaccctgggcctgtttctgagactcactcttcctttaaccaggacaaccccggtgtggttacctgcctggatgaggcccgacacgggtttgagagcggggactttgtctccttttcagaagtacagggcatggttgaactcaacggaaatcagcccatggagatcaaagtcctgggtgagctgggaccatgggggaagcagaggggaactagaagatatgttcctgggttctggccggggagttgaagggagaagacatggcccttggttcagagttgggaagacacatcctggtgtttgagatgaactacagacaatcctgtggggtccaataagagctggtgggcatgggggagaggtactgtgtttgagctattcctgggagaatgtgtccctggtatctgagctgagtggggaaaaagtctctggtgtttgaacagggcagatcagcggatctacttgtgtgtgagctgatttggatgggaagcagagaaggtcttcccgtgtagacttggagccagggacacagggtctcacggggtctgagctgagtctggggcacaggagagatggtttctgatgtccaagtggagcctggagctgagggaagacagcttctgatgtctgagctgagtcggggcaggaggttccttatcttgcaggggttgtggattttagggagaatgggtagactgacagctctcttcctgccctctgtaggtccttatacctttagcatctgtgacacctccaacttctccgactacatccgtggaggcatcgtcagtcaggtcaaagtacctaagaagattagctttgtgagtgtgtcgatgggatcagtgggctgtggggggtggttctaggcattccctagttctccattcctctcttctggttctgatgacctctccccccgccacagaaatccttggtggcctcactggcagaacctgactttgtggtgacggacttcgccaagttttctcgccctgcccagctgcacattggcttccaggccctgcaccagttctgtgctcagcatggccggccacctcggccccgcaatgaggtgggtgagtgggcgagccagccagcgcagacatgcctggcactgcaggctcaccatgcctctctgcgtgtccacactccctgccctcactgtggcctgacatatcctctcttggttctttctggcccaccaggaggatgcagcagaactggtagccttagcacaggctgtgaatgctcgagccctgccagcagtgcagcaaaataacctggacgaggacctcatccggaagctggcatatgtggctgctggggatctggcacccataaacgccttcattgggggcctggctgcccaggaagtcatgaaggtcagcacgggtggggagaggcaggattggggtgggccaggttcctccatgactctgtcacttgctctctgtctgtgtcaggcccctgttaaccactgaccaccccctctctcccttcccctctccaggcctgctccgggaagttcatgcccatcatgcagtggctatactttgatgcccttgagtgtctccctgaggacaaagaggtcctcacagaggacaagtgcctccaggtatgtgggtgggacctgtggggagggcatcattggggacatttctggggaggcctctctaaccctcctccctttgcattccttagcgccagaaccgttatgacgggcaagtggctgtgtttggctcagacctgcaagagaagctgggcaagcagaagtatttcctggtaagtggtccccttggatgtctgctcccctcatcttggcctctggccatcacccctggggcttccttcggcatctcaatgcaaccggtggcgcattctctttgccattctccttatcttgaagggaagcccagtgcatccctcgtttccccttctggtgcctccttcctcacatgactgcgtgtcatttcttagagtcctgcaacctgaagatgtggtgttagcccctctccccgtctctcaggggagtgaggggtgatgggtagcttcacactaacctgcatcaccctgaccagcctctgcctgtcttcttggttgcttcttaggtgggtgcgggggccattggctgtgagctgctcaagaactttgccatgattgggctgggctgcggggagggtggagaaatcatcgttacagacatggacaccattgagaagtcaaatctgaatcgacagtttcttttccggccctgggatgtcacggtgagtagggtaggaggttggggctttgtcgtctcactttcctcctttttcttttttttttttttttttgagacggagtttcgctcttgttgcccaggctgtagtgcagtggcgtgatctctggcccaccacaacctctgcctcctgggttcaagcgattctcctgcctcagcctcctgagtagctgggactacaggcatgcgccaccacgcccggctgattttgcattttaagtagagacagggtttctccatgttggtcaggctggtctcgaattcccgacctcaggtgatctgcctgcttcagcctcccaaagtgttggtattacaggcgtgagccaccacacctcacccctcctttttcttgttcccattctttctgtcagagatctttctgcctctgccagaagcccttctttttggcctttctttccctcagcttctgtttttttttttttttttttttttttttgccttaacctctttttagtgctggttgggacagtgtgtctggggtcctcaaaactactctcaagctcaattcacctagagtacttacaggactcagcatatagtcgtgcttgtggctacaatttattacagcaaaaggatacagaccaaaatcagcaaagggaaaaggctggtgcaagtttctaggagtcttctcccagcgggagttaaacaaggcggcctttatttccccagtagcaacagtaactacagaaataacagcaacaaggtgtaacaagacatgaaatgttgccaaccagggaagcttgttagactcagcaccacctcttttacttggggctggtcatgtaggcgcccccttcctggcacataacaaaatttccagactcccagaaggaaaggtgttcagcgtaaactgtattgtttgcatgaacggtttaggcacagtgaaccactgataccaggtagggagcggtgggaaccttcctgaattccaagttcccagacaccagccaaggagccgaccttggaagcaggcctttccaagggttgtagtttcagtctcctaggcttacacttctctgcacatatggaaactgggttggttatgcagggttctctgagaagctttctgtaaggagcagtgtcgtttttgcttacccaggatttattccccctttcatttatttcatttattcaccagatagttttagtactgttttaggtattggggatataccaaggaataaaacaagattcctggagggagaggggaacggacagcaaacaatagacacaatacgatcgtgaggtatatagttaatgttggtgatgagtgctcctcaaaggaaacaactaaaaccagacaagggaagtcggggtgtcagggagaatggtttgtagtattgatgacaatggttaaggaaggcctgagttctgcaaagacctcaaggatatgagggactagagtgccctctgctgtggaagagcctgcgcaaagatcctgaggtgggaggggtcagggagccaactcattttacggtaagtggaggtgggatccaggggaggattctgagcagaggagggacgtggcccaatttgggctttgaaaggatcctgcttgtctgtgtgccagcatcctggtggtggttgggggagtctgcatcaatcctgggtgctgttacctgaaaaaatagcaggtgttagacgaaagaacagatgtctggcccattgtctccagtctgttcctgtccacagcttccctttatgctgagcccctgccacatgcatcatcatcctggccatgtggcattgtcacagaccgtctctcctgctagcctcctaactcagggcctgggtcttccccagcattaagtaaatcagtctcaggcagacagccctttataggtgtttgggccaggtgcggtggctcacgcctgtaatcccagctctttgtggggccgaggtctttgagctcaggagttcaagaccagcctgggcagcatgacaaaaccctgtctctaccaaaaatacaaaaattagccacgcatggtggcacacacctgtggtcccagctactcgggaggctgaggtgggaggatcgctggagcctgggaagttraggctgcagtgagccgtgatcatgccactgcattccagcctgtgtgatggagagagaccctgtctcaaaaaaaataaagatgtttgttgggtgaatgcacaaataagtgagctttgttcccccatccccaccctggaactgcactttcttaaccctttagaagttaaagtctgacacggctgctgcagctgtgcgccaaatgaatccacatatccgggtgacaagccaccagaaccgtgtgggtcctgacacggagcgcatctatgatgacgattttttccaaaacctagatggcgtggccaatgccctggacaacgtggatgcccgtgagtttggaggcgggtgaggtggtcacgggcaaagttgtgtgtgtttcggtgtgtatataccaagaggggtgtccgtctttctgtcctctcctgatgtttctttcctagctctcgctttgtgctccccacaggcatgtacatggaccgccgctgtgtctactaccggaagccactgctggagtcaggcacactgggcaccaaaggcaatgtgcaggtggtgatccccttcctgacagagtcgtacagttccagccaggacccacctgagaagtccatccccatctgtaccctgaagaacttccctaatgccatcgagcacaccctgcaggtgataagctgtgggagaagggaaagaggccaggcatctggccaggctgctgcctctccgcccccaggcccttgccttgccttcagatgttgcatgcctaagtgtaagatgtgccttttctccaaacctccctccctcacttcccaccaggcagcctaggtttctagaatgactcattcttttttcacttttattttgatttttttttcaacacatagacaaatattaagaatattatgatgaatactcaaataccattcctcacctaaatttaacaattcttaatgttttgccacattttcttcttagatttatgtagatttttcttctttgtgcttaaatgtgtcacagacatcacagccctttactccctactatttcagtgcctctgccaagtgaggatatgttgctgtagaacagggtttcttagcttcagcactactgacatttggggctggttatttatttgtcatgggagaggggatgtcctgtgcactgtaggatgtttctcagcattcctgacttctgcccactagatgccaatagcactctccctccatcatgacatctcaaaatgtctccagacattgccagatgtccccaggggtgccacatcactcccagttgagaactacttctgtctaacagaaacatcattttcatgctcagcaaaattaacaatcattcttaccatctcttctagttatttatttgtctctaatggtccatattcaggttttccccagctgttactcaaaatgagtttaacagctggtttgtcaggatgattctgtgtgtatggtgcatttatctacagaacagtgcatatattatctagctcggggtgtccaatcatttggcttccctgggccacattggaagaagaattgtctcgggccacacataaaatatactaatactaacgatagctgatgagctgaaaaaataaaagaaaaaaagatccgtgcataaatctcataatgtcttaagaaaatttacaaatttgtgttgggcagcattcaaagtcatcctgggctgcatatgggccacaggttagacaagcttgatctagctgaagttttacaaagtgaacacacaggtgaccaccacctgggccaagaaacagaacctagggattaccattgtgctgtcagaataattcttagtgcagtgtttgaggccaaaccatttagaatagtaggagtatgagggtgggaacaaaatagggaagggaaaaaaaaaacagttccatctgtcactttctcccttctgacactgcagttccagagtgggtatgtttgtatttgtgcaccaaccacagtcttgctaggtcatgtgtaaccttgaacttaacctctctgtgccgcagattcctgttctgtaaaatgggaatgacagcatctacctcacaggactattgtgaaccacttggcatttactgtgtgcctggcactgttttaaccaagctttaaatatatatgtatttgctcatttcttcctagcaaccccatgaaggtaggtatcactgttgtaacacctgttttagagacaaggcacagaggtaaagatgttatcctgtgtgcctgaagtcacaaaactaggtaatacgtggcatagctggaatctgaacctgaatttctaacatctgtacactccaaaccacctcgctaatgactgcgaactgtcctaggaattctcagaggccagaagttctgtcttgtttgctattttattttttgagacaggtctcattctgccattcaggctgaagtgtattggcacaatcatagctcactgcaaccttccaactcctgggaagtgtctgtacgtgtgtgtgtgtgtgtgtgtgtaagtgtctgtgtgtacgtgtaagtgtgtgtacgtgtgtgtgtgtgtgtgtgcgcacgcacgcgtgcccgttacgttgaccaggctggttgtaaactcctgggctcaagtgatccacctgcctcagcctccaaaagtgctgggattacatgtgtaagcctctgtgtccggcctctgtcttgttttctgccaagtcctcagggcctggatagggatcattgttggtttggtctgagttttttgtgttttaaaaaactgtggtaagatatacctaattgaagtttttattttttatggaggcataacatatctagaataaggtacacagatttttttttttttttttttgaggtggagttttgctcatgttgcccaggttggagtgcagtggcgcagtctcggctcactgcagcctccgcctcccaggttcaagcgattctcctgcctcagccttccaaagtgctgggaatacaggcgtgagccacctcgcctggcactcagatcttaatacatttttaggctgggcatggcggctgacacctataatctcagcactcaggaggccaaggagtgaggtttgtttgagcccaggagttcaagaccagcctaggcaacatagcaagaccctgtctctacaacaaatcttaaaaattagccgggtgtggtggcatgtgcctgctgtcccagctattcgggaggctgaggtgggaggatcgtttcaacctgggaggtcaaggctgctgtgagccgtgattgcatcgctgcactccagctcgggtgacagtgtgagactttgtctcaaacaacaaaacaaaacagttttccacatacacagcactattgtaaccactgcccaaatcaacttcattgatttttctttttttgagacagtcttcctctgtcacccaggctggagtgcaatggcatgatctcggctcactgcaacctccgcctcccgggttcaagagatttcctgcctcagcctcctgagtagctgggattacaggcatctgccaccacgcccagctactttttgtatttttagtagagatggggtttcaccatgttggtcaggctggtctcgaacccttgacctcaggtgatccatctgccttagcctcccaaagtgctgggattacaggtgtgagctactgtgcctggcctggtttttcaattgaggtgggggaatggggaaggctagagggcttccccacttccagagtagctgtgcgccttgtacttgctttattcactgatggtccttctaataatgcctgcggaaacccattttgtcaactgtggccacatgtaatctgtttgctctgtctgcagtgggctcgggatgagtttgaaggcctcttcaagcagccagcagaaaatgtcaaccagtacctcacgtgagtaactcgagtgccctctcgccctgtccctgtccaccagccaaggcatcccggctgctttcctcatgacagtaacacttggcaccaggcacacttttcacatgaatgagtggctgttggggcctcatgttgtttggggtcgggactagttttccatggagaaagtaagattgctctggagcccactcttgaggctgacatgtaatcctatcctctgtcctcttcgattcctgatagagaccccaagtttgtggagcgaacactgcggctggcaggcactcagcccttggaggtgctggaggctgtgcagcgcagcctggtgctgcagcgaccacagacctgggctgactgcgtgacctgggcctgccaccactggcacacccagtactcgaacaacatccggcagctgctgcacaacttccctcctgaccaggtaatgcccagttgttgggtccatttggcagaatgtgtttccctgaaatgggagcctgcagtgtgggtcctcccactgtggagtccagctgtggcaggtgccctgaggcatggggatctgagaagagtgattgatcctgacctgctttttcctcaccctagttcctttgagcaaagaggcttggttgctattgcccttgactgtggtgtgggctgcgtcatacctgattcccagtcagggctgtagggattatgggggagaaattctggagttaagagcacaggaatcaatatgggttcaaatccaaactctacttgaacttaggcaaatcacgtaacttctctctgtacctcagtttcctcgtctgtgaagtagaaataatagtgatctatctcatggggggtttggggaggattaactggtatttattaaaatgaagttagtacaatgcctggtaatccatgagagtttgttaaatgatgggctgtttagcacaaaatggctacccagtgattggtaattgttctctcagccagatctctggttcaacctgtgggaccctacagttgaggtattttgtgattggctccagtccgcatcgagtgcccaacccaagatagtgaattgggggcacatctggggcctaggtgaagcgtgaagattgtcagagaggccttcactctcaggtcctgttctcaaaaatctctccatcccttagctcacaagctcaggagcgccgttctggtctgggcccaaacgctgtccacacccgctcacctttgatgtcaacaatgtaagtctcctttctagggtcttctggggtcaggtggagggtgaataggtgggaaggaggtggcggctccccactcgagggctgatgtgctcacccttccctgccctgccttctcctagcccctgcatctggactatgtgatggctgctgccaacctgtttgcccagacctacgggctgacaggctctcaggaccgagctgctgtggccacattcctgcagtctgtgcaggtccccgaattcacccccaagtctggcgtcaagatccatgtttctgaccaggagctgcagagcgccaatgcctctgttggtgagggtgtttggccagttggccaggagtcaccccacatgtccccggcctagtccagcctccccaccagtcctctacccctggttctgctctgctctgtgaccccaggcctgaggtttacccacaccttcctttgagcctccctttgacatgaagagggtaggttggggcaaattatctccctccctcctcctccttcccactatctggccctcaggagaacttgctgttttactcttgctctgtgtatttcccttagttttgttctttcttctgtttcttcttgatctgttcatctaggaggtatgatctctaccagcagtctctctcccttgatactttcctgccttgtctccttccagatccgcccccatctgtacatctacctgcatgtttctctgtgcatcttcaccctccatagtttggggctgcggtttactgacacccccaccccaccccatctgcatattttttcaccacccctcccttctgtatatgatgcttctgtagctctgtaacgccccctacatttaccttccttatatctcccccgtcttcctctccatagatctcctcccatttccccttccatggtccccatcttccttctgaaatgtctactccttc

SEQ ID NO: 96918 - DNA, 15741 bp, Homo sapiens
tagagatagtattacttctttctttccaatttggatgccttttgtttttttcttgcctaattgctctggctagaacttccagtattgtgttgagtataagtttctaatcttaactagaagttatgaaaacagacatccttgtcttgttcctcatcctaggggaaatgctttcagtttttcaccattaagaattatgtcacttgagcccaggagttctagaccagcctgggcaacatggcgagaccctgtctctacaacaaaaataaaaaattagccaggcgtggcacgtgcctgtagtcccagcaatttgggaggctgaggtgggaggatcgcttgagcctgggaggtcgaggttgcagtaagccacgactgtgccactgcactccagcctgggcaacagagtgagatcctgtctcaaaaaaaaagttatgttagctgtgagtttttcacatatggcatttatcatgttgaaagagttcttttctagtactagtttgataagcgtttatatcatgaaagggtgttggattttgtcagatgctttttctgcatcaattgagatgatcatgtggttttttcccccttcattctaataatgtggtacattactttgattttcatatgttgaaccacccttgcattcctaggataaaacccacttgatcatggcatataatttttttgttttgttttgttttttgagatggagtctcgccttatcacccaggctggactgcactgtcgcaatcttggctcactgcaacctccgcctcctgggttcaagcgattctcctggctcagcctcccgagtagctgggattacaggtgcatgctgccatgcctggctaatttttgtatttttagtagagatggggttttgccatgttggccaggctggtcttgaactcctgacctcaggtgatccacctgcctcagcctcccaaagtgctgggattacaggtgtgagccaccacgcctggcctgcaattttcttttcttgtagagtcttagtttcagtatcaaggtaatgcttggcctcatagaatgagttgggaatgttctctcctctttagatttttggtaagaatttaagagaaggattgatgttattctcctttaaatgttttgtaggattcaccaatgatgccacctggtggtaggcatttctttgctgggagttttttgattaccgattcaatctcctgacttgttacaggcctattcagattttctatttcctcttgagtcagttttggtagtttgtgtgcctctaggaatttgtccattgcatctagagcatctgattttttaacgtgcagctgcttatagcagtctctcatgttccttgttttcctgtgaagttggtgttatgtgtgtgtgttttgaagggtcattctcagcgcctcagatcacccaccacttccatttcaaggtcccaggaagaacaatcaaatgtaatgagtttccacattgagtgggccacttgactcctcagcccatcctcatctgcctcaggacaaaggtggcagtgccacccccaggctcaggctcagaaatggggtctgtatgtgtgtgaaaccaggaactggcagagactttactgagcactcactgtgtagcaggctcctgctgagggctttccagacactgtctcttcactcctcacaacatctctgtcacctcagtcctgtgactatccccacttcacaaaagcaaagactgaggctcagagacatgaattacttgaccaaggtcacacagccaacactgagcctgtatttgaaaccagatctacccggctgtgcatattttgactactgtgctgcacagcctattccttcccaagggagaacaccccagaatggggcaaaggccaaggaattcaagctccagtttttacccccactccctgaaaggtgtaatagagcagagcttctccaagtacccatgcagaggagccctccatctgctgccatgcagagcaacagacaccctccaccaattacccatgcagaggagccctctgctgccatgcagagcagtaaataccctccacccactgaccagaggcccccatggaaaagcacagtgcagaatagcctgagggtacacaccagcagggtgtgcatgctcacgcaactgtttgtatatgtaaaacaatttctggaaagatccacagaaactgctaatggtggtttcctctgaagaagtgagttggaggacaaaggtcagggagtggaaggagacatacatctcacaccattccctgtttgtacttctgttttagatttgtaggtacacatactgttaggcacctttaacagcttcccaggatcacccagtccccagccctgaaaagggcagagccaggctcggggaattgtccccactctgcctcatggtcatggcatttccctgtgccaggacacattcccagcctcaggcccagggggcaggacagcctagtggactccaggctgtggagtctcatggatcaatgactaccagctctgtgatcctgacagagttacttaacctctctgaactcaaattcctcaaatatacaatgggaatgataatacctacctcagaggattgttatgaagattaaaagaggccgggcaaggtggccgatgcctgtaatccctgcactttgggaggctgaggcaggaggatcatttgaggccaggagttcaagaccagcctgggccacatggcaaaaccccatcttcacaaaaaatacaaaataattagcctggcgtggtggtgcatgcctgtaatcccagctactcagaaggctgaggtgggagaatggcttgagcccaggagcttgaggctgcagtgagccgagatcactgcattccaacctgggtgacacagtgagacactgtcacaaaaagaaaaaattttaaagatagcacttgataagcagagggtctgcctgacaggataagaaatactttttatttatattatttaatttattgatgttaatattgataatattattgccccaccaccattaaccaccagcccagtcttcccgggaggcattcgcgctgactacactgtgagaggctaggataatagtgccccctggtggacatcttttggactgcatctgatgagtacctaccatctagtaccactagagaaagaacaggagtcaaaattcagttccatttcttcctttttacccctaaatattaggttggtgcaaaagtaatttcaaaaaactaatatctcacatgtacttcattagatactctttcataacagtaaaataatcaaaaccagaaaattgaacatcggttgaatagtattatctaatccacacggtccatcctgacattctgctaggtgtccctatggtatcctttatagctaattgtttcatggtccaggacccctccagggtcacacatggcatttgattaccacatctctttagtatcctttaatcctgaaccatttctcagcttttctgtatctttcatcaccttgacattgttggagttcaagccagttattttgcaaaatgtccctcaatacggatgtgtctgtctgttccccttggctggattcatgtcccgtgttttcgttaggaatttcccaggtgttgcactgggtccttcccattgcatcatatcgggagacatggtgtcaatttgttccagcaatggtgatgttaaccctagctcccccgtctgtcagcttggggaagctaagctcccagggccagagaggagctgagactggcctacagtcacaggaaagtcaggatcctcagctcagggtcttcacgaatgcttaggataaatgcagccaggcaagaaattgatcaccggcacctaggcctcctccagatcctaactccataggagcttaagggctgggtaaagcagtgttggccttcatcgcatcgtcatgtaagtctagctgcttggagtccccctttctgctttgtccatttctatttttcattaagactttttcattccacaaatgatatgcaaatgcattatccttgtcttatatatatttcagccaaggctgaagtctcctttgaaagttccccttctcagtctttcctcccctagtatcagtttgatatgagacgtctatctacaaccccaggaaaaatacaaactgtagtgttctctttccatgatggtcacattgtataagtctgtcatagaaatttccctagcagggcttggagactgagctcattactttcaactgaatcatcattacagtgaatggatacactggaggttacctagctgagaccctgtggatggacatctaggttgttcccagcgttttcctattgtgaaacacactgccctacacgcatgatccaggcttctccaaggtaactccccacctctagaagcccaaaccactcctggggcaccagatttactgggtggacatccccgtggggggtgaggaggggctgatgggctgctactcattcagcctattagaactgcaggacttttaggacctctggaagcaactgggctgggttttcacaatgtgttttgagaaatcttagggttccaagatagcctgagagacagggaggaggtgagctgggaagagtccagagcttcactcccactccaaccacagagcacccccacctttacctggttttcaattaagtgattctttcaaaacagaatctcagctgtatgtaaattcaaaaatccctgttgcaggctgacccctcagttggcacagtcacctttctgcaccatgcctctggatctgctcttgtccatgcagcctccagctgtgttcttgctggtgagggccacctgacccaaaccaagctcccagctgacgaactgcaaagagggctctgcaggtgctgcccttgtgccatcagaggtggcactgtggtatttcactttgaacatactgggtcctgggaagcaggactgcccagctgtgtccccagcatgcccctcctctgtccctcagaagctgtgcacatttctgggtaccgtctctgacaaacatggtggcctgattcagtgttcccaaacttccctgaacaccaaggagtctgttaaagtacacagtgctgggtcccaccccagaggttctgagtgagcagattttgggggagcccaggaatgtatattgtttaaagcttcccaaggggattctgaaggagcatgtctgatcacctgcattgcagacactggcctgggcccctacctgtgaactctccttctccaggcaaatctcgagtctggccctcaattaggctgtgagggcttcagtcatttgttttaccctaagttttcctggacagtggggctctccgtattaattagaacccataggaaccatggatctgagtcagagtttcccactctgagccagagttacactgggctgcctcagtgtactggagggctccttataaattcctcagtgtactggagggctccttaaagatgttgggccccaccccacatctgctggagctgaatctctggaagtagacctgggaatctgcatgttttaggcaagttcttcaagtgaggccatggagtccaactccctccatgcgtctaaaaggtgagggaaatgggataaaacagtaaaagtggcttgcccccagctacaatatacattagtagcagaaattgttccagcccccaagtctcctctcggtccagtgcccgacacccagggcttctgagcaatccagcttgtctgagggcttctatcacctgagatgccccctgtggctgccctaggataggcctctgctgtatctgggaaatcttccacttataacccagtgaaaatgatctgcgttgaccaagtcaccatgtgtataggtgtgtacatacatgtgggcacgtgtgcatgcctgaggtggcagggacaagcgggctttggccgtgcatgcaaacacccctactccacccttccctgcgggccttgcaaaaaggtcagacaggaccaaggtgtacaaacagaaccccactttattagcagttagttygagattgtacattaatggaggaaggtctcacctttaacacaacccaaaacggctggttcgagagccctcatcaggcgaactggatagcaccccctctccccactctycccacccccctacaagggaaggaaacctctgcctgcttccccagtgtgccccccaccctytccagtcggccctctcctctcccaggaaatgacatgaatttcatgcacaaattacaaaaggagccctcttgctaataataaaagctaacacagtcatagaaaaccctctcctccctcattctcctccagggccggaaacagtaagagcaggagggatgaacttcttaggataaaacgcatccagtttcccccaggttcctggcattgaccccacaaaaccctatgccagtcccttagggaagctgaaaactcgccagccgtctgagctggcaagggcagccagcccacagctgtcaagccaggaacccagtgttgcctcaacggcctgggcagcagggggtctaggccgccccctcatcctcacatcaactagagcagaggctgcctcctttgatgtgtgaaaatccctgctgtggcccctatctgctcattctacagatgaagaaactgagggcctgggaggaagatggtcaggcagctactaaatgcacccggctgggatgaaacttcacagctcctgctgccagccagggctcttctcacaccacagcttgcgggaggcagttccccatgtaggcttttccctgctgcaactgagagcctggctctgctccagtgcacacagaccacgggtctccaggaaatgaaaaccctgggaccccaaaatagaaagagagagacatatgatgtgtttggtgccctgtggcccatccccagggtcgaaggcccagccttcaggcatgcagcctcctccttccagagccctgtgtccttccttccaaggcccagatattacggccttctccagggagactttccggcccccccagagctcttgctctaactggcccctctgctgttttggcacttggtacaggtgacagtggaggcgcatcttaggcagaagtgaagctgtcaagtcagcacaaaaggcaaaatctcatgtagcctaaattatccttgaaagtacaggggatagaagaagtggttatgcgacaccatgagcaaacaatctgacaaattcagaatgtggggcttcaaaaagacagcaggcctagggcctcaaaaacaatgtcatttaaaaactcaaagtgagctgagggaagacctttcagcattcaaagaggttttaaaaacatagttagaaaatgcaatgtgtgcaccgtgactggatgctgattccaaaaccagacacataagttacctgggagacaattggggggatttgaatacagattagatagcagacatcgctgggaaatgacttctcgtcttggctgtgatactgggccaatgtgtaggacaatgccctaactcttaggagatgcaggctgaagctttcagggatcaagtttcatgatgtttgcaatgtacttttaaattaggacagagaaaacatatacatacacagagagagaaaaagaatgtggcaaaatgttaataattttagatctagatgctggggagtgggcattcataattaaatgtttggtaaaacattgttgtatttgcttttcccactaacaagcccatgggcacagctctgtgctgggaccaccaacctctgcaggtcagcgcagcagctctcctctgctgggaacagatggcttccttagctgggcccagaagcactgactgctcatcaggggggctcagaaaaggcccatttttaaacttcrgactcatcctccaagcagcaggatgctccaccacagaaggctctggaactctgaatgactgaggcagctgcaggtgacactcgcacctgcacccaccctggggcaaaggctcatggaggggaccacagaatagacgatggagccacctgaacaatttcagttatttctctctcctttttttggccaaatgcttagagtgaattagtggacattgaagactggcctcgctggcccactcatctgtggcttctcttctcgggagggggtgtccttgtacccattagctaacagccccccaggcagcttatctgcctctccttctaccccccatacctgcaagtcccggcagtgtctggacctagtgggtcttcaagaaaggtctgttagtgggaggagaagtggcagcagtgacctaggcagacagacttggaacatgtggcaggtccagtctccaggcttgcagaagggtccaggcaaaaatccagaagatctctgctgtcacaggatttccaaccgcctgctccttcccatagccagaggcagagagaagtggagctcctgccctaggccagcccacctctcctgccttccatgctctgcgagagaggcctccaggcctagagggtagatttccgaacctgggagctgtaagatcctcacccatcccgcagcccagtcccctcactgacggatgggactctggaagtcactgcccctctctgtaagcccctggctccatggcgtgggcatgtcttcatgagcacacaagcagacatgccaccctgtcctcagaccctttgctgctcatcctgctggcccaacgatgcccaagttcccaggcttgcaggccccattgagaggcatgatggggacactgctgtgtacacagtgaaaccacctgcagctggtcccactgagtgtccaactttcttcatcccagcagagaactggagaaaagggaatcagctcagaacagacccaggcccccacaggctggggaaggacccctcgagggagaacacgacagggatgcaaacgcagacctcggaatgagaaggctcaaaggcaccctggctgggaaggagtggtttgtccccatatcctggaatgaccatgctgtgacggaggaagggacaggaacctggcacagagtagggtcccaaggatgggctcagaggcagtgtggcattggaagaggagcacgatgggacttggaaccgggagcctcgggttcaacgctcagccctgctcccagctggctccatgacgtcggccaagcaggccacctcccctttctggacctgtttcatacccgtcaaaggaccttccagccccaagatgctagagtcttctgaacaagacaagcctctccagaaagtatttcctggggttcagagggaagcagaatttggcagttggagggggccagggagaggcaccccagcctcagtcacttcacattgttaaatggggtggggtaggagcagaccccaaccagaaatcagcccagagatcccactgtctacaagggcctggagacagttctgtgggccttggtgggcatcccagctctcagggcagctcccagcctagcaccatgtgagggagagtgggtggggcagcttttgaccccagctctcctagcccagccctggctgtttcctttggccaaaatcccctcagggtcactggacttcacgcagcccgatgtcctggagagagctggtcttccctgcgcatctcaccacctctgttcacctggggtagccccagagcagccacggcactggggagggccccttcctaaggtctgctcagccccaggccactgaggacacagcctccctccctgccacctcatctctagctctaagacagggtgacccctgagactggggcttaccaccattttgtaggactgaattaaaaacgaacccaaccaaaaaaaatagaatatatatatatacacattatatatatatatatatatatataacacagtgcgaccccagcacccagggtataaactctggcaccaagaaaaaaaaaaacaaaatattaaaatattttagcttcttagtatttgggaggttaagggggtctctgagagccctcggccacaggtggctaagcaaagccgtggctggcagtctcaccagctcgcccatgtctgcctgggcctgaggctgggagggtgtggggaccgtgtctgtacatgggaacatgttactggcagacccctggcctgcctcagtcttttaccacaggaaacaccacacatcatatcccagggggaagaaaggggtgcaggtggggcccggagaactgggcccgatggcaaggcagtgccccaaggccctgcgggaagccttgaggatggagtggatactgtaggaaccagaaattcttccccagaacgggagggtgagatgtgaaggtaggaaccagatgtggaggctgggagtcctcttgagggggccaccctcccatccagcctaggactgactccggggacccagctggccccttggaagagcctggctcgaaacagggaaatgtccagtctgtctcccccggccaggctctcctcccctacagcctggaggacagggacatatggcagcgaatactgaggggcgccctgcggaagcagggagtgatgggtgacgagaggggacagtcggcggaacacagtgagggacagaaaagagtctcgtggactccctcctaccaggaagcggcctccccaggagcagctgggaacggaatggacctctgctggcgagggaggtcccttaggccgcagacccagcggtgggtgctccgaggtgcttgcagatccgcctgggtgctcccccagccccaccagacctccacagagtattgctcataagtgcgcagctgccctggtccagcttcccactctgcaggtctggctcagcgtgtggtgggatgtcccagctttcacaaacgttcagtctggctgtggtggccacggctacctggtgttctggaggtcctctcgtagccaagtgggaagtgtctggcccatcttatacagcagcttggagagctcgatgttgtggtcccggtaatagtccttcaggaaggctcgggactgtaacgggaaggaaagctcagaccttgtgtactgacttaagagtgacctcctctaaaaatcgccatgctcggccgggcacggtggctcatgcctgtaatcccagcactttgggaggccgaggcatgtggatcacctgaggtcaggagttcaagaccagcctggccaacataggaaaaccctactaaaaatacaaaaattagcggggtgaggtggtgggcgccagtaatcccagctactcgggagtctgaggcaagagaatcttttgaacccggaaagcggaggttgcagtgagccaagatcacgcgattgcactccagcctgggtgacaaaagcgaaactccgtctcaaaagaaaacaaaaaaacaaaaaacccaccatgctgctggcaccaccccccatacacctcttatttatccacaatctccttctaaatggtagcctccaatagtgaactcccagttggcaggagcatcaaaatatagctcactaagtcaaaattcttctgatagggagaggagagagaattaataatcaaaacccaaggcgggcagggccagggccaggcacggtggttcacacctataataccagcactatggcaggctgaggcgggaagatcgattgagcccagggggtcgaggctactgtgagccatgatcatgccactgcactccagcctaggcaacagaacgagaccctgtctcaaaaacaaaacaaaacaaaacaaaacaaaaacagaagcaagtaggaaaaggaggaagtaacaagacccccagtctgtgaccctttttctatatatttttaaaatttcttttttccccctatggttttacacatgctgttcttacctaccctcccattccatatgtccaaatcctacaaaatggatctcatccttctaggcgcaactccagagacccccatccctcctttaaggagccttttttacccctctcaggttcaagtgacatccccttgttctgaattcccatagcacttgtgtgccctctctgactgcgcgcagcactctctgcctgtattctacttagtggtgttgggactcatacccctccaagaccaggagttccttgaaggcagagaacatgtctggctcatcctcaaaaccccacagcactcagcccttagtagaaggtaaccaacacttgtttgacgaaatcaggtctgacccaccatgtcccagcccccattttcctcctcttacaaatactgtccaagaaatgctaaggccatgaacatgctgagtgcatggtaaaggaaagagaatccccctcaactccatacagggaccccttacccttatgcaggtgctacaggtagtgtgtccaccacttacatccaagtccatctcgggatatttccggcccttgcttttgcccagacacttggtttttcctccttcaagcagttggcaccaaaatcctttctttggatcaaacctgtggaggtgggaaagtctttggatgggagctggctcagccacccacttccgaccttaaagccatgttcatggaccccaggaatggcagagcccagggaatctactgctcttgaacccacatggactgtcagaagctatgtgccatctgtgggatcaaatgtgtcctaggctgcactaaacgtgcctgtcctacttccggcaaagggcagctcgcacattctgagtcttctctcctccagcccgaccagccacagccgcttcagcaatctacaacatgaacagtttcccatccttcagtgttctgggaaatcttttctgagcattctcaatgctgagtaactcttttttttttttaaacccaagaagccttctttacccctcccagcgtcaatgggaagaggggtgtttagtggaggttcttttgctttttaataaatttcatctttatcaaaacatgcagtatccacagctgcacttaagcatgcctgtcactggagaatttcattttttggagtaaacttcagaaatgacacagcaagactgccaacatcatcctgtcttcaaaggcatttttgggatatgagatccgaagctgttatgggaagggaggaatactgacatcagaatttagccctggatgaggaactatgaggagattcttgagcatgagggcatcaagaaaacagaattcccatgaatagcgaaggagaacagagatttctgaaagggtcataggataggtatagacgatgacgatgatgatggtgatgatgatgatgacaaggacaatagcagctaccgtttatttagcacttagtgcatgccaagctctcagctaagagccccacatgaagctttcattcaattcagtggccttcaggacgcagggattattatctttatccccaacttacagatgaggaaagcgaggcttgaaaggctgaagagatggatgtggggccctaacccaggcatctctgacaccatggcccacagcctcagcaggtggccccttctccctcaaggtgaaggactgacttcccttctccaccttcaactcccacgacagtgaagacggaatattcttgttgcaaaactttcccaagaatggagccaaggagggtgacttgattcctccttctcttggggtcccctcatccagctgagtgtgtcacttatctgtgacatagcacaggaaagcagcctttcctagccctgagcccatgcaatgcgggcaggcctttactcatagtgggagggcattctcaacgcacttgcaccaggttctgagtgagtacggttattaactgtcaacaacatttgtgtttccttttcctgaaatcgtaagtcaaaatctaatgctggctgggggcggtgcctcatgcctgtaatcccagaactttgggacgctgaagcaggcagatcattcgagaccaggctgagcaacatggtgaaaccccttctctacaaaacatacaaaaattagccaggcatggtggcacatgtctgcggtcccaagctactcgggaagctgaggtgggaggatcacttgagcctgggaggttgaggttgcagtgagccaaaatcacaccactgcactccagcctgggcaacagagtgaccctgtctaaaaaaaaaaaaaaaagctaatgctaagaaaatcttgtgggaattagggctgctcattactgatctaatttacttacataaaacactctgaaaatgttcagcccagaccaaagagaagaccccaggatggtctgaccagagtagaacagattcatcatctcccttttttttaaggtgatacctttattaatatgacttaagtcatattaataactttccatactttctgactctaactaacttctctctctcataattattcaagactttggctttgttggcccaggtgccttatcagggaaataacctgcagaaaggaaaaggcaacactcacgccaaggttttgtggtagtcaatggtgttggtcaccccaaggaacttctgcaccatgtccatcactttggcaggttctgtgcgaagcagtttgccatccaagaccagaatctggaaagggagaaaggggatcgggacctgctttgacttcggtggcaaacaagggcaacagccacggcagcaggaatgggcctgcttataaatatgggaccctgcaccctctagaactggctcctcctcccctgttgaagggcaggtatccccaagctcaggcctctgtggtctcacgcctgctttccaccagcttctgctgcccaatgccatttctcctagaatttaagctctcaccaaaccctgcctgcccctcaggtccctacaaacatccctctctggcctctctctgagcttccagtccatgtcactctcctgctcaaacactccgcaagtttgcctaaaaggcctggtatggctgggcatggccgggcacggtggctcacacctgtaatctcagcactttgggatgctggggtgggcagaggacttgaggtcaggagttcaagaccagcctggccaacatggtgaaatcccgtctctactaaaaatacaaaaattatctgggcgtggtggtgcatgcctgtaattccagctacttgggaggctgaggtggaagaaacgcttgaacccgggaggcagaggttgcagtgagccaagatcgtgccactgcactccagcctgggagacagagcgagactccgtctctaaataaataaataaatacataaacagcctggtatgatcaggctctccctccatcaccacgcccagtctccttgctcccacctgcctgcctcagggctttctgggtccctttagggctacagggcctgtggtgatgggacacaggcttggggagttctcatgtatcaaccttgggataaacaggtctacagtctttttaggccaggtgcagtggctcatgcctgtaatcccagcactttggaagaccaagggaggactgcttgagcccaggagtttgagaccagcctgggcaacatagtaagaccttatttcttaaaaaaataaaattagctgggtacagtggctcacacctgtagtcccagctactcaggaggcagaggtggaaggattgcgtgagctcgggacatcgaggctatagtgagctgagatcacaccactgcactccagcctgggcaacagagtgagaccctgtctcaaaataataataataataataaaatctttttatagacccaagggtctagctctccaaggagggcatatctgtccccacggctggt

SEQ ID NO: 96919 - DNA, 197645 bp, Homo sapiens
  misc_feature (1)...(197645): n = A,T,C or G
ctgctgatttttgtattttttggtagagacagggtttcaccatgttggccaggctggttttgaactcctgaccacaactgatccacccgcctcagcctcccaatgtgctgggattacaggagtgagccaccgcacccggccgagtttacccatttttgagtgtacattttagaggcattaagtgcattcacatgatgggatactcatcacaactatcctgaaacctgaaactattatgagaaaacataaggcaaaagtaccatgacattagtctgggcaataattttttagatttaatgtaaaaatcccaggcaacacaagcaaaaatgaatgaaacttctttcaactaaaaagcttctgtacagcaccagctacaatcaatgatatgatgagacaaccacagaatgaaaaaatattcaaattatatgtcggatgggttaatattgaaaatacataagaacttaaactatatgacagaaagatattaaaaatggggaaaatatctaaatatgtttttcaaaagacctacaaatgaccaacacatatatttttaaatgttcatcaataatcatcaaggaaaggcaaatcagaactgctatgaggtatcacctcactcttgttagaacgactataatcaaaaagacagaggataagtgttggcgaaagtgtggggaaagaaaaatgctagcacactgttggtatgaatgtgaaccaatacagccactgccaaaaacagtatgatgatttccgcaaaaaaattcaaaatagaactaccatatgacacagcaattttactattggatatatatccacaaaaataaaatcagtaggttgaggagacatctttatttcctaaatattgaaagaaatatttcccaaattttgaaatatataatatttgggaatatttgggaaataaatgtttctgtctttctcataaactcagtggaaaagactcaaaaataaagttttcgtgatgtttttgttctattagtccgtcatcagtacaggaactcaggtatttaccagtgtgctcagggcctagcacagaacatgggaaggactgaaatattttagaacttttactttaagcttgggggtacctggagctgctgttcctgatggtgatggtatagaaaacagtaaagaagcagacagtgctaatggtcccaatttggctattgtagaaacacagaaaacaatttagcaccccaaaatcactgaggaaattgttttaatccaaaagctaccatgatctctgagatgtctttagagtgaatggccaagcggttggctagctaggtgattaagaatgaagactatggactgccaactgcacccaatgaaacataggaagagatttaaaaagttcccaagattgcaaaaataaatctaaatgaaagattatttcaggccgggggcagtggctaaagcttgtaatctcagcactttgagaggacgaggtgggcggatcacgtgaggttgggagtttgggaccagcctgaccaacatggagaaacccggactctactaaaaatacaaaattagccaggcgtggtggtgcatgactgtactcccagctacttgggaggctgaggcagaaaaatcacttgaacctgggaggcggaggttgcggtgagccgagatcgcgccattgcactccagcctgggcaaaaagagtgaaacttagtctcaaaaaaaaaaaaaaaaaagattatttcaaattttaaatccacagaagtcattctattattgttcaacacaacacacacattcaaaaataggttctgcatggaaacataaggtgtgctgtaagtgtttcatagaaaattaaattcaaaattatccacttatcattaactctccttaagaatttctaagatacatttgctcttcagagatttccaaattctgacatgtttatttacacactgcttacaatacatagtccaatattattaaagctttacctattctaattaattatacattcaccacactttgtgtcaggattttaaaatattttcttttaacaaacaaacaatgctaactgcccgatttaattctctggcccatggacagtgcatccctctcctccattaagagtgttgcttggccaggcgcggtggctcgtgcctgtaatcccagcactttgggaggccgaggcgggcagattacgaagtcaggagatctctatctatttatatccttttaaacatctctcaaataagtttgaaaattttctccgtacaactcttacatattttatgtcagctatagacttaagtattccatatatttgatgcaattatcaatggtgtcttttattttaaaaacaattttctggccgggcacggtggctcacgcctgtaatcccagcactttgggaggccgaggcaggtggatcatgaggtcaggagattgagaccatcctggggaacacggtgaaaccctgtctctactgaaaatacaaaaaaattagccgggtgtggtggcgggcgcctgcagtctcagctacttgggaggctgaggcagaagaatggcatgaacctgggaggcagagcttgcagtgagccgtgatcgcgccactacactccagcctgggtgacagagcgagactctgtctcaaaaaaaaaaaaaaagaatgtgttgcttgtagctgggccacatggtggcacatgcctgtaatgccagcactttgggaggctgaggtaggggggttgcttgagcgcaggagcttgagatcagcctggaaaacacagtgagacttcatttctacaaaacaataaaaaaaattagctgggcatggtggcatgtggctgtactcctagctacccagggagctaagatgagaggataacctgagcctgggaggttgagactgcagtaagctatgatcacaatgtcagttttgtaaaatataaatgacctcaaactctccagttaaaagtcaatctattggctgggcgcagtggctcatgcctgtaatcccagcactttgagaggctgaggtgggtggatcacctcaggtgaggagttcaagaccagcctggccaacatgatgaaccccatctttactaaaaatacaaaaattagccaggcatggtggtgcgtgcctgtaatcgcagctacttggcagaccaaggcaagagacttgattgaacccaggaggtggaagttgcagtgagccaagattgcaccactgcactccagcctgggtgacagggtgagactcagtctcaaaacaaacaaacaaacaaacaaaaatctatcatcacattaaaaaatttcaaatttccaggccaggtgtggctcatacctataatcccagcactttaggaggccaaggcaggtcagtcactagagcttaggagttcaagacaagcctgggaacatggtaaaacctcatctctactaaaaaaagaattagctaggagtgggggtgcacacttctagtcccagctactcagggggctgaggtgggatgattgcttgagtctgggaggcagaggttgcagtaatccgagattacaccagtgcacaccagcctgggtgacacagtgagaccatgtctccaaaaaaaaaaaaaaaaaagaagaagaaaaagagaaagtccaaatttcctgttagaatgtacaaagtactatataagatgacatattgtgtggagaacagtgagaaagtgtagccataacacaggttttaaaaaaaaaaaaaaaaaaaaggaggagagctggaatgcataagtagttgagaagaaagaaaaagagaccacaaaaaaacagagataatttggaaataaaagcagaattcctcttcagagagagtcagttgtgcagcctgggtagagaagtcctttctctgcatgcagaatcaatgccaggtcttcatcctggatatttccaatctcttacctggagccacaacttcactccaaaaagaatatttattgttaattatggaacatctactacacatctggcactgcgttatgtttcttcacttcatttatatgccaaatagccctatgacttataaagcctccaaagtgtttatctgaacaaattgcccaatagagtcaataaactcaattactcaattaagtgaaagaaacaataacaaaaaaagttggctcgaatagtgttctctaataatggaaaaatggaaatgtactaattaagtacaatgaaaattaatacactcactgtggaattattcacatcttcagattattttttaagcaccaataagtttcataaaatcattattataatccctgagaagatcacataagaaattcttcatgaattttggaacaagaaaattatacgttagctctagcatgagcaacataaaagtaaaaacaggaatttcatgtggaaattctgcaaaataagattttagagaaatgccttcaatacaaagcagagaaaacagatttgccttcgacatttttgaggtttctagtttgctaataaattatccatacttttgaaattatgtttggttccaacatttttctcttattctgaaaacaggtatgcacttacttcaaacacattacttgcttcataactgtcttacacctaacatttatccttagagtagtatatttatgtatttatctccatgtaaaccaaaactaaaagcatgtatatgttttgcaggccagaaaagccacatgttaaaaggaaaatgtaaataaaattttgtgaatagtccttcaagattcagaaatacacggtcttggattataatcctatataggctttattatagccttaataatgacactgtcattacaaaaagagcaaacagaatgaaggtgtaacgtgtgggaacaatatttttcaaattatttgaagtttaatgccactgggagaagggatcattagagatactattccaccatgttacccactattgtattgttaccatttgttacctacaaccgtaactaaggtgagataggttaacgttggtggtaggatacgcatcacttaatgtacaacggtccaaagacattaaaacaattttgtcttattaaaacaaattaagttcaaacagtctaaaaagagcatttcaaaatccactgaattttattaccttaatgtgcaataggaaaaacaactgacttgtaaaactcaaatgtttctttcttaaatataatgcagaatagtactctgaagacctatctcatgaatcacttacaaccctattataagacaagtacaaagagcctctccagttaaatttcttcaggaagcttacaatgcaatgtccataatcttccaaagaaaaggatatgaacaacacccacccgaatatagaagaaactctcacagctttcatgtagcaacagtaggcctcatgccttcacataaacactagaaatgaaggcatggtatcaagtgatttaagacttgaattacataaatatgtgattttcaaaaaagctaaaactctttcagtgcaccgagtatactttattattatgttgttattattattattgagaaagggtcttgctctgttgcccaggcaggagtgaagttgccagatagcagctcactgcatcctcaacctccaggctcaagcaatcctcccacctgagccttccaagtagctgggacaacaggcatgtgccaccaagcctggcttttattttactttttgtagagatgaggttttgccatgttgcccagcctggtcccaaactcctgggctcaagcaatcccccgacctcggcatccaaaagtgcagcaactataggaaagagccaccgtgcctggcaccaaaaggtatacttgaaatgtaattataacttccccaaaaggtgaatctcctacttactttaacttaactttgaattattctctataaccaacactcagatttacagtaatgtctgaaagtgtcagtgacttagtgctttttactatgaattcttggatgtgttttgatgtaatttttgattagacattttttcacatttactgcatctgtaaaacagtttttagtgtgaacactctggtgttttctraggtatattttttgaacaaatgttgtttctgcatttattacatttgtagggtttctctccaatacaaagtctttgaarttgaatacagtttgagcaactggagggtttccctccagtataaattcttctgtgtacagtaagagctgtgatataagtggaggtgttgaaccggtctatttgtattgttcgtagcctaaacattttagtgcactcaaaggctcatagactgtaaatggccttttgacagtcattacatttgtaacactcttattcagtaaaaatattctgctgtgaagttgtgaataggtattaaagactatgccatattgtttagaattgtagggtttttctcaggtatgagttttctcatgtacagcaagttgtgcagagtggttaaaggctttgccacattcctcacacttgtatggtttctctctggtatgaattgtcttatgtttagaaaggtgtgagctctggccaaaggctttgccacattcttcacatttgtagggtttctctccagtatgaattctcttatgattagtaagatatgaaaaccagttaaaagctttgccacattcatcacatttgtagggtttctctccagtatgaattctcttatgttgagtaaggtatgaaaaccaggtaaaagctttgccacattcctcacatttgtagggtttctgcccagtatgaattctcttatgctgaataaggtatgagaaccaggtaaaagctttgccacattcctcacatttgtatggtttctcaccagtatgaattctcctatgttcagtcagatgtgagctctggttaaaggyytttccacattcttcacatcggaaggttttctctccagtatgaattcttctatgttgagtaaggtatgacaacaatttaaagactttgccacattcttcacacttgtagggtttctctctactatgaattctcttgtgttgagtaaggtatgggaacaacttaaaggatttgccacattcttcacatttgtatggtttctctccagtatgaattttcttatgtttagtaagaactgagcacaggttaaaagctttgccacattcttcacatctgtaggttttcttttcagtatgakttttctcaacaacagcaagacttgagcaagacttaaaaatgttattacattcttcacatttgcaatgtttctctccaacatgaattctcttacagtcagtaaagcatgagcactcattaaaggctttgccacattttttacattggtacgggttctctccaatatggattctctgctgttgagtcattattaaagacatgcaagagacattgccacattctttgcatttgaatggtttttctccagtatggcttatcttacatttatttagatttgcaaatttactaaaacctttcacacatttattgcattgaaagtttttgctatgagtagttgctgagcataggtcaagtccattataacttgccttctgccctttccactcacccacaatttcycagtcattccttaagcgtaatttctcaagacaacatctttcatatcttctcagcatcactttttggaatgaaacttgcaggccctgctctggcaaaatgtcttcagtaagataagaagacaaarctggaaaaaataaaaacaacaaattattccacttactagatagcatcctttacaaatctaaggcataaaattatacaagcatattagcaagatagcataatgaaataccacaggcccttattccttcatagtcataatcctaacaaaaatatactaagcaaaatgccattatgagaatcctaaaagcagccaaagggggaaaaaaagaaatgacgtacaatgaagctccagtacgcctcactgcagacttttcaccggaaaacttacaggccaggagagagtggtatgacatacttaaagtgctgaaagaaaaaaaacctttaccctagaatattatatccagcaaaaatatccttcaaacataaagagaaataaggatggccaaacaaaagctgaggtatttcatcaataccagacctgtcctacgagaaatgataaaaggagtacttcaatcagaaaagaacattaattaggcagatcacctgaggtcgggaattcaagttcagcctgaccaacatagagaaatcccgtctctactaaaaatatgacattaggccrggcgcggtggctcacgcctgtaatcccagcactttgggaggccgagacgggcggatcacgaggtcaggagatcgagaccgtcctggccaacacagtgaaaccccatctctactaaaaaatacaaaaaaaaattagccgggcgtggtggcaggcgcctgtagtcccacctactcaggaggctgaggcagaagaatagcgtgaacccgggaggcggagcttgtagtgagccaagatcgcgccactgcactccagcctgggcaacagagcgagactccgtctcagaaaaaaaaaaaaaaaacgacattaattgggcgtggtggcgcatgcctgtaatcctagctactcgggaggctgaggcaggagaatcgcttgaacccgggaggtggaggttgtggtgagccaagattgtggcattgcattccagcctgggcaacaagagtgaaactttgtcaaacaaacaaaaattaaatgatgaacaaatcaaaaatgataactacaacaagttttcaaaacatagtacaataagaaacagcaaaaagttaaaaatcaggagtactaagctaaggcgtagagtttttattagttttcttttcacttgcttttttatgcaaagagtgttaggttcttatcacgttaaaatacatcaaaccaaaaaacatacaatggatacacaaaaaatgaaaatcaggaaactaaatcatatcaccagagaaaatcaccttcactaaaggaacatagacaggaaagaaagaagaccactaaacaaccagtaaacaagtaacaaaatggcaggattaagccttacttaccaataacaacattgaatgtaaatggagtaaattatccattcaaaagaaatagactggctgaatggatgaaaacacaagacccactgacctgttgcctttaagaaacacacttgaggccaggtgcagtggctcacacctgtaatcccagctctttgggaggccgaggcgagcagatcgtttgggcttaggagttcaagaccagcctaggcaacatggtgaaacccatctctaccaaaaatacaaaattagctgggctgtggtcccagctacctgagaggctgaggtgggaggattgctggagcctgggaggcagaggttgcagtgagccaagattgcaccactgcacttcagcctgggtgacacagtgagaccccatcttgaaagggagaaagggagaaaggggaaagggaaaggaaaggaaaggaagagagagatgaacgaggggaaagggaagggaagggagaaagagagagaagaaggaatgaatgaaggaaggaaggaaggaaggaaaaggagaaggggaaggagggaggaagagaggaaaaggaaggaaagaaaggaaaggaaggaaaagagaaagagagagagaaagaaagacactttacctataaaaacgcacatagtctgaaaataaaagaatggaaaaggatattccatgaaaacaacaaacaaacaaaaaagagcaggagtcactatactggtgtcagtcaaaacagatttcaagaccaaaagtataagaagagaaaaagaaggtcattaaataatgatagaagagtaaaatcagcaagagaatataacaattgtaaatatatatttatccaacaccagagtacccagatatataaggcaaatattattagaactttaaagagaggccccagtacagtaaccgctatatacttcaggacctcatttgcagcactggacaaatctactagacagaaaatcaataaagaaacatcgcacttatctgcactatatgccaaatggatctaatagatagttgcagaacgtttcatgcaacagctgcagaatacacattgttttcctcagcacatggatcattctcaaggatagaccaaatgttaggtcacaaaacaagtcttaaagcatccaaaaaatggaaataataccaagcattttctgtgaccwcaatggaataaaactagaatgaaaasaggaattttcaaaactatacaaatacatggaaattaaacaatacgctcccaaatgaccagtgaattaaaagaaattcaggaggaaatttaaaatttcttgagacaaatgataacagaaacaaaatataccaaaacctatgggatacagcaaaagcagtacraacagggaagtttatagttacaagtgcctacatcaaaaaagagggaaaacttcaactaaacaatccaacaatgcatcttacagaactagaaaagcaagcgcaaacaaaacccaaaattagtagaagaaaaataatgaagatcagagcagaaataaatgaaattaaaattttaaaacaattcaaaagatcaatgaaacaaaaaattagttttttgaaaaacaaaattgagaaaaacctctaagacattagtctaagcaaaaatttctggagcaataccccacaaacacagacaaccaaaaaaaaatggacaaatgggaacatatcaagttaaaaagcttctgcacagcaaagaatgcaatcaaagtgaagagacaacccagagaatgggagaaaatacctgaaaactactcatttgacaagagattaacaaccacaagttataaggagctcaaacaactctataggaaaaaaatctaataatccgagccagaaaaagctcaggagatgtgaataaacatttctcaaaacaagacacaaatagcaaacaggcatatgaaaaggttgtcaacatcactgatcatcagggaaatgcaaatcaaaactacaatgagatatcatctcaccccagttaaaattacttatatccaaaagccaggcaataacaaatgctggtgaggatggaaagaaaaagaaaccccgtacactgtggggatgtaaattagtaccaccactatgaagaacagtttggaggtttctcaaaacactaaaaatagaggtaccatatgatccagcaatcccactgcatatgtataggccaaagaaaggaaataggtatatcaaagatacctgcacccctatgttggttccagcactattcacaacagccagactttggaagcaacctaagtatctatcaatgggcaaatggataaagataatgtactacttataggccgggcgcggtggctcacaactgtaatcccagcactttgggaggccgaggtgggcagatcacaaggtcaaaagattgagaccatcctggctaacaacgtgtagccgggcgtggtggcgggcacctgcagtcgcagctactcgggaggctgagacgggagaacagcgtcaacccgggaggcggagcttgcagtgagccgagatcgcgccactgcactccagcctgggtgacagagcgagactctgtctcaaaaaaaaaaagaaaatgtactacttatagacaatggagtactattcagccttaagaaaggatgagatcctgtcatttgcaacaacatagatggaactgaaggtcaccacgttaagtaaaataagccaggcacagaaagacaaacattacatgctctcacttatttgtggaatctaaaagtccaaacatttaactcatggagatagagagtagaagaatggttatgaggctggaaagggtagtgggtgagtgggtgggggaggtggggatggttaatgggtgcaagaaaattacttaaaaagaatgaaaaagacctactattgaatagcacaacagggtgaccatagtcaaagataatttcagctggacattttaaaataaagagtataatttgtctgtaagtcaaaaaataaatgcttgagggaatggacaccccattttccctgatatgcttattttgcattgcatgcttgtatcaaaatatcttatgtacctcataaatatatacactatgcacccacaaatttttttaaattttttaaaaatcctttctgagaactctaaaaatcaatgaagggtttgcaggtgagcacaatgccayaagccccatagaatggaaggaaagttggttccatttacccaccacagccctaccttttttccaataaggtaggtgcccttaggagtaaacttccgacttctccctcagaaaataaagaaaatagtggcacatgtgtccatacttttgggggyttgaaaaagactggtttctgtctcctattacacagagtactgaatggaatgatggtatactttgaccgacaggttggttctgttgagaccaataataaatggttgttatagcagatgagaaactgcagtacgagagatgggcaacagatataacaagtgattacagcctcttaagaggaaacatgtgaaaacctctgtaattaagaaaatagccgggtgcagtggctcatgccagtaatcctagccctttgggaggccgaggttggcagatcacgaggtcagatgttcaagaccagcctggccaacacggtgaaaccacatctctactaaaaatacaaaaattagccaggcatagtggcacgtggctataatcccagctacttgggaggctaaggcaggagaattgcttgaacccgggaggcagagggtgcagtgagccgagattgcagcactgaactccagcctgggagacagagtgagagactctgtctcaaaaaacaaacaaacaaacaaacaaaaaaaaacaccattccagagaagacatatcccaagaacaagtttgagaggctcccataatctctagcctggtcaactggtgtcagaatttcccagaacaatgccactttataaagattgaaacaggtggctttttgttaatttcaaatctgaacaaaagattacaatgtatacaaagtatcagggtacttaacgccccaaaaaggaaaaataaatatccagatagcaaccctaaagaaatggagatatataaattatctttaaaaactcaaaataatcatgtgaataacattaataagtgaaataagaacacagacaactaaatgaaatcaggaaaatggaagatcaacaaaaagataaaaagtataaaaagaaatagaaattatggagctcaagaatataaggtaagcaaatgctgaaaaagtcatcagtagacctatactcaagaaatgctaaaggggctgggtgcggtggctcacgcctgtaatcccagcactttgggaggccaacgtgggcggatcacttgaggtcgggagttcaggaccagcctagccaatatggtgaaaccccatctctactaaaaatacaaaaaaattagctgggcgtgatggcacaaacctgtagtcccagctatagggagcctgaggcacaagaatcacttgaacctgggcggcggaggaacaaaagcgtaaaaataattataaacatctgttcatataaaaagatatgatcaatgacatcagtaacctaaagttcagggcagatgtactgagaaaaaaaatttgtatgtgactgaagacattaccagtttaaaatatattgttgtggccagacgcagtggctcacacctgaaatcccagcactttgggaggctgaggtgggcagatcacctgaggtcaggagttcgagaccagcctggccaacgtggcaaaaccctgtctctactaaaaatacgaaaattagctgggcgtggtggcacgcgcctgtaaccccagctactcaggaggctgaggcaggagaatcacttgagcctgggaggcagaggttgcagtgagccgagatcacgccactccactccagcctgggtgacagatagagactctatctcgaaaaaacaaaacaaagccgggcgtggtggctcatgcctgtaatcccagcactttgtgaggctgaggcaggcggatcacgaggtcaggagatagagaccatcctggctaacatggtgaaaccccatctctactaaaattacaaaaaattagctgggcatggtggagggcgtctgtagtcccagctactcgggaggctgaggcaggagaatggcgtgaacccgggaggcagagcttgcagtgagccaagatagccccactgcacttcagcctgggcgacagagcaagaytccgtctcaaaaacaaaaacaaaaacaaaaaacaaacaaacaaaaaacacgaacaactcacaggagacaaaaaagacaataaataataaaaggttttgttcacagaaaacctatgacaaatgtatgtctgtgtatttatgtctacatctgtgtctcaccagggttcacrayatataaagcaactatttacagaaatgaagcaacaagtacacagggaacgggggacttgaaagcactataaaacagtgacaaccaacagacctctagagaacaccctaaacaacagaatccacgatattctcaacagctcrgaaaacattctccttgacagaccacctgtcaggccacaaaacaagtcttaacccatttttaaaaattaaaatcttatagattattatttatgaccaaaatggaataaaacaagaaatcagtaacagaaagaaaactgaaacattcacaaatatacggaagttcaacaacacacacttgagcatgttcttcatgggctagaagacttaatattacgaagatgttcatatcacccaagtgacctacagattcagtgcaatcctctcaagttcacaatttcgtttttgcagaaatagaaaaggcaaccctaaaattacacagtgcgtgaaggaaccatgaagagcgcaacaatctccacaaagaagaacaatgttgcaggtatcatactttctgattttaaaatacattatggccacgcgcagtggctcatgcctgtaatcccagcaccttgggaggctgaggtgggtggatcacctgaggttatgagttaaagacgagcttggccaacatggtgaaaccccgtctctactaaaaagacacggtggcacatgcctgtaatctcagctactcaggaggctgaggcaggagaatgacctgaacccgggacgcagtttgcagtgagccgagatcgcaccattgcattccaacctgggtgacagagctgagactctgtctcaaaaaaaaaaaaaaaaaaaaaaaagaagctgcggtaattaaaacagtttggtattggcataaaggcagacagttaggtcaatgaaacagaatagaaaacacagaaacaaacctccacatatatggtcacatgaagagttctttgcatgcccatatttattgcaacattattcacaaaagctgataggggaaaacaacccaaacttacctcaccaaatgaatggttaaatataattcagaatacacaaataggctggcagtggtggcccgtgcctgtaatcccagcactttgggaggccaaggcaggtggatcacctgaggtaaggagtttgagaccagcctggccaacatggcgaaacctcgtctctactaaaaatacaaaaaaaaaagaaaattagccaggcgtggtggtgcatgcctgtagtcccagcaacccaggaggctgagatgggagatcacttgaatctggaaggtggaggctgcagtgagctgaagtcgggccatgcactccagccttggcgacagagtgagactcctcgcaacaaaattaactcatactagcaccacagatgcccaagaaatcgagatgtctcaaaaaacaaaacaaaacaaaacaaccccacaaataatggaatattactcagcttttacaaagcaggaaatctggtaaaatctacaataaagatgaatctttagacgcccaagaaattgacatgtctcaagaaaaataaataaataaaaccacaatggaatattactcagcttaaaaagcaggaaatctggtaaaatctacaataaagatgaatcttcaagaaaagccctttgtcctgatgtgattattatgcattgcatgcctgtatcaaagtatctcatgtaccccataaatatatacacctactatgtacccttaaaaattaaaaatgaaaatcttggtgacatgctaaatgaagtaacccagtcacaaaaagatagagactgtacgaatccatttatatgagatatctgaaacagatccttaaaaaatagaatggtgtttctaaagggccaggcaaatacacacacacgtcataaagaaaatgtactggcatgtctactgcaagtagatttatctgtaagtttgtttgcctgtaacatttataaaggcaaacaaacttayagataaatgtactgacaatgtgattgttgcattattcacttttgcaccataatgtcttgaagtgtacagaactgaatatgttcataaaaattataatacataagtaaaaactgttcatgtgtggtggctcatgcctataatcccaccattttgagaggccgaggtggaaggattgctcgaggccaggagtttgagaccagcctgggcaggagtgagaacccatctmtataaaaaataaagaaagaaataaaaagtccaggcgcggtggctcacgcctataatcccagcactttgggaggctgaggcagggggatcacttgaggtcargagttcaagaccagcctggccaacatggtgaaaccccatctctactaaaaatacaaaaatttgccagatgtggtggcgggcacctgtaatccctgctactggggaggctgaggcaggataatctcttgaacccgggaggcggagggtgcagtgagctgagatcacgccactgcactccagcctgggcracagagcgagactctgtctcaagaaaaaaaaaaaagaaaaaagaactaccatacaagacagcaatctcacatgtgtgtgtgtgtgtaaaatcaatagaaataaaatcagtatctcaaataaatatctgcatccccatgttcattacagcattagtcataattgccaagatacagaaacaatgtgaatctttgtgaatgctgaatggataaagaaaatgttttacatatacataatagagtattattaagcaataaacataatgaaatcctgccattctaacaacatactaagtcgctaagtgaaataagccaaacacagaaaaacaaatacttcctgttcttctcactcatatgagcaatcttaaaaggttggactcctagaagcagaagacacacgtgattgccaaggaggtaggaaaatggaagatggtattaaaagggcacaaactttcagttataaaataaataagctttggaaatctaatgagtagcatcatgagtacagttaataatattttgtatgcttaaaatttgcgttaacacagcagacaagtgttttcaacataaaactaaccatgtgaagtgacagatgtgttcattagcttaactgtataatcatttcactagatacagatatcaaaccatgacaccgtacaatagttatccaatttttatttgtgtaaaagaatccacattatacacatacatatatacacacacatatatataaatgacacagaccratgaagtttcatactaaacaagagaaaattataaaatgacaattattttaaaggaaggcaacaagtgggagtttactatataatcagcaatgttctacactccccaacgacccagcatatttaagaaatctaggatatgagtagatatattaaactatataacagctgagaaatttaggcacgtagggttcaaattacaaatctcagttcacacaaaagaaagaaaatttttaagtaaacgacattagattttctgatatttagggagatgcttagtcttctgataaaattactatcaatttctgtagaatcacatttgaaatctccacagggtaagtcataaaggagaaaatatacatccgtttgtggtgttctgggatttcttaaccaaataccaatatcaccactactctcacatgttccacatgcaatgcaaaaagggatcttaaaaaatattttaggccgggcgcggtggctcacgcctgtaatcccggcactttgggaggccgaggcaggtggatcatgaggtcaggagattgagaccatatgggctaacatggtgaaaccctgtctctactaaagtacaaaataaattggctgggtgtggtggcgtgagcctgtagtcccagctactcgggagactgaggcaggggaatcgcttgaacccaggaggtggggcttgtagtgagcygagattgtgccactgcactccagcctgggcgacagaacgagactctgtctcaagaaaacaaatatatatatatatatatawgagcatagagttcctcaaaaatacgcagacagtcccatgtccccaaaagcaatgcaagagcagtcagatcatgcagtcccctataaactatgaagatgattgtgacgctcactgtaaacttgaaggaaaatgactgaagggaaatacagtccttagacaatttaacagcatgagatagaagaygcccctatgtgggagcaagagaaagaaacccaggcttctcagaagccatttcctgggagtagagcttcccaaaccacartttaaagtctggcttcttccttgatccttsracccctacctgtgttygcttcattcactcccacctacctgagtgtytggctgtcttctctgtgttcacgttccagggctctttccttgcctccagacagatgatcagttctggcttagacatagcaagacctgttttattagaaaaaaggtgcatgattcttgcagggattctttaatcaccttttactatgctcagtagagaagagaaaacatcacattagatcctagaaaattaactccaaaatactgttttctgacagaacctttaatatatgtaggaagtattttaaatttgtgagtccttagccctgctaccaagaactataataactggatcaaaaattggtggtggaaactggattttgaagtgtaggcaacaatattttatactactgaatttctagaattaccaccaatctagagcaaggatatacatcagctgaatagaaaggttgatgtcaaggcaaaacatcttgaaagttttgttttctacaccaagaaatccccaaggttttcttgaaagcagtgatgtgaaactcattcatgcaaatcagaaactcccagaaaacattcyacaaaggaaaaagatgaaatccttactgtgaaataggaattgcatattgaagctatcctcaccaagggagatcaggtttctgtagttctctaacatcacatccctatacaaactcygctgagctgggtccaggcattcccactcctctggagagaattctagagccacatccctgaatgccaatagtccctgaaaaagaaaacatatttaccaagtggtcacggcagagttcttaatttgactacaggcaaggagagacagtgaagagaactggctctgacttatatgagtgactagaattatcaaataagataatttttaacacagaaatatactctaggccgggcgcggcggctcacacctgtaatcccaacactttgggaggccgaggcaggcggatcaccaggtcaggagttcaagaccagcctggccaacacggtgaaaccccatctctgctaaaaccacaaaaattagccgggcgtggtggcacatgcctgtagtcccagctacttgggaggctgaggcaggagagttgcttgaagccaagctgcagtgagccgagatcacaccactgcactacagcctgggtgacagagcgagactctgtctcaaaaataaataaataaacaaacaaataaataaaaaatatatatatatacacacactctaatgtattctctctgaggaaagaagatggcttaagatccatgaaaccagtgtaggtagtctacttttgtgcataatatagtataaaattaagggcatcaactcaagcactggtatattcacatcacacaggataaactgtgtattgttctcatatggagaagtcagggtgagttagaaggtacttctcaaattttaacaagtatgtcagtgaagtaggaatcttgttaaaatgcaggcacgggccgggtgcagtgactagtacacagacmatttacactataaagcaaccacacaaacaagtctacataacaaccagctaacaacgcaatgacaggatcaaatccacacatatcaaggccaggtatggtggctcacacatatcaactccagcactttgggaggatgaggcatgagaattgcttgagcccaggagttcaaggccagcctaggcaaaatagtgagaccctgtttctaccaaaaacaccacatatcagtattaactttgaatgtaaacaggctaaatgccccacttaaaaagcaragtgcaagttgcataaagaaagaagacccaactctatggtcttccagaaactcatgtcacatacagtgacacccataggctaaaagtaaccagaaggagaaaaatctgtcgagcaatcagaaaagaaaaacgaactattcttatttcagacaaaacaaactttaaaccaacaataatgaaaaaagacaggccaggagcagaggctaatgcctgtaatcagcactgggaggccaaagtgggagactcacttgaacctaggatttcaagaccagcctcagcaacatagcaagaccctgtctctgttttaaaaaaaaaaaaagaaagaaagaaaaggagcmgggcgtggtggctcacagctgtaatcgcagcactttgggaggtcaaggcaggcagatcacttgaggtcaggagtttgagaccagcctggccaacatagtgaaaccccatctctactaaaactacaaaaaattagctacacgtggtggcgggcgcctgtaatcccagctactcgggaggctgaggcacgagaatcacttgaacccaggaggctgaggttgcagtaagctgagatcatgccactgcactccagcctgggcaacagagcaagacttcgtctcaaaaaaaaaaaaaaaaaaaaagaaacaagacaaagaagggcattgcatagtgataaaatgttcaataaaatcagaaaacttaactattctaaatatatatgcaaccaacattgaagcacccagattcataaaactatttcttagagacctatgaacagacacagataaccatacaatattagtagaagactttaacattccactgacagtattagatcatcaaagcagaaaactaacaaagatagggacctgaactcaacacctcaacaaacggacgtaatacacatctacagaacactccattcaacaacacaatgcccattcttctcacctgcacatggcatatattttcaaatcaaccacatgcttggccataaaacaattaccaacaaattaaaaaaaaaactgttatcacaccaaccacactctcaagaccacagttaaataaaaacagaactcaatatcaagaatatctctgaaaaccatacagttacaaggaaattaaataacctgcttctgaatgactgggtaaataatgaaattaaggcagaaatgaagaaattaaggcagaaatgaagaaattatttgaaactaataaaaaaaaagataccgcatcccaraatctcttggacagagctaaagcaatgttaagagaaaagtttatagtgctaaatgcccagttcaaaaagttagaaaaatctcatattaaccacctaaggtcagacctagatgaactagaaaaccaagagcataccaacctcaaagctagcagaagaaaagaaataaccaaggccgggcgtggtggctcccgcatgtaatcccagcactttgggaggctgatacaggcagatcacctgaggtcaggagttcgagaccggcctggccaacatggcgaaaccccatctcaactaaaaatacaaaaattagctgkgtgtggtggtgcatgcctgtgatcccagcttgggaagctgaagcaggaaaatcacttgaacccagggggcrgaggttgcggtgagctgagatcgtgtcactgcactacagcctgggtgaaagagtgagactctgtctcaaaaaaaaaaggggggggyrgcaaaggacttgaagggacatttctcaaaagaagatatgcacatggccaacatgcatatggaaaaaagttcgacatcactaatcatcagagaaatgcaacacaaaaccacaatgatgctctattacaccattcaaaatggttataattagaaagtcaaaaaataacagatgccaacgaggttgcagaaacaaaggaatgcctatacactgctggtgaaaacataaattagccactgtggaaagcattttggagatttctgaaagaacttaaaacagggctgccattcgacccagcaatcccattacagggtatatacccaaaggagtatatatcattctccaataaagacacatgcatgtgtatgttcactgtagccttttcacaatagcaaagacatggagtcaacctacctgcccatcaacaatggactaaataaataaaatgacatacatgaacaccagggaatgctatgcagctataacaaacacaaaatcatgttctttgcagcaacatgaatgctgctggataatttaattaatacagaacagagaaccaaatactgcatgttctctcttatatgtgggagctaaatattgagtaaacatggacacaaagagggaacaaaagacactagggcsgactttagagtagaaggaaggcaagagtagaaactacctgttggatattatgctcattatctgcgtaatgaaataaataatttgtgcaccaaacaaccatgaaacaaaatttgccaatataacaaacctgcacacatactccctgaatctaaaataaacattggaaaagaaaaaataaataaaytgtaaataaattataggggaaaaagtttctctatctttatagttttggtaaactaaattcagtgatggatattcattaaatatccagatcatttccaaataagatgtaatgctaagacatttagttactaaatttgagttcatcttacayactttgggctttttatttcagaaaaacaaaatacatttagatgttggtaaatacattatgttccacactgaaacactgtttcattagaactatatttctaaaaatgtgtattcataaattcttagtatttgaatgacagtaaaaattttttcttagggcygggcatgtggctcatgcctgtaatcccagcactttgggaggccaaggcgggcggatcacctgaggttaggagtttgagatcagcctggccaacatggtgaaaccctgtctctactaaaatacaaaaattagccgggtgtggtggcaggcatctgtaatcccagctactcgggaggctgaggcaagaaaatcattgaacccagagggcggaggttgcagtgagctgagattgcaccactgcactccagcctgggcgagagagcgagactccatctcaaaaagaacaacaacaaaaaagatcactcatgatgaccaagtgggatttatcccagggatgcaaggatggttcaacatatgtaaatcaacccatgtaacacatcatattaacagaatgaaggagaaaaaccatatgatcatttcaactgatgccgaaaaagaatttcataaaattcaacatccttcattgatttaaaaaaaaaaccctcgaaaaactgagtataaaaggagcatacacagtaaaatcatacatgacagacccacagctagtatactgaaggaggaaaaactgacagctatacctctaagatgtggaacaagaaaaggatgccaactttcaccagttactcaacttagtactgtaagtcctaactagaacagacaagagaacaaaatgaagctctccaaattcaaaaggaagaagtcaaattatccttgtttgcaaatgatatgatcttccacttgaaaaaacctaaagactctaccaaaaaactattcaaactgaaaagcaaatttggtaaagtggtaggatacaatactaacatacgataatcagtagcatttttatatgccaacagcaaacaatctgaaaaagaaatgaagaaagtaatcccacttacgatagcaacaaataaaatacctaggaataaacttaaccaaagaagtgaaagatttcaacaacagaaactataaaccattgatgaaagaaactgaagagcacacaaaataacagaaatatattctgtgttcatggattggaagactgttaaaatgttactgttaaaatgtccgtaactccacaaagcaatctataaactctgtgtaatacctaccaaaataccaatgacattcttcagagaaatagaaaaactaagcctaaaatttttttggaaccacaaaagactaagaatagccaaagccatcctgaacaaaaaggaaaaaactggaagaattactctacttgacttcagattatattacagagctatagcaacaaaaacagcatggtactagcataaaacaagacacatagctctatggaacaaaataaagaaccaagaaaaaaatccatacatctacagcaaattaatctgtgacagaggcaccaagaacatactttgggggaaacaacagtctctcaataagttgtgctgggaaaaatggatattcatatgcagaagaataaaacttgaccccttggccgggtgtggtggctcatgcatgtaatctcagcactgtgggaggccaaagcagcagggtcacttgaggccaggagttcgagaccagcctggccaaggagtccgaccagcctggccaacayagtgaaaccctgtctctattaaaatacaaaagttagctagctgtggtggcctgcacctgtggtcccagtttactygggaggctgaggcacgagaatagcctgagcccaggggatgacagagtgagactgtctcaaaacaaaacaaaacaaaacaaacaaacaaaaaaaacgataaaaaacaacaacaaaaaaacttggcccccgtctctaggcatatacaaaaaatcaaatcaaaatggattaaagacgtaaatctaagacctcaaactatgaacagaaaacatcaaggaaactatccaggacactggctgagyaaagattttacagcagagtgtcaagtgattattctctgctttcttctcatgtgaaatgttcagaacagaaagaaaatattttttaaaaagccactcatggctgggcacggtggctcaagcctgtaatcccagcactttgggaggccgaggcgggaggatcacaaggtcaggagatcgagatcatcctggctaacagggtgaaaccctgtctctacaaaaaataccaaaaattagccaggcatagtggcacacgcctgtggtcccagctactcgggaggctgagacaggagtatcgcttgaacccgggaggcagaggttgctgtgagccaagattgcaccattgcactccagcctgggcgacagagcgagactctgtctcaaaaaaaaaagaaaaaaaaaaaaagcccattcattgcactgtgaaaaaaacaaaaaagaaccgttaaaatcttgcatctgtttgaaaagcaaataaaggacaaataagccgggcgcggtggttcatgcctgtaatcccagcactttgggaggctgaggcgggcggatcacgaggtcaggagttcgagggcagcctggccaacataatgaaaccccatctctactaaaaatacaaaaattagccgggcatggtggcgcctgcctgtattcccagctaccaggaggctgacgcaggagaatcgcttgaacctgggaggtggaggttgcagtgagcccagattgtgccactgcacttcagcttacctgccattgggcaacagagtgagacttcgtctcaaaaaaaataaataaataaaaagaacaaatagttgataatgttgtgtttggagagacaaagttagcatttgggaatgtagaaaagaaactggaaacaagatttccttcaggccctaaaacagttaggctgggggaacagagtcctggatttgaggtcctgcttgccatacatttgaaaaatgctgggaaaaccagttcccctgtggagtgttagaatacttaaatggcagacaattagactgagtggctttgatgtcctgggattctatctaaggaatcctagctaacttagatgaatttcttgtaaattgcaaacttggagaaaaacaaaacgtaggcttaaccaacmactaaatgctaataaatctcttattacataatcaggaaatttcatcctggacagtccaaataaggtgactgcataatggcaaccgatcaattattaaacgtggttgcttcctcgtgcaccttatgaagaccttcccttcaagtttagccccaaaccagggctaggggcttccagattcataaatcactgtttgctggaataaactccttaacatttcaaaggtgcttcagtttatttttttaagaggagaaaggagaccgggcgcggtggctcacgcctgtaatcccagcactttgggaggccgaggcgggcggatcacgaggtcaagagatcgacaccaacatggtgaaatctccgtytctaataaaaatacaaaaattagctgggcgtggtggtgggcgcctgtaattccagctactcgggaggctgaggcaggagaatcgcttgaacctgggaggcagaggttgcggtgagccgagatcgagccaccgaactccagcctggcgacagggcgagactccgtctcaaaaaaaaaaaaaaaaaaaaagaggagaaaggaacccacagaccacagctcctcccacccaggaacctttcacgggagtcgggactctcccgacaacccctccgtcatcacagcacaatccagggaagacgcggcgctgcgggcgcggggctgccccgggagggctctgggccgtgccgaagtcaccaggcagagaccggacagtcacccagcggccgggatcccgctgccggcccggcccccacctgcgcgggacgggactgagggccgagctgcgccagcgggactcggccgcacactccggagccgaccgccgggaggcccggggccgccagcgctggttccagccaattccaaccgattccaaccaccccctctcccttctcgggacaccctgctccgcacactcaccatttcccagcttttgggggtcccagcgtcctccctataaatctcgcaatacctgcaggccacagggcgatggagcctgcggcrgtcacccgggactctccgagaggcagcagacgggaacccagcaccccgccggccgcaaggagacaaaggccccgccagatccccaaggccgccccttcstctctggctgcacgcctgattggacagttctcacgctagcgccgctgactggatggggctccaggccccaccccctcaggtcttgagtgacaggaggtgcgatcagacactgggccgaatgaaacaagagtgacaggtttttgggtgcagcccttttgaagcgacattcctcacggcacttcgacctggacccacctgcctgggggataatggcatttaaccttgtatataagattatatccattcataagttttacacacacacacacacacacacacacacacacayatatatttcacaaatagaaacaatgaatgataattattttaaagtttccgatttcataaccttccgggcctctggtcttttgaccaggcagcctgagctgtggaaagtgaggcaatcctctcaggcagcaatatgcaatataaataaaaggtgagccacgcgtgtcatttaaaattttctaggatctggcgggtcgtggtggcttacgcctgtgatcccagcacttggggaggctgaggagggaggatcacatgaggccaggagtttgagaccagcctggccagtatggcgaaaccccgtctctgctaaaartatttttaaaaattagccaggagtggtggtggtcgcctgtaatcccagctactcaggagactgaggcaggagactcgcgtgagcctgggaagcggaggttacagtgagccgagatcatgcctttgcactccagcttgggtaataagagsaaaactccatctcaaaaacaaaaacaaaacaaaacaaaaaaatcggctgtgaagacatttcctcctgcagaaatttagccaaacagctgagtatgtcttgaagtcattctttggttyttaacagggcaaagctattttctaagacctaaaccctggactggccatggggcaaaccctcacaacacatatggaattcatgcacagttaatgcatctcttaccttgaaccagtggttgctactaattttgtttctgattcagcccagttctacaactgccctgctatgcacagggcactgtactagctgccctggccttggtgaacatcattgtggggagaggactttgctgggaaaaagttgcatccccccagattgaaaccattccactttccaaattggagtaaaactgaaaagacctaggggrgcacccaaggttacaacatgaatgaatagctcagaatatttaaagtcatttgatggtatcatgggtgagtgtgtctcacttcaaacaaaataaaacactactgttattctgagattctaagttaggatttatgtaaaaatatataataatttttttgatacacaacacacatacaaaaaaatacaaagcattcatgtaaagctctgtgagttattacaaagcaaatacagttgtataaccaagaaatagaaccagcatcactcatatcccaacaattactatctgcctcccttatctacctccccagtggtaagtaagattattattattattattattattattattattttaagacgaagtctcgctcttgtcccccaggctggagtgcaatggcgcgatcttgactcactgcaacctccacctcccggratcgagcgattctgctgcctcagcctcccgagtagctgggattacaggcgcctgccaccacacccggctaatttttgtatttttagtagagacagggttttaccatataggccagcctggtctcgaactcctgacctcaggtgatgcacccgccttggcctcccaaagtgctgggattacaggcgtgagccactgtgccctgccgattttttttttctttttttgagacagagtctaaccctttcacccaggctgaagatgctctagcgatcctcctacctcagccaactgagtagttgggactacaggcacacaaccaccacaactggttcatttaaagatcttaagagctaacattgtacatcacttttgccttttcatacaagcgttttattacagaaaattttagccatatacaaaataaacgaaatagtataatagacccgtcaccctgattcaagaactactcatcttgtgccatttttctttcatctatgcttcaacccattctgcacccactgctgtatttttttagttccttttttttttgcatgaggtcagatgtacacacattgaaaggcacaaatcttaaatgtacagtttttaaaaaataaaatatacccatataagcttcaccccttttaagaatggaatattttcatcattctcagaaaacttcctcgtatttcttcccaggcagtttttttctactttcagaggctgtgttgatttattttcactctaggttcatttttgcctgaagccatacaatatgcattttattccactttgtctcatatacccagcttgtgagatgcagtcagggtgtgtgcttcagtggcttgtgtcttcgtactgctgggtagcatcctgttgtatgaatatccgctctacaatttgctgaaccatttttctgttgatggacattcgggttgtttcctattttgggtttttatgaacaaaagatctataaatattcttgtacaaatacttgttatatttaatgtaattcctttttagaatttgagtgacgtgtgtttttagtgggatgactggtgatgttgagtacctttttatatgcctgttggccatttgtatgtcttctttgggaaaaatactcaatctgtttcatatttctgaatcggttgttactattctcttttttgagatggagtcacgctctgtcgcccaggctggagtgcagcggcgtgatctcagctcactgcaacctccacctcctgggttcaagtgattctcctgcctcagcctcccgagtagctgggactacaggcgcgtgccaccatgcccagataattttttgtatttttagtagagacggggtttcaccgtgttagccaggatggtctcgatctcctgacctcgtgattggcccgcctcggcctcccaaagtgctgggattacaggggtgagccaccgcgcctggccagatgccacattttctttatgcattcattcatcaaagaacacttgggttgcgtccacgtttccgctttcatgaatattcctgcaataaacatgggtgtgcaggtaagtttttcaggtcctgctttgcatattttggatagacacccagaagtggaatcgctatatcatataataattccgtttgagaaacctccgtacggccgggtgnnnnnnnnnnnnnnnnnnnntatgaaaaggcaaaagtgatgtacaatgttagctcttaagatctttaaatgaaccagttgtggtggttgtgtgcctgtagtcccaactactcagttggctgaggtaggaggatcgctagagcatcttcagcctgggtgaaagggttagactctgtctcaaaaaaagaaaaaaaaaatcggcagggcacagtggctcacgcctgtaatcccagcactttgggaggccaaggcgggtgcatcacctgaggtcaggagttcgagaccaggctggcctatatggtaaaaccctgtctctactcagcctgggcaacagagcaaaactctgtctcaaaaagaaaaaaaaaaaaaaagagagagagaaacttctgtactattttttatagtagctggatcaatatttccccactagcagtgcacagaggtctcagtttctccacatcctagagaccatttgtgggttctttatttgcttgatagtggccatgtaatgggtgttagcaaaggaaatctggtagatttgctttrcatttttattttwtttatttatttatttatttttttgaggcagggtcttactctttcacccaggctggagtgaagtagtgcaatcttggctcactgcagcctcaacctcctgggctcaactgaacctcccacttcagtctcccgagtagctgggactacaggcacctacctgccaacacacccaactaattttttttgttttgttttgttttgtttttgttttttttgagacggagtctcgctctgtcgcccaggctggagtgcaggggcgcgrtctcrgctcactgaaagctccgcctcccgggttcacgccattctcctgcctcagcctccccagtagctgggactacaggtgcccgccaccamgcccagctaattttttgtatttttagtagagacggggtttcaccatgttagccacgatggtctcratctcctgacctcgtgatcyrcccgcctcggcctcccaaagtgctgggattacagacgtgaaccaccgcgcccggcctaatttttgtatttttattataggtgtgagccattgcgcctggctgctttgcatttttctaaggatttgtatatcactggtcagttttttgcccacttttaaatggcattatttgctttttctttgtttagtttttgtagttgtttatatatatcctgtcagatatttgcttttcaaatattttctctcattccttaggtgggattttgactccactgaatgtttcctttgacatgcagttttttaagtttaatgtagttcattcttttagtcttttttgttgttgtttatatatttgatgtcatacccaagaaaatattgcgaagaccaatgttatcatctttccccttatgttttcttctaaggattttagagttacagtttattttctatttatttatttatgtatttcgagacagagtctcactgtcgcctaggctggaatgcaatggtgtgatctcggctcacttcaacctcygcctcacggattcaagcaattctcctgcctcagcctgtcgagtaagtgggactacaggtgtgtgcactaatttttgtatttttagtacagacggggtttcaccatgttggccaggatggtctcgatctcctgacctcgtgatccgcccgcctcggcctcccaaagtgctgggattacaggcgtgaggcaccgcgcccggcctagagttacagtttttatgtttaagtgtctaatccatttaagatggcttttgtatatgatgcagggtaagtctccagtctcattttttcccacgtggatatccagttttccaacatcatctgttgaagactgttcaggccgggcgcggtggctcacgcctgtcatcccactcactttgggaggccgaggcgggcttatcacgaggtcaggagatcgagaccatcctggcgaacacggtgaaaccccgtctctactgaaaccacaaaaaattagccgggcgtagtggtgggcacctgtggtcccagctactcgggaggctgaggcaggagaatggtgtgaacccgggaggcggagcttgcagtgagccgagatcgcgccaccgcactcccgcctgggcgacagagcgagactccatctaaaaaaaaaaaaaaaaaaaaaaaaagcattcaagagtgtgttgttatctttcacgtatttttagatttgtcagttttgcttcaactttacatttctagctttatttcacgtggtcagaaaagatacagtgtatgagtcagtcctctcaaamatgatgagttgttttgtcttctaacaggttgtccctgaaacaactatccattttctcctacccccagctcctgacaaagtgtattctactttctttttccaggggtttgactactttagatatctcatataaatggaatcatacagtatctctctcttytttttttttttttttttttggagacagtctcactctgtcacccaggctggaatgcagtgcatggtcttgtctcactgcaacctctgcctctgagttcaagcgattctcctgcctcagcctcccaagtagctgggattacagatgcccatcaccatggccagctaatttttgcatttttagtagagacggggtttcaccatattggtccagctggyctcaaacttctgacctcaagtgatccgcccacctcagccaaccaaaatgctgggattacaggcgtgagccactgcacctggcccagtatcttttttgtcacttggttatttcacttaccatagtgtcctcgatttatccctattgtcaatataacaaaatttcagcttttaaaagctgaataatattcagttatttgtgtttttcaaattgtccttatccattctttcattgagggaatttggatgccttccacttttagcttttgtgaaaaatgctgcagtgaatatggatgtgcaaataacacttaatatgaccatgtatgcaagggcttgtttctgtgctctattctgtttcattgttgtatttgtcttcctttattccagtaccagactattttgattactatagctttataatctgttttaaaatcaaagcatgatgtctccagtgtttttctctttttgacaactcttgggctcttctggttccttaaatttcatatggtttttagaattgctctttatatttatgcaaaacatgacattggaaactttgatagagattgcattggatctgtagatcactttgggccgaatatggccatcttcacactgttaagtcttttatcccttaaatgagagcatgttcaagagtttgttgtttaattgttacatatttgaatttttcagaattatttgtgcttttggtttctagttttatttaacttctatctgaaatcatactttgtaagagtcccactttttaaaacctgtaaaaacttgttttgtggcttaacagtttatttttaattaattaatttattttttgacacgaagtctcaccctgtcgcccaggctggagtgcagtggcccaatcttggctcactgcaaccactgcttcccaggttcaagcgattctcctgcctcagcctcctgagtagctaggattataggcatgcgccatcatgcctggctaatgtttgtatttttagtagagatggggtttcgccatattggccaggcttgtctcgatctcctgacctcaggtgatctgccggcctcagcctcccaaagtgctgggattataggtgtgagccactgcacccagccggttgctttgaatttttaaaaattttgccatcatgctcatgtcttcagcctggtataattttatattagattcataaggtatattctacaaaatccagtaagataatctgttatgttaatttctttcagctctgtcatctcattacaaccaaggcctttcaccaaagcagagcacagatattttattttgaaaagtaataatgggaagtgatgaaagctgtgactttgagaatttacacttaaggaaaaagtgtgaagatgtgggtggaggtaaaggccaaaaagaacgttataatgtgcatcaccaatgggcaacaactactcataacagaaatttacctgccacaggagaccaagaacatagaacatctcagaagaaacctcaacttacatcagctgcttctatatagaaacatgtttctataagtaaatatcaacatcgatttttgaaataaaccttttgtaatgaaactcagaaaaactttaaccatcactcaaattccagtaaacatcagagtacttattttccagataatcattagaaatgtaataaataaaggaaagtattttaacattccccaaaacttaccatccatcagagtatccatactcaagagaagccttacagatgtaagaaatgtgggaaaattctaactagttctcactgcttactcagcatcagataattctcactggaaaaaattcacacagatgtaattgaaggggtgggttgcccctccacacctgtgggtgtttctcgtaaggtggaacgagagacttggaaaagaaaaagacacagagacaaagtatagagaaagaaataatgggacccggggaaccagcgttcagcatatggaggatcccgccagcctctgagttcccttagtatttattgatcattcctgggtgtttctctgagagggrgatgygtcagggtcacaagacaatagtggggagagggtcagcagacaaacaygtgaacaaaggtctttgcatcatagacaaggtaaaggattaagttctgtgcttttagatatgcatacacataaacatctcaatgctttacaaagcagtattgctgcccgcatgtcccacctccagccctaaggcggtttttccctatctcagtagatggaacgtacaatcgggttttataccgagacattccattgcccagggacgggcaggagacagatgccttcctcttgtctcaactgcaagaggcatgccttcctcttatactaatcctcctcagcacagaccctttacgggtgtcgggctgggggacggtcaggtctttcccttcccacgaggccatatttcagactgtcacatggggagaaaccttggacaatacctggctttcctaggcagaggtccctgcagccttccgcagtgtttgtgtccctgggtacttgagattagggagtggtggtgactcttaaggagcatgctgccttcaagcatctgtttaacaaagcacatcttgcaccgcccttaatccatttaaccctgagttgacacagcacatgtttcagagagcacggggttgggggtaaggtcacagaatctcaaggcagaagaatttttcttagtacataacaaaatggagtctcccatgtctacttctttctacacagacacagtagcaatctgatctctcttgctttttcccacatgaaataaaggtagaagagtctttagtcaatcatcacatctaaatagacataaggaaatctatattggagagaagtmtaaaatgtaaagaatggtaaacccattaactactactcaatccttacacatcagggaatccatactgtagagaaacctttgaaatggaaagaatacggcaaagcctttaataggtgttcacaccttactaaaaattaaaggattggtactggatagaaaccctacaaatgtaataattttggaaagacttttgtgcaaaatatacacttcagagaacaccacagtatttaycctggagggaaattgtaccaatgtaaaacagttagcaaaacctttaactgatgcttaaattttgctcaacagagaatttctataggagagaacctctacaaatgtaataaatgtggaaggacctttgtccaaaatatacaacttagaaagcaccagagagtgtatgctggaaagaaacattataggtgcagtaagtgtgagaaagcacttaatgaaaaatcaagtctaaatgaaaatcagaggactcgccctagaaagaactgaggtactaacacttctgacatcactctaaatcacagactttattatagggaataacccagtcaaaacaattagacaatttaatttcacgtttcaaagaaragagattgatggatcagtaggtataattctatttactgtatacttgtttctggtaatgacagtatttaagattgtgtgagcaaatatgattttattttttattttttgagacaggatctcactctgtcatccaggttggagtgcagtggcaatatcatggctcactgcagccacaacctcttgggttcaagtgattctccctcctcagcctcctgagcagctgagactacaggtgtgcaccaccatgtctggttaatttttatatatttttttagagatgagggtctcactatgttgctcaggctagtcttgaactcttggaatcaagggatcctcctgccttggcctcccaaagtgctgagattataggtgttaagccactgcatctggcctgaaaaattattatttatgtaattcaaccctcaaattattcaatgctattctttattcctactttgtatgtaaaagcatgtggtcaattgttgttacctccaagctatgaggtatatattatgtgggcatcattcacataaactcacaaaaatggaagactgagggcactgaaagggcatgcatgaggaaaatctagatgtaggggttccttttgtttgacttataactgttttttaaaaaatttaatttaaaacactcctcagcaaatgcaaaagaagggaaatcataacaaacagtccctcagaccacagtgcgatcaaattagaactcaggattaagaaactcactcaaaaccgcccaactacacggaaattgaacaacctgctcctgaatcactactgggtaaataacgaaattaaggcagaaataaataagttctttgaaaccaatgagaacaaagatacaatgtaccagaatctctgggacacagctaaagtagtgtttagaggaaaatttatagcactaaatgcccacagaagaaagcgggaaagatctaaaattgacaccctaacatcacaattaaaataactagagaagcaagagcaaacacatttaaaagctagcagaaggcaagaaataactaagatcagagcagaactgaaggaaatagagacatgaaaaaacccttcaaaaaaatcagtgaatccaggagctggttttttgaaaagattaacaaaacaaagagacctaattagccagactaataaagaagaaaagagagaagaataaatagacacaataaaaaacgaaaaaggggatatcatcactgatcccatagaaatacaaagtaccatcagagaatactataaacacctmttcgcaaataaactagaaaatctagaagaaatggataaattcctggacaaatacaccctcccaagactaaactaggaagaagtcgaatccctgaacagaccaataacaagttctgaaatagaggcagtaattaatagcctaccacctaaaaaaagcccaggaccagacaaattcacagccgaattccaccagaggtacaaagaggagctggtaccattccttctgaaactattccaaacaatagaaaaagagggactcctccctaactcattttatgaggccagcgtcatcctgataccaaaacctggcagagacacaacagaaaaagaaaatttcaggccaatatccctgataaacatcgatgcgaaaatcctcgataaaatactggcaaactgaatccagcagcacatcaaaaagctgatccaccacgatcaagccggcttcatccctgggatgcaaggctggttcaacatatgcaaatcaataaatgtaatccatcacataaacagaacggatgacaaaaaccacatgattatctcaatagatgcagaaacggccttcgataaaattcaacagcccttcatgctaagaactctcaataaactaggcatcgatggaacatatctcaaaatagtaagagctatttatgacaaacccacagccaatatcatacagaatgggcaaaagctggaagcattccctttgaaaactggtacaagatagggatgccctctctagccactcctattcaacatagtgttggaagttctgaccagggcaatcaggcaagagaaagaaataaaggtatttaaataggaagataggaagtcgaattgtctctgtttgcagatgacatgattctatatttagaaaaccccaggccgggcaccatggctcaggcytataatctcagcactttgggaggctgaggtgggyggatcatgaggtcaggagatcgagaccatcctggctaacacggtgaaaccctgtctctaccaaaaatacaaaaaattagccrggcrtggtggtgggcgcctgtagtcccagctactcaggaggctgaggcaggagaatggcgtgaacccaggaggcggagcttgcagtgagctgggatcgtgccactgcactccagcctgggcgacagagggagactccrtctcaaaaaaaaaaaacaaaaaaaaccaaaaaaaaacaaaccatcgtttcagccccaaaactccttaggctgataagcaacttcagcaaagtctcaggatacaaaatcaatgtgcaaaaatcacaagcatccctatacaccaatcatagacaagcagccaaatcatgagtgaactcccattcacaattgctacaaagagaatgaaataactaggaatacgatttacaagggagatgaaggacctcttcaaggagaactacaaaccactgctcaaggacattagaaaggacaaaatcaaatggaaaaacatttcatgctcatggataagaagaatccatatcgtgaaaatggccatgctgccccrtgtaatttatagattcaatgctatccccatcgagctaccactgactttcttcacagaactagaaaaaactactttaaatttcatrtggaaccaaaaaagagcccrcattgccaagacaatcctaagcaaaaagaacaaagctggaggcatcatgctacctgacttcaaactaaaatttaatttaattcaatttaagctctggatacatatgcaggycgtgtaggtttgttccataggtaaacgtgtgcyrtggtggtttgctgcacctatcaccccatcacctaggtattaagccccgcatgcattagctatttatcctgatgttctccctctctccaccccccaacaggctccagtgtgcatttctcccctccctgtgtccatgtgttctcattgtgtgacagtgtattaagtcacacgttagtggtgttcgttcttctgtattaaagtatgagacagggacactctgagtttcagaagtgaatagttttaccaattactcattaaagagaaaagtctgggccgggtgtcgtggctcacgcctgtaatcccagcactttgggaggccaaggtgggcagatcacctgaggtcgggagttcaagaccagcctgaccaacatggagaaaccccatctctactaaaaatacaaaattagctgggcgtggtggcgcatgcctgtaatcccagctacttgggaggctgaggtaggagaatcacttgagcccagtaggcggaggttgcagtgagacaagatcacgccattgcactccagcctgggcaacaagagtgaaattccgtccccgctcccaaaaagacaaaaaaaaaaaaaaagagagcgagaaaagtctgcttagtccatcaatattctgatatatcttcatagtagcaatagttagaactcctgaatattgattggtatggtagcaagaaagaaatcttcacagataagagatgaaagtgcagataggtcaggcatggtggcctcacacctgtaatcccaacacwttgggaggcctaagcaggaggattgtttgagcccmggagttcaagaccagcctgggcaatatagtgagatctcatctctacaaaaaatttaaaaattagctaggcatggtggcatgtccctgtggtccctgctactcaggagaggtgaaaagatttcttgagcccaggaggtagaggctgcagtgagccatgaacacaccactgcactccagcctcggtgatggggcaagaacctttctcaaaaagtgcagataactcctctctggtgggaaataaatttattttgaattcaattttctaaacacttagcctcagtttaaaaaataaaggaagcattttgttttgttttgttttgttttgttttgttttgtttgagatggagtttcgttcctgttgcccaggctggagtgaaatggcgctctcagctcactgcaacctccgcctcccgggttcaagcgattctcctacttcagcctccagagtagctgggattacaggtccctgccaccatgcctggctaattttttttctatttttagtagagacaggctggtcttgaactcctgacctcaggtgatccacctgcctcagcctcccaaagtgctgggattacaggtgtgagccaccacacccggccggaggcatattttttacatagatcatggtatccgaagaacaagaatgcttcttgagagtaatctgtattttggccattgggaaaacagtggattttgaaatgcttttttcagtctgtttgtaaacttaatttgttttaataaaggaaacaaaatggttttttatcatgttaacactgttgtatattgactgacgtgttatcttacgaaaaatgttagcgtattccaccttgctcaaggtcctaggtagcagacggtaatactgtactattgggtaatacatgccaatcatctctagcaatccttattcccagtggcattacactccagakagtgtggagaatattgatcccgtatgttatatttttattctttacttgtgtgactactgagatattacgatggttataataaacactttagggccaagagcagtgactcacgcctgtaatcccagcactttgggaagccaaggcaggtggatcatgagatcaggagttcgagaacagcctggccaacatggtgaaaccctgtctctaaaaatatgaaaattagctgggggcggtggtgtgcacctgtagtcccagctacttgggaggctgtggcaggagaattacttgaacctgggaagcaggttgcagtgagccgagatcaagccactgcactccagtgtgggtgacagagtgagactctgtctcaaaaaaaaaaaaagattttataggagtttaataataaactgtacctttcctaatcttgaattttaccatcattttttttcacaagccacacttctaggcccacaaaacacatgcatattttgggttttgatttacattgacaaatatacaattatatcaatccaaagataaattttaggagcatgagaactatggagtgtgtgtgtgagagagaggtgggagagagagggaaagatagaatgcctgtatttattagaaaaggaaaatattagaacaaaacagataatttcagaaaaaaaacagttgaaggtatgctaacaaactggaaacctcacagattctgtaaagcacatctttttttttttttttgaaacagtgtcttgctctgttgcccaggctggagtgcagtgattcgatctcagctaactgcaacctccacctcccgggtttaagcaattctcctgcctcagcctcccgagtagctggggttacaggcgcccaccatcacgcccagctaatttttgtatttttagtagagacggggtttccctatgttagccaggttggtcttgaactgctgacctcaagtgatctgccacctcggcctcccaaagttctgggattaaaggtgtgagctaccgcgcctggctagcaaacctattttctccacactgaattcatttatcagaatatcatggytcctggtccagaatctcttccttcaaatactatttttttttctgctttttactcatgcaagaactatgacatgatttacttattcccgcacttatgaaatattgtgtatatgatacacttatgaattttaagaatgttttttcatgaaatttaatggtgttcagaaatttatccaaagatgtgaataattccacagtgagtgttacattttatttaatacattccattttttcttctcaatcgaagaactctattgaagccaattctaaaaagttattgctcctttccttttcctttcaaaacagctttattgaggtataattgacacacagtaaactacacagttaaagtatgcaatttgataagatttgacatgtgtacacccatgaaaccattgccacagtcacgttgataaatatcatctcctgaaagtttcctgtgatcccttcttcccagaaacctcccctaaactctttcccctaccccctgttatccctgatctgctttctgtatttacagattattttgcatttttttctttttttttttttgagatggagtcttgctctgtcgcccaggatggagtgcagtggtgcgatctcggctcactgcaagcttggcctcctgggttcacaccattctcctgcctcagccccccaagtagctgggatgacaggcgactgccaccacacctggctaatttttttgtatttttagtagagacagggtttcaccatgttagctaggatggtctcartctcctgacctcgtgatccacctgcctcagcctcccaaaatgctgggattacaggcgtgagccaccacgcctggcagtttatcatgttttttcacaatgagagcctcccagcgcccctgcttctagtcagccatcttggcctggtcccccagaatttttcatgcagaagtgggaataatggcctctacattctttacatggtagaccagaaactgaaggtctctgattttatgttctgaggtttcactgctgacacgtttggtgcctaatatcttatttttgcccttatgactcacttctagaaaaggcagtaagaaagcccaggtgctcccttatttggtgccagcatgaaaatcgaactgcacgatctcctgctggggcttatgtaaatacaaactctcaccatggccccaaacaataaacctctaaaaattaaaatacaggtcaatttcttttttcttttttaactctctcaagccactttgcacctacctgaggggcctgacctggtctctaaagatgtcatttatgaaggtaataaacgctttataccctctgggtgcataattagcatcatcaattagatgatacatccattggaaatacatttggcaaatttgttctattaatcccatagatctttacgtatcagtgaatgctgctgtgttgggagcaagccctccaaaatctggccataaacagaatctctgcagcactctgacatgttcataatggccctaacacctgcgctggaaggttgtgggtttacaggaatgagggcaaggaacacctggcccacccagggcggaaaaccacttaaaggcattcttaagccacaaacaatagcatgagcaatctgtgccttaaggacatgttcctgctgcagttaactagcccaacctattcctttaattaggcccatcccttcgtttcccataagggatactttcagttaatttaatatctatagaaacaatgctaatgactggcttgctgttaataaatacatggataaatctttgttcggggctctcagctctgaaggctgtgagaccccgatttcccacttcacacctctgtatttctgtgtgtgtgtctttaattcctctagcactgctgggttaggatctccccaaccaagctggtctcygcaagtgacgtccatygtgggggcttgaatccaggtcgaagggtcaccagagcaacagttagagaatgtggaactagctggaggacgccagagtactcttaaagcaatccccrtggtaagtaagaaggggagctcggaagcatcagggtaacaatgggacaagtgtgggctctggttccttccaccttggagctttttcacactgatgatgaggaggaaggagagtacagcaaagtaacagaagagggtacagagcatgtttatttaccagctaaagctaaagcggcaaaggaaggagaggttcatccctacccttctgaaccccctccttattatcttgaagaaaatgaccctccagatctttcttttctggaggacactsggcaaaaagtagttgccccagtgactgttcgagcagcgccttgagcaacccctcttagttctattcaggcaggaattcagcaagctagacaagagggtgatttagaggcttggcagttccctgttagaatacaccccccagatcaacagggaaatattatagctacatttgagccttttccttttaaattggggaaagcatatttagttgattatatcaaggcctgtgatggtatcagaggtaatctgcataaagctactttgttggcacaggcaatagcaggactgatagtggataaaggaaatactccatttcctggagcttgttttaactgtaggaagcatggtcatactgaaaaagaatgtagaaaaaatcagcgagtcaggccgccagataggggaaagaagaaaactgttgagcctgaaatatgtccaaaatgtaaaaagaaaaacactgggctagtcagtgtcactctaagtttgataaagatgggaacccaatttcgggaaacaccatgaggggyccgtcccgggacccgttctaaaccagggcatttccagctcaggccattccctcacccctgtacaacgtctgtcccccgccacagccagtagtgccacagtagatttatgctgcayaaaagctgtgagccttctgcctggagaacccctgcaaaaggtcccaacaggagtctgtggacccttgccagcggggacaataggattacttttaggaaggtgtagtttaagtttaaaaggcgtacaaatacatacaggagtcattgattcagattacaatggggaaattcaaattgttatatctacttctgttccctggaaggcagagccaggagagcgcatagcacagctcctgattgtgccatatgtggaaatggggaaaagtgaaactaaacgaacaggaggatttggaaccacaaataaacaaggcaaagcagcttattgtgtgaatcaaattactgataaacatcctacctgtgaaataactattcagggagagaaatttaaaggtttggtagatacaggagcggacatttcaatcatttctctacagcactggccatccgcgtggccaattcaacctgctcaatttaacatagttggagttggtaaagcccctgaagtatatcaaagtagctatattttgcattgtgaagggcccratggaaaacctgggactattcaaccaattataacttctgtacctataagtttatgcagaagagatttattacaacaatggggagcacaaattataattccagracaattatatagccctcaaagtcaacatatgatgcatgaaatggggtatgtccctggtacaggactagaaaaaaatttgcaaggtttaaaaagttcccgccaaagattgggatgtcatttttgatggcagccattgttaagcctccagaacctatacctttaaaatggttmacagataagccaatttggacagaacaatggcygctaagagaaactggaggctttagagaaattagttactgaacaattcaaaaatgggcacatagctccaacattttccccttggaattctccagttttcgtaattaagaaaaaatcaggtaaatggagaaygttaactgayttaagagccatcaattcagttatacaacctatgggagcattacagccagaattgccttctcctgctataattccaaaaaattggcctttaatagtcatagatttaaaagactgtttctttactatccccttagctgagcaagactgtgaayggtttgcatttacaattcctgcagtaaacaacctgcagmctgctaagtgttttcattgttttacaratgggtctaktaatggtaaagcttcttattctggcttgaaaagtaaagtttttcagatgccctacacttcagctcaaaaagcggagcttgtagctgtaactgaggtattgactgattttgatatgcctattaatgtggtttctgattcctcacatgtggttcattccacacagttaattgaaaatgctcagttacgatttcaaaaagatgaacaactgatgactttatttacccaactgcaaacagcagttagaagtacaaagcatcctttttacatcaactcacattagggctcatacacctcttccaggacctttgaccgaagggaatcaaatggctgatcgcctagttgctactgcaatatctaatgctagacactttcacaatttaacccatgttaatgcctctggtctcaaacgcagatacagtattacctggaaagaagctaaagctattatccagagatgcccaacttgccaaatggcacattcctcatcttttacakgaggagttaatcctcgaggattggaacctaactctctttggcaaatggatgtcacacatgttccctcgtttgggagactagcttatgtacatgtatgtgtggacaccttttctcactttgtctgggctacatgccaatcaggagagtcttctgccggtgttaaamgtcatcttttgcagtgttttgyggtgatgggcattccagcttctattaaaacagataatgccccaggctatactagccaagatctagctacatttttctctatgtggaatattgaacacattaatggtatcccatacaattctcaaggacaagccatagtggaaagaataaatctctccctaaaagagcagttgcaaaagcagaaagggggagacagagaatatggaaccccacagatccatctgaacctagcattattaactttaaattttttgaccctgcccaaaggccagatgttatcagcagccgaacagcatctacagaaaccacctgcaaagacagaaacagaacaactgatttggtggagagatccaataacaaaaagttgggaaataggtaaaataataacttggggtagaggttatgcttgtgtttctccaggccaaaatcaacagcctatttggataccacgaagacacctgaaactttatcatgagccagatgcagaggaagagattccgggatgatcccgaggacccccctggttgcagccatgtcgagactgatgctgaggaggaccccacctgtcacgagcaacacctgttgaacacagccacccaactggggacagatcaagaagctgtcacagatggcggaagaaaacctgaggaaagcgggacaaccagtcacaatgagtaatttaatggtagctatgatagtggttatcaccactgctgtgagtattccttcaacaagggctgacacagagaacaattayacttactgggcatatttatcaatcttggctggtaataatgcctggatgtaatcactatgayacagttacacatgttttctgatctcagtttttaccataataaatttgctcctataattgaggcatactgccctcaaaaacctatttgtaaacaaaattgaacctggccagaaaaaawgaatgtacttgtttaggaagattgcattgcagaagaggcagaggtgctgcacaacaattcctatggaatcattattgattgtcccctaaggggatgtttagcttaaattgcacctctcagtctgcgtgccatggccacattatgttcagctggtctgaacaaaatggtcagatggcagaaatgataagaagtatagcaagagttcctattatctggaatcatggcggtataatggcatctcaacctcaaatgatatggcccgttgtaggagctaaacataaggatttgtggaaacttttaaatgctcttaataagataaaaatttgggaaagaataaaaaagcatctagaaggacactctacaaacttgtttttggatatcacaaaattaaaagaacaaatatttaaagcatcccaggcacatctgaccttaatgccaggaactggagtgcttgaaggagctgcagacaaattagcagctagtaacccattaaaatggataaaaacacttggaatctctgtgatttcaatgaygattgtgcttttaatctgtgttgcttgtcttcgtatagtctgcagatgtggatcctgactcctgcgagaagtagctcaccatgacaaagctgcctttgcttttatcaatttgcaaatcaaagaagggggacatgttgggagcaagcccctcaaaatctggccataaactggccccaaaactggccataaacagaatctctgcagcactctgacatgttcataatggccttaatgcctgcgctggaaggttgtgggtttacaggaatgagggcaaggaacacctggcccacccagggcagaaaactgcttaaaggcattctgaagccacaaacaatagcatgagcgatctgtgccttaaggacatgctcctgctgcagttacctagcccaacctattcctttaatttggcccatcccttcgtttcccataagggatactttcagttaatttaatatctacagaaacaatgctaatgactggcttgctgttaataaacacgtgggtaaatctctgttcggggctctcagctctgaaggctgtgagaccccgatttcccacttcacacctctatatttgtgtgtgtgtgtctttaattcctctagygttgctgggttagggtctccctgactgagctggtctcgtcactgctgctcatttttatataggtgtgtgtaatgatcaggctatgcaactgattatttagaaagacacttaaaaatggtttctaatcttttgctaccaaaactgaattataactcatgttaagatgcagcgggacatagtaaaaatatgttcttttaaaatttattaagtattttaaatgtattgaaagtgaaagtacaccttgtcaaaatttctgggatgcagtgaaagcagtgctttgaaatttatagcactgaatgcaaatatttaaaaaataaaatcaataatattccactttaagacactaaagaaagagcaaaataaacctaaattagtcaaaagaaaaatcgaaacaattgcaccgcaaataaatgaaactgaaaatagaaaatcaagagaaaaatcaatagaacaaaaactggttgtttgaaaaagattaataaaattaataaatattgtcaggataaccaagaaaaaaagattttaaaaaaagacaaatataaaaaatgaatgacagaccagcattcctgaccccatgggcattaaaaggattacaaaaaaaaaatactgccgggtgtggtggctcacgcctgtaaccccagcactttgggaggctgaggtggtctgatcatgaggtcaggagatcgagaccatggtgaaaccccatctctaccaaaaatacaaaaaaattagctgggcttggtggtgggcacctgtagtcccagctacgcaggaggctgaggcaggagaatggcatgaacccaggargyggagcttgcagtgagccaagatcacgccactgcactccagcctgggcgacagagtaagactccgtctcaaataaaaaaaaaaaaaagaatactatagacagctgtattcccataaatatgataacccagatcaatggaaccaattccttcaggcacaatccaccaaaacccacaaaaggagataatactgtatctattaatgaaatggaatcagtatttacctagtaaccttcagaaaaacttatgttcaaccatgttaacttattttaactagtggggttcaggggctcccactttgtcaagaacatgtagaagtagcaaacaactgtattactcattggatcagggaatccatgtcaactacggtctatcatagcacaatgggtgctatgactgtggagaatttaggctacatgatactggtttttttaattaaaagatagcattcctgttttatatacagtaattccctctaagatcataggggaactgtagttaaatgttgtggcatcaccagtataattcttttgtaacctgtattgattaaggacattaaggtttcccaattgatgcatttcaacagatttttaaattaattcataggccctctccctctccctctccccacggtctccctctccctctctttccacggtctccctctgatgctgagccgaagctggactgtgctgctgccatttcggctcactgcaacctccctgcctgattctcctgcctcaacctgcccagtgcctgcgattgcaggcgcgcgccgccacgcctgactggttttcatatttttttggtggagacggggtttcgttgtgttggccgggctggtctccagctcctaaccgcgagtgacccgccagcctcagcctcccaaggtgccgggattgcagacggagtctcgttcactcagtgctcaatggtgcccaggctggagtgcagtggcgtgatctcggctcgctacaacctccacctcccagccgcctgccttggcctcccaaagtgccgagattgcagcctctgcccggccgccaccccgtctgggaagtgaggagcgtctctgcctggccgcccatcgtctgggatgtgaggagcccctctgcctggctgcccagtctggaaagtgaggagcatctctgcccggccgccatcccatctaggaagtgaggagcacctcttcccagccgccatcccatctaggaagtgaggagtgtctctgcccggccgcccatcgtctgagatgyggggagcgcctctgccccgctgccccgtctgggatgtgaggagcgcctctgcccggccacgaccccgtctgggaggtgaggagcrtctctgcccggccrccccgtctaagaagtgaggagaccctccgcccggcagccgccccatctgagaagtgaggagcccctccgcccggcagccaccccgtctgggaagtgaggagcgtctccgcctggcagccaccccgtccgggagggaggtgggggtcagcccccgcccggccagccaccccttctgggagggaggtggggggtcagcccctgcccggccacccgccccgtacgggagagaggtgggggttcagacccagcccggccagccgccacctccaggagggaggtggggggtcagcccccacccggccagccgctccgtccgggagggaggtggggggtcagsccccgcccggccagccrccccgtcctggagggaggtggggggtcagcccccgcccggccagccgccccgtccaggaggtgaggggcacctctgcccggccgcccctactgggaagtgaggagcccctctgcccggccaccaccccgtctgggaggtgtacccaacagctcattgagaacgggccatgatgacaatggcgattttgtggaatagaaaagggggaaaggtggggaaaagattgagaaatcggatggttgctgtgtctgtgtagaaagaagtagacatgggagacttttcattttgttctgtactaataaaaatacttctgccttgggaaaaaaaaaattaattcagaggccattttgcagaagcatataacctaatcagcacccaattatctagttttatatattatttagtaaacttcagattcccaatcgggtcaaattgtaaaactttctcttgggtaggaactcctttgaggccagtgggtgaatgtctgtgtaccctattcatatttatcaatgtattcttccagaaaggctaaaaccaacattgccattgttgcatgtctcctacaaggtaatagctgtgttggtggggttyaagaattctaggtttggctgggcacagtggctcacacctgtaaatccagcactttgggaggccaaggtggacaatcacgaggtcaggaaattgagaccagcctggctaacaaagtgaaactccatctctacaaaaaatgcaaaaacaaaattagccgggcatggtggcgggcgcctgtagtcccagctacttgggaggctgaggcaagaatggcatgaaccygggaggtggagtttgcagtgagccgagatcgtgccactgcactccagcctgggcgacagagcaagactccgtctcaaaaagaaaaaaaaaagaattctaggtttatgtttgaattaactcctttgcygtgtcatatgggtaccatggttgtttctccccaaagcaggctcactgtgtactgttatcagcttgtctgagtatgatgagagagaacacattcatgcacatattacataagttgatttattacttataaagggatcgaagatgagaagtctaaaattcagtgtgatgtggtccccctgaggttcagagaagttgcctggaaggatggaattttgattgcatgtgccccacttgcaacacagttaagagactccagaaaatagcccagcccaggttttatagcccaggatcacctgactcactgaccaaaagtgttgagagattgtatttcttgtgaagactgttaagtctgggctgttctaccattctcttctgatatcaggatattccattcccagcacattctacacttattcttgaaaactgcaagtaagaaagagggtagaaccggaccagtccaataaaacttggaggacagttctgaatccttaacagtgagggatcaggatatttgttgtgatagaaacataggcagtagcagtacagaaatttcagtgtcccagttggccatctgctattaggtttctggaccacagcatgactcatgactgcttttgtcttctttctataaaaactgcttcagactatcttttaattcttctcatgcaaagtagcagcatttgatttatcggtagtgtgggcaatctgtgtggttaaagaaaacagttcaggagtccgtcaacccacattgaagaacacctaatcctccagtgagtgccactcaatcttgctggtgttagcaacatacagtaaggtcattttgactaaggtcatctaggttgcaaggttaggcctttggcatgctgatcagtagtgctaaaagaagcccatatactagatagaggttctgcaatgaaagaggctaatgccaaatgcttcctccccttttcttgactcatcagtgcctggaccaagaggcaccatggatgtgcacctcatcagaagaatgcacataaaagcaacagcacaagaaaacactcaaggccactagtcttgcacaagtcatcttgttacacaattaggtgacatgcttaattctccccagcatggggacattcttcctttctgcaacttcacacacacaaaatccctggagctgtcccaagtgtgtacagtaataacgttcacatggctactccaagcatccagtgatggcaaccaaacgagatgcagttaccacagagcagtagtctgacttttgataatcaggaataaagaacccagtggtgaaggtgctgggtcactgcctcaatgtggggtaccttggaaactgcctgccaaacacaggtcaaggtggaacatacatcctcctggggaacggctggtcaaccagtcatgtctaggagttgagagttctactgtgggaagaggtggcaacagctgataacacaaagcactgtgtagaccaaagtgaaagtccaccatcaattgctgtttctaattcaggtgacttctgttatattatggaaccagttagacaaaagcaggtagttaaagctgaaaagatatcatcagtcatggttggttcattctgttggtaatgccaattgttttcacagtctcatgggtgacaggaaaaattaggaccctaagactactgggaaaaacacgtgacacccatgagtgtacagataagattgagagaagttattagttacatacattcatagacaaaaaagggagggttctgtaaacgaggctggtccacacaagacttgcactacggagcagatagaacaaacagggtgtaaggggaatgctttgtagtatcaagaacgtgagatgcttcttggttctcataaggatgcaattggtttgtttaaatgcatctgtggaatggtaggcaactgaaatatgttaggctacagactgataagatcaaaatagtatgttataatgccataatcctgtaatatacaatttattgtagtgctaattacacataatataaactagttatgcataattcatagtaacttacaaaactgtactataccacatattatatagctacttatacacatataagtatacatgtagacatgctatatatacagatgatgctatactatatggtatactagggcacaccaatttgactataaatgcaaaaggccccaacaatacactggaaaattgaacgttatcaatatgggttgagtgtttcttatctgaaatacttgggaacggaagtgctttggatttcagacttttaacattttggaatatttgcagaaaacttactggatgagcatccctaatccaaatatcaaaaatcctctaatgagcatttctgttgagcataagactggtgctcaaacagtttttgacttcggagcatttcagatttggtattggaatctggggtttacagatgttcaacctgtagataaaatacttatattccatgatgaagacaaatttcacccagataaccataatatatttatatctgaaagccagttaacgtaatagactatcagtagaatgccaaaaaccacaaatcatctcaatagatgcagaaaaaaacatgtcataagagttcaacactcctttaccatgaaacaataaataaaaaacacaagaaaacttcctgagcctgtttgagaatatttatgaaaaatccacaatatacttgatggtgagactgaatgctttcacaygcagattagacaagcatactgtccaatcacagttctctcttcttaattcaaagtaaaaagtgggccaggtgtggtagctcatgtcagtaaccccaacatgtagacaggctgaggcaggaggatagcttgaggccaggaattcaatacsagcctagacaatacagcgagatcccatctctataaaaaatttttaaaattatataattagctgagcatggtggcatgtgtctgtagctccagctacataggaggctaaggtgggagaatcacttgagcccaggaatttgaggctgcagtgagctaagactattattaccactacacttcagcctagctgacaaagtgagaccctctctaaaaacataacattttttaaaaaagtgaactatgcaagtaacagccaaaactcatgacagaataaaggaaagaaaatgaaaataacaatgtacatgagactatataaacttcacatacatgcaaattaataacaattctttattagcaaagaaaacagaagaaaatctttacaacaaaaaagtagttttcccataaaaaggtagaatacacacacacacacacacacacacacacacacacacacacaygaactcatttttcattggtccattaattagagaacaattaaacaactacatgaaaattaaaattgcctactattagaaatacatttcaacttagtctagggatccaacaaatttttaaatgaatagacaaaaattatgttaactgatgagaaacaaaacacagcctattaagctcatgtactatggyttataaagtatctgtgaaattctcagctccatgattccctgcaaaaaactgaaaatctaaagtatagacaccttctttaacaatgaaccactgataaaaatatatttgaaagcggctgggaaaataaagtgttctaacacatttttcgtattttatgacgttctttcccaggacgggtcctyctaagttttagaagggaactaggaaaattgcatacattctartcttccttacatgtgttgggyttctctctaatttgagtttttaattttttcacgtgttctaatgaaactagaataactgaaagctttaacacacttcttacattgwcagaggtgttttgttgttgttgttttttaccacatataagctctttcatgctttcgaagggaactggaacaactgaaggctttaccacatttcttacattcatagggtttttctccagtatgagtcctttcatggcttcgaagggcactggaagaagtaaacgacttaccacattccttacatccataaggtttcactccagtgtgagttctttcatgctcacataggttactagaatatttgaaggctttaccacattgtttacattcatagggcttttctccactgtgagtcctttcatggactctgaggactctggaacatctaaaggctttgccacattttatacattcatagggtttttctccagtatgcgttctttcatgtattcccaagtaagtggaacgactgaaggctttgccacattccttacattcatagggtttctctccagtatgagatctttcatgttggcgaagagaactggaaaaagtgaatgatttaccacatttcttacatgcatagggtttctctccagtatgagttctttcatgttcacgaagataacttgaataattgaaggctttatcacaatgtttacatttatatgttttctctccagtgtaagtgctctgaggcatttgaaatacactaggaaaatcaaaaggcttctcatacactggacccttataaggcccattactagtgtgtgttaccatgtgtctgtcaacactggtgagagagataaaggctttcccacattgtttgcaatgatataacttctctggacattcctcacactcaaatagtttgtttccaatgtgagacaggatgtgcctatgaagggctgaatgacatatgaagacytttccacacacactgcattcacatggctttactccagtagaaactttcttattcagattcaaatttgaatcctggctgaaggtttctccatattgactgccttctttaatttcaaacagtctctctaccacatgactgctgtaaaaatgataaacatcattaatggtacatttattcatggtttacattgctactaataccatggaaaatgcaagtttcctgccatatctaaattgttttaaagtaaataaattaattacyrtaagatatgggtcccccatagctattatcattattatcataattgtgatagtcacatgtacagtatcttggtggtgtttccaagtaaaatattctgaaaatattgaacatcaatgttacattcaggtgtattttttgctaagacttttctggaaaaaaaaaatttctagtggttcttakttgttttgtctgttttaaaaacttatgacatgctaagattccctcaaggggcatttttgctcttgtgaatgcaaattaccttagatttctcccaggatttttgaagtcatcttggatattctggtcttctgatttgtttcctaaaaggtacaaccataagattattcaaatgattagaaactttaaaaattgctagattcaaggttcactatacactgtgaccataactaatttttttcaccaaagtactccctttccacatgccaaatcaggaaacattmataaccaagaaacacttgttttcttcttcttttcttttttctttctttcttttttttttttttttgagacagattgtttcttcgttgaccaggctggagtgcagtggctmaatctcggctcactgcaacctccacttccyaggttccagcaattaacctgtctcaggctcccaagtagctgggattacaggcgcctgctaccacgcctggctaatttttttatttttttggtagagatggggtttcaccatgttggccaggctggtcttgaactcctgacctcaggcgattcacccgccttggcctcccaaagtgctgggattmcaggtgtgagccaccacgcccagccaaaacacttgcgttgtaatcaactacgtgaataagtgttgttattcttacctacagaagccaggttcctgaagatttcttgcatcacatctctgtagagattcttttgagaaggatccagcaaagcccactcctcctgagtaaaggccacagccacatcttcaaatgacactgaatcctagaatatcgcacatatgtggagaggaggatggcttagacagacagtactaagaatctatactcatctcataaaatcgtaacataattctgcagacttcaaacatttcttccatgacctggtcatcagaactttactctctgtctgcacttactgctgcccactcaacattcttcatgctaaaatgaaactattcagaaagtcaacagcagagtaggaacacctgtctcattggcaggtgcagggaataaactgtgctgtaagaaatgaggtcacccctaatttctatgtgtagattttatcttaagggcctctcataacgaagtcatgctatttgttgtgtataacagttagtattaagtcttaagactacatatccttagaaatacctgctcacaaagtctgaccttttggtgtgagaaaatagatttttttgacggatctcatcaccctaagtgagtggttcacaatatgtaaacaatcttatgcaaacaatatattattcgctgaactccagttttgttttgtttctgaaagcctactactttactccattcttgcagtggtacctaggggatcagctctgaaaaacactctgagcattaagtctctaatgagcattcttggtaaacaatatttctcatatgctgttacaacttgttaamtggagaaatgaggcatcaacgtgattataataagaaaatatttggaagcttgcaagtagtttactccagaccaaattaaayccagttgtaaataagactgataatttatctttaataacaaacaaaacaattttaaaatttctattggataacaacaaagtgcaatggagtaagtggaaagatagtacrtgtgcttagaagaaactcaatgtcatcaagatatcacctctttcaaatagccttaaaaaattccatcaatccccaaaacagacactttattagcaactgaaaactacttttccaaacctaacaaaaaaaaaatgtctaagaattgtcaaagtcttccaaacaatagggcaatggcttccttaccatgtatcagaattttcaaactataatattcaggacagtattaatgtggagataaacaaatagtccaaaagggaaaaaagttttaaataagcaggaatttatttttattttatttttttattttatttttttggtgagatggagatttactcttgttgcccgggctggagtgcaatggcgtgatctcggctcaccacatcctccgctgcctcccaggttcaagcgattctcctgcctcagcctcccgagtagctgagattacaggcatgtgtcaccacgcccagctgattttgtatttttagtagagacagggtttcaccatgttgcccaggctgatcttgaactcctgacctcaggtaatctgcctgccttggcctcccaaagtgctgggcttacaagccactgygcctggcctgtaagcaggaattttgtatgtaaagttcattaatgacagagcattccagaatagtggaagaaatcaaaagcactttaaaacatacagtagagcaaattggtactaactgaaaaagtacattgcattcccctctattccatgaacaataatcaagttctttatttcaaatatgaaasacaaaactaaaatacgttcagacttcgaaggaaaacaggggtatttttggacagaaaaatgggcagaattcatttaaacagaaaaaaaggaactggcaaattcacatatattaatattcaggaaattaaaaggcaaaaagcagtgggaaaaaactgtaatacatgcaatataaaagaattagtatgaagtgtaaaaatgaacacgatttaaaagtgagaaaataagcaaagcatacttaaaagaagatgaaagacyacctatttttttaaaaagtcaacttccttggtaatgagaaaatagaaaatagtcaggtatatgacatttgaaattgactagaagaaaaaaatcaactccatgtgatgacggccatggcaaacgggttactcacgaaggaaggaggagtcaactgataccctccattgctctaatttgaacttaccacaatgtgtagcccattaatttttctaaaatgtccagagaatttacggtgcatttgcacttggagatgtggcataaaatcataggagcattatttttcccaaaagcaaaaaaatacaattgaaaaagccctcacatcagaatcattaaaatggacggctgaattaaatggtccacagcctcaggcactagcatgtgtgaaacatactgacacaaggaaatcaccaataaacctttttgttttaattccattcatactcattttagaaagttcaagtaaagcaaaatggaactgaaaaattacagatgataaaaatgcaaaaaagtagccaaacaatcacaacagtggtcaactaagagataagtctaggtgggaaccatcagaaaactcttaatgactgtaggaggcccagttaagaatcttaattataatttccaagttgcttcaactattgttactaaaactcttgacaaatgttttactcattcttactgtatttcttaatagaaaacttaaaaattaattaaaatgtaaaagaacacaatttttatgtttctttgccttataacgtgatctgagtcgtgatttacagatttcacagaaataagtaaattgagcagcacagctcacagtgctagttgctcagcaagcagctaaagtacacaccagataccaggcggcagaaccgattagcaagtcattgcgagagaagacagaaccacatggtggtgggcaatgtctgaacattctgctagtggtactaagtgcgatggtcacgkgcagagatgtgtttggaaagggtaggaaattattactcagaaaattgacacttgtggatccaytaggtcaggcctttcaaggtggtttgatmtggtttgaatgaggaagaaaaggagccaggcctgtgttttctgttgagggtaggtggaaagctaggatgagaattcagtttcaagggaaaagatttacatggtttcaatctgctgccaaaacccagagagagcacccaggcttgttttcaccatatcctgatgtgacgtcagaagtagaagaaagtaagtttaggattaaaagttgacagcagtgaattaaagaaaaaaatggagacagacacttctgatttccagtagagcaagtaggcataaaaggcaatggtcaagcttcctaggttgagttctgagttccatgaaaatgtctgaccccaccacgctgtctgagctactgaaatgttattaccagaggctctttccctattctctgtactgtaactggctcaactacagcagagtgataaagaattactcccaacactgtgaattttcattcacattgaaagatgacattacattcgataccaatccttcaacaaccagagtgatctggaaaaggagatgcagaaagtgaatccatacaagattgatataggtgcagtatattcccacagacccaatcaacacaatacagtgargctgggagctttccaggctcaggaaaaagaactggtgtttgacactgacatgacagacatgacaatgtgaggagatgctgtagttctgcagatacatgttctacgtgctggaccctcatgacaagggccatacgcatcactaacacagcactgaaggaggactttggatttaagcattgtctctgggtatattctggaaggaggggtgtacattgtttggtctgtgataaatcagttagaaaactgtcttcggtggtatattctgggatagttgagtatttgagccttgtaaagcatggtcaagatgttaaaaagaaagttcacctaactgaaaaaattcacccttttgtcagaaaatctataaacataataaaaaaaactttgaagaatatgccttggttaatcaagatattctcaaaaataacaaaagctgggataagattttagcccttgttcctgaaacaattcaggatgaacttcaacaaagcttccaaaagtctcacaattcacttcagcattgggagcaccagcagatgtcagaataacatcaaaaatcaaaatgtggatcctggctgcagtgggagattatgctccaggactgtttccacgatggggtatcaatgtcaacaaagaaatcaatcatttaccgcagagcccttttagcgttcatcctaaaacaggtcgcatmtctgtgcctactgatttgcagaaactggatcggtttgatccatttactgttccaaccataagcctcatctgccatgaactggatgccatttccactaatgaagaggaaaaaaggagaattaaactgaatctgatattaaacatagaaccagagatataagaccagtctagcaccttatgtgagtttttgaacaacttcttgaaaacctgggtaaacaccgaaaaagagaacttcttaagaagagtgatttacaaaaagatttcagaagacaatgctcctcaaaccaatgtgggtatcttctgccttcaaccaaggatcaaatgctccaagagccatttaacaaatacagcagaactatgtatgtgtcttaatgctcaaagtaaattttcctttgcttgagaaataatttatgttgaaaagatttcctgagaccaccaaaggagactgtcaaggttcacggaaggagcaataaaaggagaaataattggaaaaaaaaaaccccaaaaaacaaaggcaacattcaggctattattagagtctttaacagatggtggcaaagtagcgcagaaaatggagcacttacacactgctggtgggaatgtaaattagttcagccattgtgaaaagcagtttgaagatttctcaaaaaacttaaaacagaactaccttttgacccagcaatcccattactggatacacacccaaaggaatataagttgttctaccaagaagacacatgtacctgtatgttcatcacagcactattcacaatatcaaagacacrgaatcaatccaaatgcccatcaatagtggactggattttttaaaaagtggtacatatacaccatggaatactatgcagctataagaaattaaatcatgtcctgtgcataaacatggccacagctggaggccattatcataagcaaattaatgcattgacagaaaaccaaataccacatgttctcatttataaatggaagctaactgttgagtatacatggacacaaagatgggagcaacagacactggggcctacctgagggggagaatgggaggaaagtgagagtcaaaaaactacctatcaggcactatgctcactatctatgtgacaaaatcatttatgcagcaaaacacagaaacatgaaatttactcatgtaacaaatctgcatatgtaccccccagaacacaaaagttaaaaaaaaaaagcaacattcacattcacaataaaaggcaaataaatttaactaaacaattctaagattaaccattaaagaactgagttcccagtaaaaactaccaaaccaaattagagagacagagaggcacatccagagaatcgtaactcacttgatgagaaaaccataagaatcctctaagagtagcagtacgtgtataggaaaaaccaaactgaaattggtgagctgctcaagtttgagaacatctcctgggtgcccaggcttagggatccccagtaatttatgagttttacatccacaaacattaccagttgatacggtttggctgtgtgtttcctccaaatctcatgtttaaatgtgacctccaatgttggaggtgggcctaggggaaggcatctgggtcatggaggcagatatctcataaatgactcagtgctgtccttgaagtaatgagttctctgttggttcacaggagagccgggtatttaagaggctggaccttcctcctcctctctctgactccctctctcaccatgtggcttgcctgttccccctctgccttccgtctgaggcatcaccagaagccaagcagctgccggtgccatgcttgtacagcctgcagaaccrtgagtcaaataaacctactttctttataaactacccagtcttaggtattactttatatcaatggaaaaatggaataatacakaaaattggcactgaggagtggggtgttgctataaagatacctgaaaatgtgaaagcagctttggaactgggtaacaygcagaagctggaagactttcaagggctcagaaaaagacagggagatgaggaaaattagaactttttagagagtggttaagtgattgaaaccaaaatgttgacagaaatatggacagtgaaagccaggccaatgaggtcttagatggaaatgacaaagttttggtgagcttgagcaaaggtcacccatgttacaccctggcaaagacttggctgcattgtgtccaatgccctaaggatttgtaggaggtttaatttaggagtaataacttaagagtctccagaggaagacatttctaagcagcaaaggattcaagaggtggtatggtcgcttctttgcccccacaatcagaagtgatttaaagttgaaacatgattaaaagagaagcagagcataaaagtttggaaaatgtgcaacctggccctgtggtaaagagggaatccaagcagcctgtggagcaatgacttgtaagagagagttgcacaactaaaggggagccaggtgccaacagccatgaggctaagaaaaagacctgtaatgcatttcagaaaactgtggcagcccctctcaccacaggctcaggggcctaaaaggaaaaagtttggggtaccaggtcgaaagcatcactgccctgtgcagcctcaggacactgctccttgcattccagtagctctggttccagctttggctaaaaaggcaccatataccacttgggccacggttccagagggcacaagccataagccttggaggcttccgcttagtgttaagcctgcaggtgcatagaatacaagagttaaggaagcttggtagcttccacctaaatttcagatgtatcrggaatgtaggtgcccaggcagaagcctgacatgagtggaaccccacaggcagcctctactagggcagtgccaagagaaatgtgaggatgwagcccccacacagagtccccacagtggcactgcctagcggagctgtggaaacagggctgctgctttccagaccccagaatggtacagccacaagcagaaagcactgtgagcctggaaacgttgcaagcatttgactctagtatgtcagaagtcacatgggctgcayccagcaaagccacaggaatgaggttgcccaaggcaacaggtaaatacaccggttccaaatggaagaaatggccaaaacaaaggggctacaggccccatgcaagtccaaaatccagcagggcaataaaatcttaatgctccaaaatgatcgcctttgactccatgtctcacatccaggtcctgctgatgcaagaagtggactctcatggccttgggcagctccacccctatggctttgcagggtacagccccattcctggctgctttcacaaggtggcattgtctgtgacttttccaggtacacactgtaagctgtcagtggatctaccattctgggtctgcaggatggtggctctcttctcacagctccactaggcagtgcctcaatgggagctttgtgtgggaattccaaccccacatttcccttccacactgccctagcatagattccctatgtgggctacaccactgcagcaaacttctgcctagacatccgtgtatttccatacatcctctggaattgtggcagaggttcccaaacctcaattcttaacttggctttgtgtggggattccaaccccacatttcccttccacactgccttagcatagattctctatgtgggctacaccactgcagcaaacttctgcctagacgtccatgtatttccatacatcctctgaaattgtggcagaggttcccaaacctcaattcttaacttggctttgtgtggggattccaatcccacatttcccttccacrctgccttagcataggttctccatgtgggctaggccactgcagcaaacttctgcctagacgtccgggcatttccacacatcctctgaaatcgtggcaaaggttcccaaaccttaattcttaaagttttctgtacccacaggcccaacaccaagtaaaggctgccaagacttggggcttgaaccctctgaagcaatggcctgagctgtacattggtctcttttagccacagctaggacacagcaccatgtcccaagactacaaaaagcagcaaggccctgggtcccggatcatgaaaccatttttttctcctatgcctccaagcctgtgatgggagggactgccgtgaagacctctgacatgtcctaaagacattttccccattgtcttggcaattaacatttggctcctcattacttacataaatttctgcagctggcttaaatttttcctcagaaaatgggttttcttttctatcacatcatcaggctgaaaattttccaaacgtttatgctctgcttctcttttaaacataagtttcaattacaraccacctttttttgaatgcataaaactgaatgcttttaagagcacccaagtcacctcttgaatgctttgctctttagaaatttcctctcccagataccctaaatcatctctctcartttcaaagttctgcagatctctagggcaggggcaaaatgctgccagtctctttgctaaagtatagcaagagtcacctttgcttcagttcccaagaagatcctcatttccatctgaaaccacctcagcctggacttaactgtctatatcactatcagcattttggtcaaagccatttaacaagtctctagaaagttccaaacttacccacatcttcctgtctccttctgagccctccaaactgttccaacctctgcctgttacccagttccaaagtaacttccacatattcaggtatctttatagcaccaccccactctctacagtaccaacttactgtattagtccattctcacattgctataagaaaatacctgagactgagtaatttgtaagggaaagaggtttaattgactgacagttccacatggctggggaggcctcaggaaatacaatcatggcaggaggcgaaggggaagcaaggcaccttcttcacatggtggtaggaagaagaatgactgaaggagaaacttgccaaacactcatcaaaccatcagatttcgtgagaacaattacttccacctggtctctcaattcaaggtgagacattgggtggggacacagtcaaatcatatcaccatctcaatgccgctccttgttattggtctgtttagagtttctatttatttcttatttaatctaggagagtttcataattccaggaattcataaatctcctctaggttttctagtttgtgcacataaagttgttgaaagtagccttagtaatcttttgtatttctgttgtattgtttgtaatacctcctgtttcatttcttttttttttttttttttgagatggagtctcactctgtcatccaggctggagtgcagtggygcaatctcagctcactgcaacctccacctgccgggttaagtgattcccctgcctcagcctcttgagtacctggaattacaggaatgtgtcaccatgcccagctaatttttgtatttttagctggtctcaaactcctgacctcacgacctgcccacctcggcttcccaaagtgctgggattacaggcatgagccaccatgcctggccctcctgtttcatttctaattgagcttatttagattttctctcttcttttcttggttaatctcactaatggtatatcaattttgtttatcttttcaaagaaccagctttttgtttcatttatcttttgtattttttgtttgtttcaatttcatttagttttgctctgatctttgttrgttcttttattctgctgggtttggatttggtttgctattgttcctctagttctttcaggtgtgaccttagatggtctatttgtactcgttcagactttttaatgtaggcatttaatgatacaaacttttgtcttagcactacctttgctgtatctcagaggttttgataggttgtgtcactactatcattctgttcaaaaagtgtttaaactwctatcttgatttcattgttgacccaacagtcagtcattcaggagcagattatttaatttccatgtatttgcatggttttgagtgttccttttggagttgatttccaattatactccattgtggtctaagagtgtacttgatatgattttgattttcttaaatttattgagacttgttttgtggcctatcatatggtgtatcttcaagaatgttccatgtgctgatgaacagaatgyatacactgcaattgttgagtagaatattctgtaaatatctgttaagtccatctgttctatgatatagtcaagaccattgatttttttgttggctttctgtcttgacctgtctagtgctgtcagtggagtattgaagtcccccactgttattgtgttgccatctatctcatttttaggtctagtagtaattattctataaatttggaagctccagtgttaagtgcatatggacttaagactgtgatattttcctgttggactagtctttttatcattacataatgctcctctttctctttgttaattgctattgctttaaagtttgttttctctgatgtaagaatagctactcctgctcctgctcccttttgttgtccatttgcatggagtatctttttccacctctttaccttaggtttatgtgagtccttatgtgtcaggtgagtctcttgaagacagctgataacttggttggtgaattcttttcttctttttttttttttgagacagagtctcactctgtcacccaggctggagtgcagtggyrccatctcagctcactgcaacctccatctcccgggttcaagcgatcctcctgcctcagccacccgaatagctgggactacaagcatgcaccaccacgcccaactaatttttgtatttttagcagagatgaggtttcaccatattggccaggctggtgttgaactcctgacctcgtgatctgcccgcttcggcctcccaaagtgttgggattacaggcatgagccaccgtgcccagtggtgaattcttatccattctgccattttgtatcttttaagtgggggcatttagatcatttacattcaacgttagcattgagatgtaaggtacccttctattaatcatgctgcaagttgctgcctgaataccttggttttttttcttttttttcattgtgttattgttttataggtcctgtgaggtttatgctttaaggaggttctattttggtgtattttttgaagttctgtttcatgatttagaactcctttaggccaggtgcggtggctcacacctgtaatcccagcactttgggaggccgaggcgggtggatcacgaggtcaggagatcgagaccatcctggctaacatggtgaaaccccgtctctattaaaaatacaaaaaattagccgggcgtggtggcaagcgcctgtagtcccagctacttgggaggctaaggcaggagactccagcctgggcgacagagcgagactccgtctccaagaaaaaaaaaaacaaaaaaaaaactccttttagcagttgttgtagtgctggtttggtagtggtgagttctcagtatttgcttgtctgaaaataattttatttttccttcatttatgaagcttagtttcactggatacaaaattcttggctgacaattattttgttgaaggaggctaatgatagaaccccaatctcttttagcttgttgggtttctgctgaaaaayctgctgtaatctgataggttttccttcctaggttaaatgatgcttttgcctcacagctcttcagattctttccttcttaattttagataacctgmtgagtatgcatctaggtgattatctttttgtgatacattttccaggtgttgtttgagcttcttgtatttggatgtctagatctctagcaaggccagggaagttttcctcaattatttcctcaaataagaattccaaaattttagtttactcttcttcctgaggaagacctattatygctaggttcagaggctttgttcttttttcatttttttttttttttgttttgttgcatcgggttaatttgaaagccttgtcttcaagctctgaagttctttcttacacttgttcacttctattgttgaaactttccagtgtacttcacagttctctaagtgtgtcattcatttccagaagttgtgattgttttttattgatgatatgtgtttggagattttttcgtccatgtcctgtattttttttttttttttgtaattcccttaaagtggtttccacctttctctggtgcctccacgagtagcttaataatcaaccttttaaattcttttcctggcaattcagagatttcttcttagtttgcatccactgctggggagcttgtgtgatttttgagggtgttaaagaactttattttgtcatattaccagaattgtttttctggttccttctcatttgggtagactatgtcagaggaaagatctgaggctcaagggctgtggttcagattcttctgtctcacagggtgatgccttgatgtggtgccctccccgtttccctagggatgggcttcctgagacccagaaggcagtgactgttatggctcttctaggtcaagccacccattggaggtgctggactctgggctggtactggggagtgtctgcaaagagtcctgtgatgtgatctcttcaggtctcttggcctggataccaatacctgcttcattggatgtagcaggggagtcaggtggattctgtgagggtccttgcttgtagttttttgggtttttttttcggtgcattgtttttcttgaatgctaattacgctagcaatgaacttgtcatgtgggcagactcagaatctctggttagccaggatgttacaggtggtggaattagcagttgtttactgctttcttggagcagggtcattctgttatgagttgctataatggcttgcgttggttggccagcagccaggaggtggcactttcaagagagcatcagctgcagtaatatagggggatatcagcttgccctaaagtcacctgaataagtattcaggtttctcaggtaatgggtggggtcatagagttctcaaaaaagtatgtcttttgtctttggctaccaaggtgggtagagaagaaccatcagactggggcaaggttagatgtgtctgagctcagactctccttgggagaagcttgctgaggccactgtgggagatggtggtgtggtattcaggccaatggagttgtttccaggggcactatggctgcctctgctgtatcatacaggctgccagggaagtgggagaaagccagcagtgacaggcctcacgcagttcccatgcagccggaaaagccagtctcactctcacccccagcacccgagcttatatgcaggaagccagtgagaagggctgcgatcttgccccaggctacaagcctcctcastgagaatgcaagtagggcttttaggccccactccatcccatctgctgtgacttctgtccctgtatctgcacttccctttcatcgacccccagattttgcccaggaaagttcatgctcagttgaaattattataaagttcaggccggcgcggtggctcacgcctgtaatcccagtactttgggaggccgaggtaggtggatcacgaggtcaggagataagagaccatcctggctaacatggtgaaaccccatctttactaaaaaaaatacaaaaaattagccgggcatggtggcaggcgcctgtagtcccagctactcgggacgctgaggcaggagaatggcrtgaacccgtgaggtggagcttgcagtgagccgagatcgtgccactgcactccagcctgggcaacacagcgagactccgtctcaaaaaacaaaaaacaaacaaacaaacaaaaatggcaggatcacatggtctctttgccaacttgggtcacattctgagaaataaaacagacgctgaaaaatttaaaaacaaaacaaacaaacaaaaaacctagtaacaggagagtagaggaagatggccaaatagaaggctccatctgtcatccatgcccataggcacaacaaatttaacaactatctacaccaaaaaagaacattcataagaacaaaaactcagacaagcatacctgcttttaacttcttatcactgaaaaaggcactgaaaagattaggtaagagtcctgaattgccaacaccacccttcctccattacctggcagcagccgcatagcatagagaatctgtgtgactgggaaaggtagagtacagcaattgtgccactttgcattggaatgtagtgctgccaacaccaggcagaactcagctaacttcagcagaggaaacatttagaccgtcctaaccagaggggacttgcctatcccagtggttggaatttgagttctagcgggcctcaacaccaggggctaaagtgctctgcggccctaaatacacctgaaaggcagtctaagccacaagaatggcaactcctggtgctgagctgggctcagaggcagaggacttaaaaggcacacaatctactgagatgccagctggcatggctaagggcttataccatccctccttcaacctcaaacagcacagctcatggctccaaaagggaacccccttccacctgaggagaggcgagggaagagtaaagaggactttgtcttgcaactttgataagagctcagctccagtaggatagggcactgggcagggttgtgaggcccacattttaggccctagttcctggaggacatttctaggcctatgctggaccagaagggaaccaaatgccttgaaagaaagaacctagtcctgggaagacccattactagctaatttaagatacagtgggccctgaataaccacaattgatatacaggcagtaagccacgggcctttggtgacattctgagatgtgctggcttcaagtgagacgtagcacattcccagttgtggtgacaacagtgacagactcctgtttgagaaaagcagagtaaaaagtaaaggaaactttgagctatgcttgtctcaaataataataataataatgagttataagacagtatttgcaagccttcttgtaacctcaaatttaaaaacatacaatggatacataaaatataacaagaaagaaagtaaatcataccaagggaggaaaaaaggaaaactagttgggcagacagctaaaaactggtctttggtaaaactcctttaaagaaactgcctgaaaaaaatcaggctgcaggcacagataaggaaacttgcacaaacctccagcccaatcagataaaggaacaaggcccaacataacaacacctttgtcctttgtgcctaagacatacctccagctacactgataagggaacaagacccaacacagaaacacctttgtcctttgtataaccagcgggcttccaggaaatagtctcttcctttgtgggcacgtacatggtgggctctggtgagcactttcctttccttttttagacacactttgtgtgagccaagcctctatgaatcatcacttcagtctctgattggccccaggccaaggtcccaggacaagctctcacttcaactcctgattggtcccaggccaagcagagtagcactttcttcaagaccagtcagcaccttccttcccttcctggtccataaaaatcctggagccagcctcatatttggcaacccattcagacccccttctctgctgcagagagctttcttcttccacttattaaactttcaccccaatctcaccctttctatacacgctccttaatattcttggtcatgagacaacttccagtgatactgcacaactagagactgctacattgtggtgcattggtgagactgtaacaataccaccaggaaaaatcaccttcactgaataacactgagtttaacggaactaaattctcccatcaaaagatgctgagtgcttcaatgaatataaaaaaacaagacccactgactggctgcctaacatacttcacctatcaagacacatacaaactgaaaacaaagggataaaaaaggatattccatatcaatagaaaccaaaaaaagaatagctatacttatatcagatgaaataaatttcaaacaaaaactataaaaagagacaaagaagtcactacataatgatatgtatgtgctgatatccaattcagcaagaggatataaccattttcaatatatatgcactcaatactgaagcactcagatatataaagcaaatattaatagagctaaagagagagagaccccaaaacaataacagctatagacttcaacaccctacttttagcattagacaatcttacagaccaaaaaaaaaaaaaaaatcaataatgaaaacactggaattactctgcactgtagaccaaatggccctaatagatacttacagaacattttgtccaacagcttcagaatacacattcttttcatcagaacatgaatcattctcaaggatagaccatatggtaggtcacaaaaaagtctttaaaacattcaccagaaaaaattgaaatagtatcaagcatcttccctgaccgcaaaggattaaaactaggaatcaataacaagacaacttttgtaaactctacagatccacggaaattaatatgctcctgaatgagtcatgaagaaatttaaaaggaaactgaaaaacttctaaaaacaaatgataatggaaatacaacataccaaaacctgtgggataaagtgaaagcaatactaagagggaagtttatagctgtaaatacctacatcaaaaaaagagtaatttcaaacaaccacctaataacgcatcttaaaaaactaaaaaagaggttgagcacggtggttcatgcttgtaatcccagcactttgggaggctgaggcaggcggatcatcaggtgaggagttcgagaccagtgaactcagttttgacaaaggtaccaagaacacacactggggaaagaacaatctcttcaataaatggtgctggaaaaactggatatccacatgtagaagaataaaactagaccactatctctcaccatataaaaacaaaatcaaaatggattaaaaacttaaatataagttctcaaactatgaaactactacaagaaagcattggggaaactcttcaggacattgaactgggcaaagatttcttgagtaataccccatgagcacaggagaccaaaccaaacatggacgaatgagatccacatcaagttaaaaagcttctgtgcagcaaaggaaacaatcaactaagtgaaaagacaacatacagaatgcaagaaaatatttgcaaactactcatctgacaagagattaataaacagaatacataaggatttcaaacaaatacaggaaaaaaaattctaataatctcatccaaaaatgggcaaataatccaatccaaaaatgtctcaaaagaagacatacaaatggtaaacaggtatatgaaaagatgctcagtatcactgatcatcagagaaatgcaaatcaaaatcatgatgagatatctcattcccattaaaatggcttttaccaggcaacaattgctggagaggatgtagagataagggaaccctggtatagtggttgtggaaatgtaaattagtacaaccactctggagaacagtttcaaggttcctcaaaaagtaaaaattgagctaccacatgatgacggcaatcccactcctaggtatatatccaaagaacaggagatcagtatattgaaaacacatctgaactcccatgtttactgcagcacacaatagccaagatttggaagcaaccaaagtgtccatcaacagaagaatggatgaagaaaatgtagcacatatacaaaatgatatactatttagccataaaaaaagaatgagatccattcatttgcaacaacacggatgaaactggaagtcattgtgttaaatgaaataagccaggaaaagagacaaacttcacatgttctcacttacttgtgagaactgacaattaaaatgactgaacttatggagatagaaagtagaaggatggttaccaaagggtgggaacaatagtggaggaggtggaggggatgtgggaatgtttaatgggtacaaaaaaaatagttagaaaaaataaacaagaccttgtattttgctagcaaaacaggatgattacagtcaaatataacttaattgtacattttaaaataagtaaaaggttataaacagtttgtaacacaaaagataaatgtttaaagttatagataccccatttaccctggtacaattattatgcattgcatgcccgtatcaaaatatctcatgtaactcataaatatatacacctagtatgtacccacaaaaattaaaaactaaaacaaaataaaactagtgaacatataaaatatgccctaagaacataattggaattaaactagaaatcgataacagaaatatacttgaaaaacatccaaataattgaagattaaactgcaaagttctaaataacaaacaggtcaaagacaagtctcaaggaaaatttaaatacttcaaaggaaattaaataaaatacatcttcagatactttgtgaaatgcagtacaagtggtgcttggaagaaatttaaagcatggagggcatgtgctagaaaagaaagatctaaaaccaataattcaaccttccattttaagaaactagaaaaaagccaggaagataaacctaagtcaagctcagacaagcaacactgatagaaaacatcaggaaagctgcaaacaagaagtcaatacagaaaatcaacaataacaaaatctggttctccataaacatcaatataattgataaacctatagccagaccaaaaaagggagaaagacaaaagaccaaaatgttcatcagaaataaaagaggttccatcattactactaatcctacagacagttaaaaaaaaaaaaaaaaaccacagtgaacattatgaacaactccatgaccactagattggtaagtcagataaaatgaaccaatcctttgaaaaaacctccaaaaactcacacaaggagagatgagcagacatgaataggtctatacgtatttttaaaattggatcaataaagtaataactgtccaaaaaaggaaggacaaggctgaagacccagatgatcacactagtgaattccaccaaacatttgaagaactgacacagattctctatacgctcttccagaaaacagaagcagagtacacacttcctaattcatgctatgcagacaacactgccctaactaccaaaactacaggaatacattacaaaagaaaacaacagaaaaaaaaatctcataatcagagatgcaaaaattttcaatctaaaaatgtattaaaaaatacacaccccaggctgggcgcagtggctcacacctgtaatcccagcactttgggaggccgaggcgggcggatcatgaggtcaggagatcgagaccatcctggctaacacggtgaaaccctgtctctactaaaaatacaaaaaaaaaaattagccgggcgtggtggagggcgcctgtagtcccagctactcaggaggctgaggcaggagaatggcgtgaacctgggaggctgagcttgcagtgagctgagatcgcgccactgcactccagcctgggagacagggcgagactctgtctcaaaaaataatagtaataaaataaatgagtaaataaataaacaaaaataaaaaataaaataaaaaatatacacccacccaaataggaattatgacagataatcatggctgattcaaaaagcaaaaaccaattgactttatcacatcaacaagataaacaacaaaaagtatataatcatatcaatagttgctgaaaaaccagaaggttaagaaatagggcagagcagatgaagccactgaaattgagaaaggataaataaaactgcctttctgcagattaatagttatttgtcgataacatgactgtctatgtacaaaatccaaaagaaccaacaaaaatctccctgagctaatgagattatagcaaagtggtacaatgtaaggttaatatacaaaagccaattatttttctgtatattagcaatgagcaactgatttaaatttaaaaacacaacagcacttatatagcacccagtaaaaagaaagacctatatgacaaaactatgcaaaactatacatttctaatgatagaaaaaaagatctgaataaatggagagatattccacgtccatgaataggcagcctcaatattgctaagatgtcagttctccccaatttgaataacaaattcagtacaattacaataaaaatcctaacaagtcatgttattttaaaaaaagaaaatttattctaacacctatatgaaaagccaaaagacccagatggtaatayaatattgaagaatcaattcacagaattgataccacctgacactaagacttaatgtaaagctatagtaatcaagacagtgcaatatttgggaaagaaaagaagataaacaaaagagggcagaaaacccagaaataaaccctgacaaatataatcagctgaactttcacaaaagaccaaaggaaattcaacagaaaaggtctggtctctaaagcaaatgttgaacacctggacatccatacgcaaggaaataaawaagacaccttgcaacagtcacagaataaactcaacatagattataaactgaaatgtgaaacagaaaatttagaacttctggaagatgacacaggagaaactgagggtaatctttggtttggcaatgaggattcagctgcaacatggaaaacataatccatgaatgagagaacaggtaaatatgggaactccgtactatctgcccaatttttctgcaaacctaaatgtgcactgaaaaataaagtccattaaataaaaagtaaatagacaaccattccatagaagatttatagccatgcaaaaaaattacacacagaataaaattttcataaaaacatgtaaaaataaagtataacacaggttataaagctatgaagaaaggaaaataaattatcttataattcataattctggagagaaatgggataatttggccttgagaaatcattttaagtaaggcgtgcagtgtgaaggtttcttccaagtattcatctggttgtcattatgtggacatttcctttacagtatttccgctgaccatgcatttgttttatatattttctgctatgcaacatttgtaggaagtttccaaattgcaaacaatgcacaaatctcagtgcaacacaattcaaaaagccactgagatctgtgcattgagtttgcattttggaaactcccttcaaatgttacgtatgcagaaaatacataaaacaatgacacagtcaaccgaaacactgtcaagctgttaaaagtaaattttttttttttttttgagatggagtctcgctctgttgcccaggctggagtgcagaggcgcgatcttggctcaatgcaacctccgcctcctgggttcaagcaattctctgcttcagcctcccaagtagctgggattacaggcacccgccaccacacctggctaatctttttgtatttttagtagagatggggtttcaccatcttggccaggctagtcttgaacttctgacctcctcggcctcccaaaatgctgggattacaggcgaacttttaaaaaataacacaagctattaaaactaatttttgttgtcatgaaataagtctaataaattatataaaataataatagaaaaaactatacaacgatatttatacattatacatcaaagtataataaaagaaatggcaagatggcatatgtccttagaaaggagactgagctccccataacgtaggctcttccacgtagttacagcattttaacttccatgaaatccacaaccaggtttgctttgttagtgaacttaagaaaaactacttctgaaaagygaaagagcagacaaatgtctgataatagcaaagatattgtagagaacactgtcatggagtattatacactgaatgtttatccccccagaattcctatgtgaaaatcctaaccacaatgtgccaatattaggaggtggcatttctgggagattattgggattaaacaaaatgataagggtgatctaagaatgggaattagtaccttcaggaaaagaggcattttctatccctttcagactacagagctatcatttaactattatttccacaataataaactgtgatcatatttgagtaytctaggggttgccgatggttgtccygtaggatgcagcaccaatcagccaagtacagataacagaaacagaacaggcttatacactgtcacaaattctccaacatgcgaaaatgagaaagtgatgttttggtgaatctttgtaattcgccaatttacgacacttttttttttccttggtggaaacgtattcattttctgcacccacaatggaagagacatttcccttatttgttttccctggtaggactgagtaaaggtcctagaattccatctgaaattactcaaaagagcagaaatttattccacatgtttaggggaaataaaaaggtaaacagtaattgttaacaaataaaatataaaactaaatatttaaatttttgaaatccatttccttctggcctcctcgaaaatattttacctttttatctctactgatgaaatacactttacatttaataaaggaatgaggctcaaacaaatctttttaaggtgacaacacagggaggggtggtactgactggaacacagttatgctgaaacgtcgtcaggccatcctgacatgtggaatgtcctccaaccctcaccctgctcactaaaatgctcagtgactgctcccccaagtgtactgtgccccctgtgtgtccaaagtgcttattttgctttgcaggttctttcaccacgtcactggggtgggtttcccttctctgttaatatcccaaaaggttagcattttagatgaagggtctatcggaagactcccctcagcacagaaccagctgctccactgagaagctacactcccatacctcagtctgtcctccggaagaagatgacccaggtcagatattcatcagacactccaagataaggccactgtgggcatcttgggttatgccagacagttctgaaacccaggaccaggaaaaggcaagagggtggctgaggatacatcactctttacagtttccatagaggaatctcagcccaaagacattctgatgaaatgtctgcgcttaggtaaaataaaaggaggagagtcatgaagattttatacagtggtcaggtggttattctctgcttttcttttatgtaaagtgttcagaaacaaatcaaatgttttaaaagttgccatccattactcattgaaacaaatgacaaaacagtacccattcaaaatggatcataggaaacaaatagttgataatattgtcgtgaactagagaggaaaagtggcattttggagtgtgaaaaggaaactgaaggccaggcgcggtggctcacgcctgtaatcccagcactttgggaggctgaggcgggcggatcaagaggtcaggagatcaagactagctgagaccatcctggctaacacggtgaaaccccgtctctattaaaaatacaaaaaattagccaggtgtggtggygggcgcctgtagtcccagctacttgggaggctgaggcaggagaatggcgtgaacccrggaggcggagcttgcagtgagccgagatcgtgccactgcactccagcctgggcgacagarcgagacaccaaaaaaaaaaaaaaaaaaaaggaaactggaatttggggaattcatcgccagccttaggaggagctaggctgggaaggacaagacagtggatttgagactctgtttttcatacatyttgaagattcagaggaaaacaggtgacacckggggagaaaggagaaccagtgaccccacggaccacaactacccctccacacaaaccctgcacaccaagtgaaaactctcctccgatgactctcccgtcacagccacacaatctgagggagacatggggctgtgggcacacagcttcccagagggccttgggccagagcaaatttgctggagcagtgacaggatgcctgggatcccacgtgctggcacagcctcaccctgcactgaaggggcactaaggtctgagctgcaccacagacactgggtcacagactctgtagctgaccacagggagggctgggtctggcctcagccaattctgcctggttccaatcagcccctccccgtgttaggatccccatcctgcacactcaccatttcccaacttctagagtgtccctgcatcttttccagaatgtcacgggtgtccctgcatcttttctagaatgtcgcagtacccgcaagcaggtcatagggcaagagaagatgcagcagagtcatctggarcctccttgatcagaggacatgcagcagtggagacaagaccctgagctctgctaccagtggctcttaagacaaaggctctgctgaattgtagaatgctacctgctcctctctggcttgctactgagcttctgactggatagggcttcacatgcctctgctccttccctaagtgacaagaaatgtgatcagatgtggggcccaatgaggccagaatgatgggttcttggcttccttcctgtgttgggacctgacctcacccaggaggcatttgcattgaagcagaacttcgtactgcctttaaagagttccactgttgtcttcctgcactccacagggcctttctgccttttcctcctggactcaggggcacagcatggacaggaaattatagactcattgtctaatggagccatcctcagcctcaaggaagaacggggcccaggtcaggcaacagtggaacatgcgggagccagacctctgcaattcgggacgaggctgttggccccaggatgaaagctacctcactctctctcagtctatgcactttctttctttcttttcttttctctttccttctttttatttttgactgggtctcactctgtcacccatgctggagtgcagtagcacaatctgggctcactgcaatctccatctcctggactcaaatgatcctcctgcctccctcagcctctcaagtagctgggaccacaggtgcgcaccaccatgcccggctaatttttgtagtttttgtagagacggggttttaccatgttgcccagctcgtcttgaactcctgagctcaagtgatccacctgcctcagcctcccaaagtgctgagattacgggcatgagccaccaggcctggccggtctatgcatgttcaaccaagaaaataaaaagatgccaataagaaactaaaattactaaatgcacaaaacactggagttatatggcagcaataytgcataaaggagttacaagggaagaaaagcaaacatttgctatagctcagataaggagcctgtttcacctacagttcaaaatgaaaaccctccttgagaaggttaaacatattccaagtttgagagccagactctgctgaaatgcagccccagaagtgatgagtccctggtgatgaggaaagaaaacctaaggagttaactccgtgagcataacatgcccttctgtcttccaagttttcttatgtgaaaaaataaagcctccgaaaaaagaatgacaagttcaattctactaaaattaagaagagtccatcaaatggtagactggagtgaaaagaaaaaattaccttgggaaaaaatatatttgcagtctttacaaataaagtggaatagcgtgcagagtatgtttaaaggggggaggggtaaaagcaataaacaaacaaataaatgagaactatttgaaaactatttcacagaaaatgattgaaacctatttcatagaaaattaccacacaggaaaaatgctcaaaaccaatgataatcagtaaaaagtatatacagtcacatggaaataaagaaacaaataaggctaagtatttgtaaggaataaacacatatttatgaagggtcagtttatccatacattccactggcattttctagcaaatgtgaatttatctgtaacttaaaaacccagcactttttttctcaatgcgtaataaatttatgaagcattgtcacttgggacaaaagcaaggacactgtcaacatcaaaaactaaacgtgtaacagctcaagtcccatagcagtgtaatgggtgaataggggcacccacagccttagacagtactctgtgtgcaacaaactgaggcaagaaatcacaaaaaaagaggagagtcaagatggtcaaccagacacagtcaggacgatcttttgcccacaaagcagaccatcaagtagaacagcacactataaacagatctttggaaagcaggcactgacagtggaccgagaaaggatgcaggctgaaacgggagaaaggtgggaaccccacccaggattgctgaggaccaggactcatttctggccctgggtggttcccagggaaggggtgagtaagataggcatggagaggtccactgttgccatggtcctccaggatcctagctgcgggagatcctacagcccccatggacacttgagctggaaaagagaactgctcagaaagttgacaaagacaggattcttagctgcacagagcccagaggtttggtgcagtattggctgcagtggagcatggtcatggatgcccatcccccaaaacttgccatagtcctccaaggcaaaagtttcttgaaaatataaaccacaaataacattctaaggcccctcagccatttgaatggacccctcatttcagataagggtatttcaaagttaacctggaaaactacttcaggccacgatgggaagagggagtcagacaagcttctttataccctcctcacttttggaattcgggaaaagccaaccagcattaacatcaacacagaccttaagttctgataataaacatttacaatctattctttctgaagcctgctatctggggatttcatctgcgtgataaaaccttagtttccacaacctcttcttgttacccagacattcctttctgttgataactctctcaaccaattgccaataagaacatttttaaawctacctatgacctggaagcccccactctgacttgtcccaccattccagatcaaaccaatttaaatcttacatgtattgatagacattattatgtctccctaaaacgtataaaagtaggctgtgcccccaactaccacaggtacatgtcatcaaggacctcctgaggctatgtcatggttacatcctgtaaccttggcaaaataaacttcctaaattgattaagacttgtctcggccaggcgcggtggctcatgcctgtaatcctagcacgttgggaagccaaggtgggtgggtcacctgaggtcaggagttcaagaccagcctggccaacatggtgaaaccccatctctactaaaaatacaaaaatcagccgggcatggtggcgggtgcctgtaatcccacctactcaagaggctgacacaggagaatcgcttgaacctgggaggcagaggttgcagcaaaccaagatcatgccattgcactccagcctgggtgtgagagcaagatcccgtctcaaaaaaaaaaaaaaaaaaagacttgtctcagatacattgagttcacaggtagttccccacaagcacaggcaaccaaagaagaaatggacaaaaagtatcacatcaagttaaaaagctccagcacaggccgggcgcggtggctcacgcctgtaatcccagcactttgggaggccgaggcgggcggatcacgaggtcaggagatcgagaccatcccggctaaaacggtgaaaccccgtctctactaaaaatacaaaaaattagccgggcgtagtggcgggcgcctgtagtcccagctacttgggaggctgaggcaggagaatggcgtgaacccgggaggcggagcttgcagtgagccgagatcccgccactgcactccagcctgggcgacagagcgagactccgtctcaaaaaaaaaaaaaaaaaaaaaaaaagctccagcacagcaaaggatacaatcaacaaagtgaagagacaacccacttaaatgggagaaaatatttgcaaactatgcatctgaacagggattaataaccacaatatataagaagctcaaacaactctataggaaaaaaatctaataatctgatcaaaagatgggcaaggctgggcgcagcggctcacgcctgtaatcccagcactttgagaggccgaggcagtagatcacttgagctcaggagtttgagaccagcctggccaacatggtgaaaccccatctctactaaagatacaaaaattggccaggtgtggtggtgtacatctgtaatcccagactcaggtggctgaggtaggagaatcgcttgaacccaagaggcagaggttgcagtgagccaagatcacaccactgtactccagcagcctaggtgacagagtaagattctgtctccaaaaaaaaaaaaaaaaaagatgggcaaaagatatgaatagacagttctcaaaagaagacacacaaatggaaaacaggcatatgaaaagatgcttaacatcactgatcatcagagaaatgcaaatcaaaactacaataggatatcatctcaccccagttaaaatggcttaaatccaaaagacaggcaatagcaaattctggcaagaatatggagaaaaaggaacccttgtacactgttggtgggaatgtaaattagtgcaaccactatggagaaaactttggagattcctcaaaggactaaaaattgagccgccatatgatcctgcaatctcactgctgggtatatacccaaaagaaaggaaaccagtatatcaaagagatatctgcactcccatgtttgttgcagtgctgcttacaataactaagatgtggaagcaacctaagtgtccatcaacaaatgaatgcataaagaaaatgtgctaatatacacacactggggtactattttgccaaaaaaaaaaaaaaaaaaaagaatgagatccagtcgtttgcagcaacaacacggatggaactggagatcatgatgttaagcaaaataagccaggcacagaaaaacaaatatcgcatgttctcacttatctgtgggatataaaaatcaaaacaactgaactcatgggcatagagagtcgaaggatggttaccagaggtggggaaaagtagtggcgagctggaggagaggtggagacagtkaatggctgacaaaaaaaaaatacttagaaagaataaaaaagacatactatttgatagcacaaggtgtctacagtcaatgataacttaattgtacattttaacgtaacttaaagagtgtaatttgattgtaactcaaaggataaatgcctgataccccattctccatgaggtgcttatttcacattgcatacctgtatcaaaacatctcatgtaatccatagatatatacaccttgtatgtccccaagaaagttaaagaagacaaaaaaaggtaacaaatgctggcaaggatatggaaaaaaagagaatccttgtacacagctggtgggaatgtcaactagtacaactactatggagaacagtttgaaggtctttcaaaaaaaaactaaaaagaaacctgccatatgatccagcaatcctcctgctaggtatatagccraaagaaaggaaaccagtatgtcaaagagatatccacactctcrtttgttgtagcactgtttacgatagccaaaatttggaaacaacctaagtgtccatcaacagatgaatgcataaagaaaatgtacatacacacagtggagaactattcagccataagaaagcatgagagcctgtcatctgcaataacatgggtggaactagaagtcattaagctaagtgaaataagccaggcacagaaagacaaacagcacaagttcttacttatttgtgggatctaaaaatcaaaacaactgaactcatggacatgagtcaaaggatggttaccagaggttgggaagtgtagtcagggggactagggaagaggtggggatggttaatgcgtatttaaaaaacagaaagaataagtaagacctagcatgtgacagcacaacaggatgattatagtcagcaataatttaattgtacactttaaagyaactaagtataattggattatttgtaatacaaagggtaaatgcttgaggggatggacaccccattctccatgatgtaattattacaaattgcatccctgtatcaaaatatctcctgtaccccataaatatacatacttagtatgtacccacaaaaattaaaaataaaaaaattaagaaaaaaaacatcgattaaagacttaaatgtggccaggcatggtagctcacacctgtaatcccagcactttgggaggccgaggtgggcagatcacgaggtcaggagatcaagaccatcctggctaacatggtgaaaccccgtctctactaaaaatacaaaaaactagccaggcgtggtggcaggcgcctgtagtcccagctacttgggaggctgaggcaggagaatggcatgaacccgggaggcagagctcgcagtgagccgagatcacgccactgcactccagcctgggcgacagagtgagactccgtctcaaaacaaacaaacaaacaaacaaaaagacttaaatgtaaaacctgtaagtataaaaaccctagaggaaaacctaggacataccaytatggacataatccttggtaaatatttcatgacaaagtctccaaaagcaatcgcaacaaaaacaaaaataaataagtgggacctaatcaaactaaagagcctctacacaacaagataaactgtcaacagagtaaacagacaacctacagaatacaagaaaatatttgctatctgtgtatctgacaacggtttaatatccaggatctataagaaacttgaactaatcaacaaggaaaaatggcaaacaactccataaaaaaatgggcaagaatatgaacagacacttctccaaagaagacatacacatggtcaagaagtgtgtgaaaaattatgctcaacatctctaatcattagagaaatgcaaatcaaaaccatccagtcagaataactattacaaaaaagtcagaaaataacagatgtttgcgaggttgcagagaaaagggaatgcttacacgctgctggaggggatgtaaattagttcagccactgtggaaagcattttggagatttctcaaagaccttaaaacagaactaccattcaacccagcaatcctattactgggtatatatatccaagggaatctgaatcattctaccaaaaagacacatgcatgtgtatattcactgcagcactattcacaatagcaaagtcatagaattaacctatatgcccagcaacagtaaaatggataaagaatatgtggtacacatacatccagggacaattacacagccatagaaaaaagcaaaatcacgccctttgcagcaacatggatgtagttggaggccattatcctaatcaaattaacacagtggcagaaaaccaaatactgcatgttctcacttataagtgggagctaaacgatgagtacacacagacacaaagagttaaataaacactggtcatacttgaagatgaatggtgaaaatagggtgagggtctaaaaactacctattggttactatgttcaccacctgggtgataaaatcatttgcacacccagtcccaccagtgatatttgacccatgtaacaatcctgcacatgcagcctctaaacctaaaataaaagttgaataagaaaaaaagaaactggtgaatgatgaaggtctgaatatgaaggtaataaattacatgccttaaagtaatatgaaaccttttataccgtacattatttatactgttattttttaaatttgagttatctattttgaattttcattaaaacgtaagaactcatttataaattgggtaaaatacctattgctaaatatttgtatttcctttcacagttttattctttctttctttttttttttttttagatggagtctcactctgttgcccaggctggagtgcagtggtgcaatctcggctcactgcaagctccgcctcccaggttcatgccattctcctgcctcagcctcccaagtagctgggactacaggtgcccgccaccaygcctggctaattttttgtatttttagtagagacggggtttcaccgtgttagccaggatgatcttgatctcctgacctcgtgatctgcccgccttggcttcccaaagtgctgggattacaggtgtcagccactgcgcccagccactttttttttttaaacagcgtctcactatgttgcccaggctaaagtgcaatggtgcaattacagctcactgcagcctggaactctgaggctcaagtgatcctcccacctgagcctcccaagcagccgagaccacagctccgcactgccatgcctggttttgttttttttttttttaaagttcaggcagggtctcatcatgttgcccaggctggtctcaaacttctgaactcaagtgatccgcccacatcagcctcccaatgtgctgagattacagtggtgagccactgtgcctagccttattatttcaaacaaaaattaatatatacttaaaaaaagaaaccacaggccaggctcagtggctcacgcctgtaatgccagcactttgggaggccaaggcgggaggatcacctgaggtcaggaattcgagaccagcctggccaacatggcaaaacctcgtctctactaaaaatacaaaaaaattagctgggcatggcggtgcatgcctgtaatcccagctagttgggaggctgaggcaggagaattgcttgaacctgggagtcggaggttgtggtgagccgagactgtgccattacactccagcctgggcgacaagaacgaaactctgtctcaaaaaaaaaagtgtgtgtatatatatatatatatatatatatatatatatatatatatgcatacacacacatacacacacacacacaaacatcttttcggcacagtattaatggtgtactaatagtaacattaagctactaaaaactcaagaggtaaaactatgcagccataaaaaaagagcaaaattctgcttcatgatagttaatctacaaagaataagaaaaaataatcaaaactgcagtcacatctctgagcagaagttagaaaagatcagaacaccagaactgcacaaggtctgtttattcacctggacggtgagcccatgactttaaagtcttatcatttaaacttagcataaaacaatttattccaagaattatctacgattttttcaggtcatatcacccaattcactcatttttcaaccaagaaaatcaaaatctcacattcaaatcatggaataaaattcttaaatactyacccaaactggaatgataacccagcaagattttataaagatgaaccctgtgctcagtargttaaataggttcccaagcttgggggccactctcaaggtggagatacagcccaaggtggttcattcctagggaatgagtgaaggcaagcttgggggccactctcaaggtggagatacagcccaaggtggttcattcctagggaatgagtgaaggaagcctgagcaattggaaatttaattctgggagctccacacaccctatttatcccctgctcacagtgaggaaatgctttcttctccagggtctcaattctcaccagtgaccactctcccagagtcaggtgaaggctctgatctgtgagtcctttttctgataccaaatgtgtggactttgctgaacaccaaccaattctccaacacctactaattgtccaacaattaaattccaacaccactcagagtcaacacataccccataagctcacagatcagttccacaacactgcccacattgcacatgccagttgcaagcctgaggggcccatctatccttctgaccaattgctcataagtcagaggttcccatcaccccttcctcaggtttgataacgtgaaaaacaactatgcccagaactcagcaaaaacaatttactgatgtttaccagtgtattatacaagatgtgactcaggaacaactcaatggaagagttgtagaggacacgggaacatagcaggggaagatggggtgagtaggtaatcctgttaaatatatgcaagttaaaaaacaaacaacaaaaacattctttgtgttctccaggaacagcttggtgaaaacaaacaccttctcattatgacttagatgatgcttcctttacgtacaataaagccagaaacagacagcgtaatttttttttcgcctcttaactaattagctgaccaaatttgtcttcagtggtcagaacaaaatacttgctaaccaaattttacttaagtttccctccttccctcaggcccctgaactctgatataccctcagcctgagccaacatacaacccctctttatgcctctcctgtgaacaggctgacctcagggtgaaatgttctctgatctagaatccatccggccctcttcctctcctcttttttctaatctagtttgctccttcctatgaaagaaagcccttttctgcctaacctttaacatgcttgccactgttatacccagtgtttttcctcattgcaatacttcagaataaactcccttcttacataattctgaatttactttattgcagcagttccccacctttttggcatcagggatcagtttcatagaacacagattttccatggatggtggggatagttttgggaccacactgttctacctcagatcatcaggcattagattctcataaggagcacacaacctagatccctcccatgcacagttcacagtagggttcgtgctcctctgagattctaaagccaccactgatctgacaggagaaggagctcaggtggtaatgttcactcacctgctgctcacctcctgctgcatggcctggatcctaacaggccacygacaggtactgctccatggcccaggggttggggacccctgctttattgaataatgtctagaaagaatgccaggacaatgaaaattacacccttaaaaaggggatctcatcctttcaatccaggcccaaccacatccacctgtgaacaccagatttccagaactctgtagcttctctcaatataaagagctcctttcatggctgaggtgagcaggctgggacatctgtaaagggaggctcccaaggaagaactgagtgaggcacttacgtttaatacctcaactggaaaagccaaagtatctatccctatcatataataaatatgtcatttatttattatttccatgataacaaatcatctccaggagttgccaagtcctatcccataaaacttagcattaaactccaatgtccagataacaggataaaaaacagggttatccactgttataaattctccaccctgcaaaaaggaggcactgatgttttgataaatatttataattcaccaatttatctacaacacttgcttgtggaaatgtattcatttttctgcagccataatggaaaagagatttttcatatttttccctggtaacattttgatatagtttggctgtgtccctactcaaatctcatcttgaattgtaactcccacaattcccacatgtggcaggaacgtggtgggaggtaattgaatcatgggggcaggtctttcccctgctgttctggtgatagcgaatacgtttcatgagatctgatggttttaaaaactggagtttccctgcacaagctctctctctctctgcctgcagccatccgcgtaagacgtgacttgctccttgttgccttccgcatgattgtcaggcttccccagccatgtggaaatataagtcctttaaatctctttctcttataaattgyccagcctcaggtatgtctttatcagcagcatgaaaacaaactaatacacattcccaaagcaaagtcctagaattccatttgaaatctccttcaaaaaagaacagacttgagaaacttactacactcactcttgggaagaaaaaggttaacaagaatttttaacaaatggaatatgaatagatttttgcccccttgaaatccacctccttcttgtctctttggaaatatttttttttaatctttcaagctctctgaataaaacatattttaaagttaatgaaaaactgaaactgaactaagtgaataaatcttttcaaggcaataaactcagggaggggtcatgctggcagaacacagacatctctgggtcaagagtcaggtcaggtcactgcatcactttggagatcctcacaggcccattctcctcacagaaatactcaatgaccaccctcccaggagacactgtactgtgccccactgtgtgcttgaattttttttttttttttgggacggagtcttgctctgtcacccaggctggagtgcagtggcgtgatctcagctcactgcaagctctgcctcctaggttcacgccattctcctgcctcagcctcctgagtagctgggactacaggcgcccgccaccatgcccggctaattttttgtatttttagtagagatggggtttcatcacattagccaggatgatctcgatctcctgacctcgtgatccgcccgcctcggcctcccaaagtgttgggattacaggcgtgagccaccgcacctggcctgtgtgcctgaatttctaagcccttttctgcctaaactttaacatgcttgcagctcttatacctggtgtttttccccattgcaatactttagaataaactctcttttttttttttttctttttcaaactgagtctccctctgtcacccaggctggagtgcagtggcaccatctcagctcactgcaacctccacctcctggcctcaagcgattctcctgcctcagcctcctgagtagctgggattacaggcatgcaccaccagactgggctaatttttgtatttttagtagagacagtgttttgccatactggcaaggctggtctcaaactcctgacctcaagtgatctgcctcccttggcctcccaaaatgctgggattacaggcgtgggccaccacgcccagccaactctcttcttacataattctgatgatggtgcttttctggttcttgcaccacctcactggggtgggtattccttgtcctttgagatagtttttctcctttcccaagtccgagaaaatccagagcgcaggaatcatttctagatttttcccttaataccagcatctgactggctgccaccaacgtgtctccaaggaatgatgaaaactggggttggaggaagaaaatcccaatgcaccagggatttgttttttaaacgaagagtatactaggagacgtctctcaactccagggcacccagatgctgcctggagaggctctacttccatattttaaactgtcctctgtgaggagatgacccaggagaaggtattcattagacactccaagagatctggctgctaaacagaggaccaagaaaagatataagggtggctgaggacatatcaccctctaaagtttccaaaagggaacttcaccccaaagatactctggtaagatgtgcacactcaaaaaagataaaattaggagatgcacaaagactttttttttctacaattaactgtcaggtgattattttctgctttccactcatgtgtaatgttcagaaatattttaagagtgaaaacaaatattttcagaacgactcactactctgaaaaaaataacacacttcatctgtatgaaatgtacaataaaagacaaatacttgataatgttgcatttgaatataggaaaagaattggaaatttagggttttactacaagccccagaagagttaggctgtgggaacagggtcgttgatgtgagatcctgttgccatacacttagaaatgtggagtgttatgtgaaaataattaaacacaggcactagggagactgaggtggggggatcgcttgagcccgagtccaagactccatcatacacatgtacatacacacatgaatgaataaacaaccaaccaaaacgtaactcatgcttgtcttgtaaattaataacttaaagggaaacaaaacagccttaaacaaccacgaacccaccaattaacctctggttacataaccaggagatatctggctgcacagtctatatggggtgactacataactgtacacgatcaattatttaattgggtttgcttcctcgggttccttacaaaaaaccctttccttccccaaaccacaaaccacgctggtggcttcctaactcacgactctctgctcaaataaactccttaatattttaacggcgcctcagttttctttctaacaggagaaaggaggatttggagacttcacagaccacagctcctcccacgcaggaaccccgaaccccaagtcgggactctcccctgaggaccctcccgtcggcaccgcacgatccgagggagatgcgggtctacagrggcagagctgcccagaaagggttccgggcctggccgaagcggcggggcagggacaagccaggcggcccggggtstggctgcgggtccagccccgcatcctgtgccactaaggccgcgaggcgccggmggaaactcgggtcggcaccgcggggaggtccgggttcgccacaaccgcttcctgscggttcccttttccccttcccgagacacctggccggcacactcaccatttcccagtctccggtgtctggggtcctccctaaggaccttccgggacctgcaggtcccagagcaacagaagctgccgcgggaccacttggacctcccagggataaggggaaggagcagcggagacgcaccgagytcgccacattcgcgctgcccaacacaaaagccgcgccaggkcccggaagctgctccctcctttcgcggcgcgcttgagagtacagtccccttcccagcgcccgattggacagggccttaggccccgccccttcagtcctgagtgacgggagatgcaatcagacacggcgctgagtgaggccaggttctttccctgcagtccttttctaaggcatggattctgccctgtgctgagacctggcgcccccygggggactttcccattcaagctyatacacargattatgtccatttatgagtaatatttgtgatatttacaattggaaacactatgatgacaattattctaaaatttcagatttcacaaccttcctggcctctggtcttttgaggaggcagcctgaatttttttttttttcttgcttctagtgggattagaggcagcttgaattttgaaaagacaatgtcctctcaggtagcaacgccccatagaaataaaatgtgagccgcgtgtgttccagtagcaatagaaaagaaaacaacacgtgaaattgattacaatgatttatttaaccaaatatatccaaaaatattgtttcaatatatgatcgatgttaagctcgcgcctaattgaagagactacccaaacaggttaagtgtgagcagcaaggctagtttactcactcgggtgcgagcgggctgagtccgaaaagagggtcagcggagggtcgtgggattggagttagttttataggtgaggggtaagcagtggaaagttacagtcaggggccgtttattaccggcrggggaagaatgtcacaaagtacattgtcacaagagggaggggtcacagtgtcactaggctgattgatcagttagggtagtgcacgtcacaacggtaaaatgctgcaaggttggctaatcagctaagacagaaactagccgtttttcttcctttgtggttttcctgttgtcccagactttctggctccaggaccttctggatgtacacgtgtgggtcacagggatcacaatggcttgaccatggcgcagcctgctcagacggccttacaatcgatatattattaatgaaaaatcactctatatattaagcttccagcatgtttcaattcagcctgcacatttggatacacgtgtctggttttaccactttattttaaggttgttcgggaatgtctgcctgttcctttcatgtaactgttcattatttattgattactatttcttaatttcacttatctcagtgagagttgccaaatagtggttttctaattattttctctacaggtattagttctcattcttctattaaaaatggcgttttctcatgaactctctccattacattaaaacctaccctattaggaaaggaagaataaaagcttgattctccctttaatcaattgtcataacaatgacggcgtggcctcagcaaacaaaaaaaatgtgagtgacttttttctaaccttattttttgtgtatttaatgagattccatacactgcagtctgtatctattttttgagctcaaattatcccttttttttttttttttttttgagaccgagtctcactctgttgcccaggctggagtgcagtgtggcatgatctcggctcactgcaacctctgccccccggattcaagcgattctcgtgcctcagcctcctgagtagctgggattactggcacccaccacaacgcctgattaatttttgtatttttactagagacaggctttcaccatattggccaggctggtctggaactcctgacctcaggtgatccacccacctcggcctccgaaagtgctgggattacaggcgtgagccaccgcgcccggccaaattgtcccatcgtaagtgaggggctctatacattgcctcctttgtccttgtaccatatgttttgagagctttcttattttctggagcagacagaaactgtgtgcttccctttttctgttatatacgttgcaaaaagatgaccatttggcattttcctttttacttggcttatggcgtttcctaacactcacaatattctggttttatattgtatctttatcaatgttttaatttaatatttcttggttttagtcataagcccgatttatcctcacagcttgtagaaatatttatcaacgttttcttctatttttatgttttcttgtcttttttttttttttgagacggagtctcgctctgtcgcccaggctggagtgcagtggtgcaatctcggctcactgcaarctccgcctcctgggttcccgccattctcctgcctcagcctccccagtagctgggactacagccgcccgccaccacgcccggctaattttttgtatttttagtagagacggggtttcaccgtgttagccaggatggtctcgatctcctgacctcgtgatccgcccgcctcggcctcccaaagtgctgggattacaggcgtgagccaccgcgcccggcctcacccttttttgttaaaggcatgttaggtaggtaagtattcacttcttgcttacgtgacaatttttgccaggtccattaatatttatttcattatttttggctctactcaagctgtggaaattttgctctcatcttcgtaaattatctctttttttctctgatttttagtgttttccttctctttggtgttatgcaccttgactattatttaagtaattttttttgacacattgcatttctgaattcaaggatttatgtctgatgttcaattttaaaaacttataaatcaccgactctttgagtacttacttgaattattttaatatagtctagaaaaacaattagatttgttttattctctctcatttcacttctatgtttaattatatttgtattttatattttttctccttctactatttttattttgctcaatataccagttaagtaatgttctcatcagctcagaataacttaacatttaacccatatgttgtatattaagcatattaattacattttcaattatttacttcatatttagctcttttccaaatatggcttgtcaagcggagagtttcttgttctttgcacactattatattttttctgtttccctcattgtattgaaaaacattttaaatgtaagttctataactgtaacataagttgtaattcggatctcccttacgggcgcaatcacttttgaaatgtctgccgtcagcttatgtgtttttccatttgctttatggcaatgggaaatctacatggatgtggtatatgtgtgatcaccaatatataaaagaaacgcttcctttttttttcttgcatttttwaattatactttaagttctggggtacatgtgcagaacatgcagttttgttacataggtatacacgtgccatggtggtttgctgcacccatcaacccatcatctacattaggtatttatttctcctgatgctatccctcccctagcccccatcccccaacaggctctggtgtgtaatgttcccctccctgcatccatgtgttctcactgttcaactcccacctatgagtgagaacatgtggttcttggttttctgttcttgtgttagtttgctgagaatgatggtttccagcttcatccatgtccctgcaaaggacacgaactcatcttttttatggttgcatagtattccttcgtgcatatgtaccacattttctttatccactctatcattgatgggcatttgggttggttccaagtctaacattacaacagaatactactcagagatacaaaggaacaaaaacaactgaagagcatgccctagatgagcctcatgaatgtgctgagtgagacagctggacataatatcttttgtatgattacaggcaaagtaaacctatagtaagaaaaaagaaaaattaaaaaatcaggacagagacagttctgtgaagaatatcagtgttagtttaatgggaatagcattgcatccaaaaattgctttgggcagtgtggccattttaatgatattgattcttcttatccatgagcatggaatgtttttccatttgtttgtgtcatctctggtttctttagcaggggtttgtagttctccttgtgcagatctttcacctccctagtaagctgtattcctaggtgttttattctttttgtggcaattgtgaatgggagttcatttatgattttgctctgtttgactgttgttgatgtatagaaatgctagacatttttgccattgattttgtatcctgagactttgctgaagttgcttatcagcttaagaagcttttgggctgagaccatggggttttctagatactggatcatgttatctgcaaacagggatcatatgacttcttctcttcctatttgaatgccctttatttctctcacttgcctgattgccctgaccagaacttccaatatctatgttaaataggagtggtgagagagagcgtccttgtcttgtgccaattttaaaggggaatgcttccaacttttgttcattcagtatgatgttttctgtgggtttgtcatatatggctcttattattttgaggtatgttccttcaatacctaatttattgagagttcttagcatgaagcgatgttgagttttatcaaaagccttttctgcatctattgagatgatgatgtggtttttttctgtagttctgtttatgcaatgaatcacattaattgacttgtatatgttgaaacaaacttgcatgctagcgatgaagcctatttgatcgtggtgaataagatttttgatgtgctgctatattcagtttgccagtattttgttgaagatttttgcatggatgttcatcaaggatattggcttcaaattttcttttttttgttgtgtctctgccaggacttggtattaaaatttatatggaaccaaaaaaagagcccaaatagccaagacaatcctaagcaaaaagagcaaagctagaggcctcgtggaacctgacttcaaactatacgacagggctacagtaaccaaaacagcatggtactagtacaagaacagacacatagacaaatggaacaaatagaaggcccagaaataagatcacatgcctacaactatctgatcttccacaaacctgacaaaaatcagcaatgggctgggtgcgatggctcacgcctgtaatcccacactttgggaggccgaggtgggcagatagcttgaggtaaggagctcaagaccagcctggccaacatggtgaaacccccatctctaccaaaaatacaaaaattagccaggcatggtggcaggcacatgtaatcccagctacttgggaggctgaggcaggggaattgcttgaacctgggaggcagaggttgtggtgagccaagattgtgccactgcactccagcctgggcaacagagcaagactttcatctcaaaacaaacagacaaacaaacacctggaatagctgtctagccatatgcagaaaattgaaaccggaccccttccttacaccatatacaaaaattaactcaaggtagattaaagacttaaatgtaaaaaccaaaactataaaaatcctggaagacaacctaggcaataccattcaggacataggcacgggctaagatttcacgataaagatgccaaaagcaattgcaacagaagcaaatatcgacaaatggtatctaattaaactaaagagcttctgcacagtgaaagaaactattaacagacaacctacagaatgggagaaaatttttgcaaactatgcatctgacaaagatctaaggaataaagaattttagcaaatgtaaataaggaatttaagcaaatttacaagaaaaaaacaaacaaccctattaaaaagttggcaaaggacatgaacagacactttaaaaatttttaagttccaggatacatgtgcaggatgtgtaggtttgtcacatgggtaaatgtgtgccatggtgatttgctgcacctgtcaactcatcacctaggtattaagcccagcatgcattagctcttttccctaatgctctccttccctgaatcccacctcctgacagcccccagtgtgtgctgttcccctccctatatccatgtgttttcatcattcagccccaatttataagtgagatcatgcagcatttggttttctgttcctgcgttagtttgctgaggataatggcttccagctttatccacgtccctgcaaaggacatgatctcgttcctttttatggctgcgtagtattccatcgtgtatatgtaccatatttttctttattcagtctatcattgatgggcaaccacctgacccgtcccgccctgttgtactcacacctgcgattgcccctctcacccacattcaataccaaagccctggccttgtcacagctcctggaatccaaagagccctgtgcctcactctcctcatctgcagcatgagtgtctccctcccacctccagcctggcacacagaccccagggccagggacccagagccattttgatggcccagcccctctttcatcccgaggtgacccaaccctggatttgaccccaaggaggtcatgccccaggcctcagtccctcacctgcctgttgagcgcagggcttgtgtgggaagcaggcctcacccccggccagcctatgtgcctggaatctggtctcacctgtgtcttagactcatcctcccatcttcctcacctcctgaggagggagcacctgtaatgcaggagagggtgtgagtgggcgggggccctgaggcagcccacgccccggtgcctgctgcttctcagctgggggaagggactttcaccccaagggctcaggctctgactcgccccaggaggaccctaggcgcccctcacaagcgggaatggagcccctcaggcagcacctcctgggggtcctctcctctctaccaatgacaagcaagaccttcagggtagggttgtggcagccacacctccagagaccccttggctgctcctggaccacacagctgctcagggaaatttaacctctggccccctccacacaggagggccacasaggggccacacaggtgacccctgcaggcactcacctgtcactcgcacacagaagggcacagtacacataacctgggtgagccgctgccagcggctgttggcctcagcgttctcttgcaaggcattcagcaccagcagccactggggccccatcagaatgcagttcaggacaccagccctgccccaaccttgacccagacagtgggtggcatgggaccacctctgggtgagtggcagctcagctctaaggtatccctgctgccaaagaccaactgttcctgctagtttgaatctggccacagggtctctgttggtgagacagatgaccatgaggcagacaccctgaaatctagcatgacagagctcaacgcccccatgagagtcaccatagcacccagactttgcagacatagcagcgaaggccacagcaggccctgagtgaggaacaatctgaccaagatcctggggtcctgccacacagccctttaaccaggcactggaaactgtttccctaaagagccaggagtcagtattttcagctttgccaactgatccttgcctcgaggatgcaactctgccatggctgctcgacagcagccctctgagacagcctgtgaagaggtgggcatgacggcagccccataacactctacttagggacatggaaacttctcagtgccataaagtattatttttttatttgttcaaccatttggaaatgtgaaatccattcttgattcatggaccacaagatcaggcagggacaggctgccccttgccgacctctggaacgagcttagagaaggaaatgacatgctgggtgcggtggctcacgcctgtaatcccagcactttgggaggccgaggcgggtggatcacgaggtcagcagtttgagaccagcctgaccaacatggtgaaaccccatctctactaaaaatacaaaaaaaaytagctgggcatggtggcggctgcctgtaatcccagctactccggaggctgaggcaggagaatctcttgaaactggaargcagaggttgcaacgagctgagattgcaccactacactctagcctgggcaacgagagcaaaactccatctcaaaaaaaaaaaaaaaaaagaaggaaacgacaggctgggccagcgcagcctcctcacagcagattcactgcaggacgggtccttctaagcaaccacttctcatccttcatcttggcttcaagcgcagttcaggtggagaaagagagaacagaactggcctcagcaacaagaaggaaggagatgcagggtcaagcagcagtgtggatccatcacactcaacattcacaccaagcagagcacaggcaggaccagcccagcgggggctgaagtggaggctctctggggtgggggatctctgggtggacaagattctctacctaaaactcatatagaagttccacacagcagtagttacagaaaacacacactaagaaaaaggccaaaataaaaataggacaccaagtttggccaactgggtmtcacaagccagtaggtaagaaagccccaggagggcccaccagagtagctgggggtgggttcctgcctgcagggggcctgggacaccccattctcacagatgaggaccccagctttggggaggaagctgtcagagtcgccaagtgagctgatcagagctggagccacagagcaggtgaggagccctggccacatccccatgagggctgagaagctggagtggaggcacagccccaggggcagatgcaaacagtggaccctgggccctccccctgcccagaggatgctcagctcccaagggaccaccaaggcctggaacccagggacacaccacctgaccatcatgcccaggcctcccagacaaggcaatggccaggacaggcaggcaggctggacttggggccaggacaggggtggatggtcctgctaggcaagcctcctcctccctaccagctgggctggttgcactgtagttttggttctggcaacatattgctgcccactttggccacaccagtccctggctccctggccaggcccagtgctgyccaacccccctacacgggccccacatacccactgcccaccaggctcctgtcagccaggaggggaggacccaggctcatcccctgaagtatccgtgggagcctgcatcccacaggaacccacagctcagggccaacctccatgatggcctcttggttgtggtggcaggagcgggggggagttgacctccacccctcccatcctggccactgtgttttgtggggatcattcagtcctgggagcgtcctggggactccagaaggaagagaacagggtggtcatggcagcttcagcccaaggctctgggcccaagtgcaacagtcctttggttctggtttgatctgggcaataacaacgggtcatgtcattcacacaaggattggcttcaatataatgcatcaagggactgtggagggcacagatcagcctccaggccagttacacttggcggcttagccgatgcaggctggggaatggagaagctgacccctgacctccccacctaccctgcccaccagatgccatagcagccagggatccctgacgtcaggcagaggcagggagcacagttgctgyctcctttgatcccatcccagggcccgcagggcctggagaaacctggcaggggctgagttgggagaatcaggcagggggatgccaactgaagaatgtgagggatggggtatgagggcactaagggcacagggtctgcctcccctggggaggaggcagtgggacacagactagccgagcctccacaggccccaccctgctgccaggcacatgtggtgcccatacccaccccaacggctgcaggaagtttcttcgtcaacaaaaggggaggacacatccacatccacataggcattggtgcccacacacatcagagaagaaaattcctgctgtgcccaaggtgtggggaaaggggcaatgtccccttcctccccatggtgggtcccaaattacctgcttctgccagcacccccacccccaactccacaagctgctgacctccatcatagtgccatgccacgtgccaacaccccacccccaactccacaagctgctgacctccaccacagtgcatgccacgtgccaagaacagctcagcggtgcatcccaaaggrtgctatcttggagcggctgcgctgggcgagggacacgcttcctagtcacagagattttgtttctttaccactcactggccctgtgcctcagtttcccccactgtggcacagtgtaaaaatcccatcttgaaggctaggaacccagaaaggtcaccacacccggtgaaatggggggtgaaactccctgccttggacctcttgctccaggactgatgtccatcaggacatggccaggccagcatcctggggagggctgcgttccctgcctggggaaccttgctcccagtgagggatcactagagttgaggcccctaatggactgggggaggcacagggtggaacggaggtagctccatcataagggcctgtgtagaccccagaaaacaagcatcaagttgagactcttgtctgaagctggccgcctgaaagtatttgggctttgggggtgtgatgagggcctggggtcagggaacaaagtgttctggtttggacacgcaggaggttctctgcggctctctcaggtacatagtatggtgctaagtatatgcttttaaaaagcctaagaggagggggcacccagaaggggcccggaagtcaagggcaaggtccagcctttccacctccccagctgaagacgtgctggaggacaattctccaaagtttcataacaaagaagagaaaaaagaaatcaaaaagacctggaggatgggcaaggtaatgagagcttactgggattaccctgcctaatcctcaaagcaagccttccctatctgtcctctgggccaggtgaggaaacaggtcacagtaggacattcagaccctggggaggcagctggcagcctggagcccaggaggtccaaacagactgccccagccccagccctcagccaggagcggctccacccccagctcgttcactggtaaatcaggccgactgggctgcctgcccttccccaatccccctggctcaacaggcaacagcctccctgctcgtggctgccagactgcagatggcaggcagtgcacgccccctttattttggcttctcagctgcccaccaggccatccctctccgccaggccacctggagcctggcagtgcgcatgtggggtggacagcacctggaatccttgggcckgcttggctgggggctgcggcttctgtgcagggtggagttagtgtcccatcccattccctgaccccatggcccctccgagaaggccctccacgtactgccaggccttgaccaccagtcgcccacatccaggaggcatygacgtgctcrcctctgaytggcagtgggcatgcaacctggggcagaccccttcgaatcccaggtacgagcgagctaggtgagggcaaggtrgcatcagagtgtcaccrctgtatgtcagccactgggggacaggggacaggcttcagcttacagccatcttccaaattccagcctctcactttggcagaagctggccaggaattggggcygatggatgggtggggtctgcagacaccgtgttcaggtccccatgatggcctcacacatgggtggtggcttgggccacacccgagcccctgcttgggccctgatctttgagaagggggagcagcagaacccgggcactgacgctacagtgccactcacacccacagatttctccacasaggcatcagtctcggtcctggccacctcctcctggacggcttcagccattccccgggactcacgtggtccttcctcacacgcggctctggtaggatgcattgctctgtacccagggacctctgaggtgacaatggccacggtcatgcagagtgcaagggcacaggctgggtgcctattgtggggaccgtgactgcagcactcccagactatcctcgggcatgttgcccccaggcttagctagggcaccagcggtaggtgcacactgctccggactctgcaggaggaggacaactgttacctgtgtctttatgttctcctgctgctgtcactctgtgcttctcatctccttgtggtaggattcagggcagactctctgaacaccttgtgggaaatagcagagtccagcagggaagagagaagcccagctgcaaaggtgaaaaaatggcaggtgtgacaaggacccccattcagatttaaatgaggtcctcatttaatctctgttctgattggataacacttcaagtgtgtatgtgtgtgtatattttttgtttgtttgtttttgtttgagatggagtttcgctcttggcatgcccaggctggagtgcaatggtgcaatctcggctcactgcaacctccgcctcccgggttcaagagcgtctcctgcctcaccgtcccgagtagctgggattataggcatgcgccaccacacctggctaattttgtatttttagtagagactttggggtttctccatgttggtcaggctggtctcgaactcctgacctcaggtgatctgcccgcctcggcctcccaaagtgctgggattacaggcatgagccaccgcgcccggcatatatacatacatatatatatatatatatatatatatatatatagagagagagagagagagagagagagagagagagagagagagagagagagagagagagagagagtctcgctctgtagcccaggctggagtgcagtggtgtgatctcggctcactgcaacctctgcctcctgggtcctggttcaagcaattctcctgcctcagcctcccgagtagctgggattacaggcacacgccaccatgcccagctaatatttgtatttttttttttagacagagactcacagagtgctgtcacccaggctggggtgcaatggtgtggtctgggctcactgcaacctctgcctcctgggttcaagcaattcccctgcctcagcctcccgagtagctgggactataggytcctgccaccacacctggctaatttttgtatttttagtagagacgggggtttcactatgttggccaggctggtcttgaactcctgaacttgtgatccgccctcctcggcctcccaaagtgttggaattacaggcatgagccactgtgtccggccactatgccccacctctactcaaggtgataagcaagcctgggtgcctcctcttttggtgccagcagaaaaagcaaactactacacaaggctcttcttcagtacatgcatatacaaactctcaccctggccccaaaccataacaaaaacctaagctattctccttttcttacgctctcaggccacttttcgcctgtttgagagtcctgccctgctctccccaaagacctcaattatggacttgtggctgggggccacctgcctctgcagatgaccataacagctgtagaaaggtaaaatggtgtaaacattgcaatatatgttattttcaattgacaaatcctgcaaatcttttcatatcaataaatgctgcccctcatttttaagtgtgtatgatgaggccatttatccaatattttctaaataggtacttgaattatttctaatcttttgctattacaactgtgaattaaaactcacactgtcaattcagagaacaattgttcctttccacttttatggtgctttaaatatattaaaaatgaaaaaatatacacatacacacaacacaaagcacacacgcacacatacacatgtaaaagatagggtttcgctctatcacccaggctgaagtgcagtggcatgatcatatctcactgcagccttaaattcytaggctcaagcaatcctcctgcctcagcctcctcatgagtagctaggagtgtaagtgcgtaccactacgtctggctaatttttaaaattttttgtagagacagtgtctctattttgcccgggctaggctgtaacacttggctccaagcaccaagcaatccttctgcctaggactcccaaagtggtgggattataagcatgaaccatgtgtccagtctgaaaataaaaatatataatatcaaaacttctggaatgcagtgaaagtattgcttagaaatttacaacgttgaatgcatayattacaaacaaataaaattatacacccaatgatgtaattttctactttaggtcactaaagaaaaaagaacaaattcagtcgaaagaaataaaaacaacaagatgacaagtcaatggcactgaaaatagaaaatcaacagaagaactcaatagaacaatagctgtttcttcataaagatcaacaaaattgataactatcaagcaaggctaataaaaagaaaaaaagaaatcacacaaattactataaggtgagtacaaaagtaattgcagtttttgcattcttggaatttgctgtttgataccggcataccctcttaagtaaatgtggttatgttatacatcattttaatgggcatttcttgcttttttttttttgtaatgacttattacttattttagactatggaaaagatgttagacaaaaagcaaattcaagcgactttcttattcaagttcaaaatgggtcgtaaagcagcggagacaactcacatcaacaacgcattttgccaggaactgctaatgaatgtacagtgcaatggtggttcaagaagttttgcagaggccgggtgcggtggctcacgcctgtaatcccagcactttgggaggctgaggcgggcggatcacaaggtcaggagttcgagaccagcatggccaatatggtgaaaccccgtctctactaaaaatacacaattagccaggtgtggtggtatatgcctgtagtcccagctgctcgggaggctgaggcaggagaatcgcttgaacctgggaggcggaggttgcagtgagccgagatcacgcaactgcagtccagactgggtgacagagcgagactccgtctcaaaaaaaaaaaaaaaaaaaaagttttgcaaaggaggcgagaggcttgaagatgaggaacatagtgggcagtcaccggaagttgacaacgaccaattgagagcaaccattgaagccgatcctcttacagctacacgagaagttggtgaagaactgaacgtcggccattctatggtcatctggcatttgaagccaattggaaaggtgaaaaagcttgataagtgggtgcctcatgagctgaccaaaaatttwaaaaatcatccttttgaagtgtcgtcttctcttattctatgaaacgacaatgaaccatttcttgatcagattgtgacatgccacgaaaagtggattttatacaacagccagctcagtggctggactgagaagctccaaaccacttcccaaagtcaaacttgcaccaaaaaaagtcatggtcagtgtttggtggtcagctgatggtcttctgatccactgcagctttctgaatcctggtgaaatcattacatctgagaagtamgcccagctattgatgagacgcaccaaaaactgcagcacctgtagccagcattggtcaacaggaagggccaattctccacaacacctgaccacgtgtcatacaaccaaggcttcaaaagttgaataaactgggctacaaagttttgcctcatctgccatattcatctgatctctcgccaaccaactaccacttctttaagcatcttgacaactttttgcagggaaaatatttccacaaccagcakgatgcagaaaatgctttccaaagagttcatcgaatcctgaagcatggaataaacaagsttatttctcattggcaaaagtgtgttggttgtaatggttcttctttgttttaagacagagtctcactctgtcacccaggccagagtgcaatggtgcgatctcggctcactgcaacctctgcctcctcggttcaagtgattctcctgcctcagcctcttgagtagctgggattacaggcacacgccaccacacccggctaatttttgtatttttagtagagacggggtttcaccatgttggtcaggctggtctcaaactcctgacctcgtgatccgcccacctcagcctcccaaagtgctgggattacaggcatgagccactgcgcccagcccattgtaatggtttctattttgattaataaagatgtgttgcagcctagttataaaaatttaaaattcatggtccaaaaccacaattatttttgcacgaacctaataatataagaattaaaagagacctttatattagagatcccatggatgataaaagaataaagaatattacaatctccataacccacaaacttggtaacttagaccaactggatgaataaaagacacaatctattaatactaaaacacaggaaaaataggtaatctaaatatatttatatctattaataaaatggaatcaatacctaataaccttctgaagaacttatatattccaaaaatctgacattctgtcatatttttctaactggtgggattcaggggtttccattttgacgagaacataggtgggtcgcacacaattttagtactcattggtcaggaaacccatgtccactataggatattgcagagcggtgcattatggagaatttaggcaacataatatggttttcagagttaaaggaagaccacctgtcttatgtacagtaattcgtcataatatcctaggggataccacatttaaacttcggggtatccctaggtatattctttgagccacatgtgaatttcagacacggaggcttctcaattttggtgcctttcaacaaatgttgaagttaattcccaacctattttgtggaggcataaaattcaatgagcactcatttaaccttttattttaaatattattttagtaaactttgtatttccaattaggtgaaattttaaacccgtttcagtttttatccactctttttaggcggaggggagtaagggttgctttcagctaggagggactcccacgtacccaacccatttgtgtaaatttcttccttcagagttcttcaaatcagcatcaccattgttaaaggcctcccacatggtaataattgtgctacagagttttaagaacattaagtttatgtctggctgaattaacctctttgctgtggcacaagggggccataggtgttttcaccaattatgaagcgggttcactgtgcaatgactaccgacttttctgagaacgagatcaaacacattcacacataaaacccatgaagtgaatttactacttacaaataggaaacaaaagacaacagaagtctaggattcgatatgaactgctaccacaagatcaggaaagtatccagagcagatggatggagccttgactgcaggtgcttcacttgcactacaactgagtgaccccagaaagcagcccaccttgggttttatatcccaggatgtgatttgctggagcgttgaggaccattctgtttcragcagggactataacagagcctgggttgttctggccaatgtcaactgattatcaggatattgcattctcagcatattgtacagttatcgtgagaactaccagtaagaaagggrggaaaactgtgtcartctgagactacctggaaaactgccctgcaccctgaaaactgaaggatcaggatatttgttgtgacagaggcacagacagtagcgatagagtgttcttgtgagccatctactagttttctcgaccgaagcatggcacctgactgcttttctctttccttwcaatggaaactgtttcagaatattttgagtttctgcgtatatagagttgcggcacatgatcactggaagtgtagactatctgcatggtcaaaggaaagagttcaggagcccatcaacccacattagaggaaaccacctaatcctccagagagtgccactcagtcttcctggggttagctccacatgcagtaaggccattacgtcgaaggccatcaagccttgcagtctgaagattagacttctgacatgctgataagcagcagtgataagaaaagcccacacactggctaggaatttttcaatggaagcagctgagatgcttcttcatatgctttggcaggggctaatatcaaactatttcttcccattttctttactcatcagcgcctgaatcatgaggcaccacagacgtacacctcacgaggagggtgtatgggacagcagcaaggggagcagcagcacaagaaacaaacaaggccactacttctgcctgcattaacggtaactactgtcttgggagtgyacaataattaatgttcacgtggctgccctaagcatacagtgatggtgaccagagcagatgcagtgacacagagatacagcctgattcttgctaattaggatttaggtgttggcttgtttatgtgctgtgcttttgggcattaaactgcctgctaagcacaggccaaatgtcatgctggggtgcaattaaacattcacgtctaggagatgagagcattttagtgtgggagtagatgacaacacctgaagacaacaaaacactgtgcagaccaaagtgaaggcccatcgtcagctcatggttctgacccaggtgatttctgatgtgttacggaaccagtcagccgacagcaggtagataaagttgagcaggtgtcctgcatgagggctgctccattccatttgtgttgccaattgtttcaatagcgtctcatgcaccccattggtgaggaaggaattagcaccctatgtctactggtaccgttaaacacatgacatctattactaaacagataaactaaacatcagttattaattacatacaggaggatggtgtaagctcccacaggcccaaacagggattaacttgggagcagagagtggtacagcattaaaaaagtgaggatgttcctttgttcctacaggagtatgtgattggtttgtctgttggctggtagggaactgaatcatgtgacactgactggtaagactgtaatactgtaaaatacacaaactataataccgtaacggtgtaatactatatacaataccaaaggcattgatgaaaaacccaacgctatcacatgtgactgtgagactgaatgcttcctccctcagactggttacaacatattgtcctatcacagttctctctccttcattcaaagtgaactatgcaaataacagacagaaataataaagaataaagggcaacaaatgcaaagaactcacgagatgatactctatgataaactttatgtacttaggaattaataccaactcattattagcaaaaaataaacatctttacaccaagagtagtttttcctttaataaaaaaaggtggaatgtgtataatggacaagggataaccaaaatttgccaagtgaggctagtaagaaaatcgcaacaattagcaatcattactcactggtccattaatcacagaacaatacatacaaattaaacttactccgctgggcacagtggctcatgcctgtaatcccagcaatttgggaggctgagggggggcaaatcatgaggtcaggagttcaagaccagcctagccaacatggtgaaaccctgtctctactaaaaatacaaaaaattagctggacatagtggtgggcgcctgtaatcccagctactcgggaggctgaggcaggagaattgcttaaacccaggaggcagaggttgcagtgagccaagaccgcaccactgcactccagcctgggcaacagagtgagactccatctcaaaaaaataataataaaataaaaaaattaaacttacctacatattagaaaaacatcaaaattcaaccatgaatccagcacattatcaaatgaacagacaaaaattctaccaacaaactgaagaaagtatcattactatgaaattcaagtactgcttaaaaagcatttacagaactctcacctcaaggttttcctgcaaaataaagtgaaatgcatactcaagactctttaagaatgagccactgatgaaaacaatatacttgcaacttgtgtaacatttcatacatgtacatttttttcaagcaccgcacgataattaatttgcatcaggctttccaaattagaaaaacttcacttatagaacttctttccagtgggagttttcacgacttttcaaataaatgttaaaactgaaaatattcttgcagtttctaaatattagttgtaatcctgtgtacatttttgtatttacaaggtccagctgcagtgtgcattttcacatgtccttgagcagatatgagagaaatgaaaacattcccacattctggacattcatagggtttttctcaggaatgagttgatgtcttcaaacggaactaaaacaactgaaggccttaacacaaatttaaatttaaaaggctcttctccactctgagtcctcccaaatcttcaaaataggaaaatctgaaggcttgaccacatttcctacattcttaaggttttctgaagtgtgagctctttcatgtttatgagggaatgggaaagagtaaatactttaccacatttcttacacgcataaggccttttttttgagacggagtctcactctgttgccaggctggagtgcagtggcacaatttcagctcactgcaacctctgcctcctgggttcaagtgattctcctgcctcagcctcctgagtagctgggactacagacacccgccaacacacccagctaatttttgtatttttagtagagacagggtttcascatgttggccaggatggtctcgatctcttgaccttgtgatccacccacctcggcctcccaaagtgctgggattacaggcgtgagccaccatgcccagccrcatagggcttttttgagatggagtctcactctgtcaccaggctggagtgcagtggtgccatctcagctaactgcaacctccaactcccyggttcaaacgaytctcctgcctcagcctcctgagtagctgggattacaagcatatgccaccacacccagctaatttttgtgtttttagtagagacgaggtttcaccatgttggccaggatggtctcaatctcccgacctcgtgatctgcatgcacagggcttccccgcctgctgcgcacggcttttcatgtccttgaaaaacaactaagacaactgcaatgtgccaccatgcccagctaattatttttttattttattttatcttattttttgagacagagtctcactctgtcacccaggctgaagtgcagtggtgcgatctcggctcactgcaagttccgcctcccgggttcatgccattctcctgcctcagcctcccgagtaactgggaccacaggcgyctgccaccacgcccagctaattttttgtatttttagtagagacggggtttcaccgtgttggccaggatggtctcgatctcctgacctcgtgatccacccgcctcggcctcccaaagtgctgggattacaggcgtaagccaccgtgcccggcattattttattttttgtaaagacagggtttcaccatgttgcccaggttgtttcacattgttttaatccaggctggttatgaactcctgggctcaagcaatccacacgccttggcctcccaaagtgctgggattataggctgagtcactacacccagcctctatatcatgacttctttcatggcgagtaaggtgactggaacgagtgtaggctttaccgcatttcttacattcatagggtttttctccagtatgaattctttcgtggaggtgaagggaactgaggcgactgaaggcttgatcacattgtttacattcatagggtttctctccggtatgagtacttctatggttacaaagggaactcaaacgactaaaggctttgccacaytgtttacactcatagggtctctctccagtatgaatgcttccatggtaacgaagggaagtggaacagctgaaggctttatcacatttggtacatttatagggtctttctccagtgtgagtcctttcatgcgtcttaaaagaacaagaaaatctgaatgttttcccacattccttacattcgtagggtttctctccagtgtgagttcgttcatgtattagacaagaaccggaaacagtgaatgctttaccacattgtttacatttatagggtttttctcctgtgtgagttctctgatgtctttcaactgaattgagaaaataaaaagctttcccacatatcgtacatttataagctggatttccactgtgcattaycatgtgtcttctaacacctggaacagaaacgaagaatttcccacactgttcacatttatattgcttctctccatatggtttgtatcctgagtgagctaggatatgcctattaaggagggaatgacgtacaaagacttttccacaaatactgcattcacatggttttaatccagtagaaatgttctcgttcagatcaagatttggaatttggctgacaacttctccatactgaccatcttctttactttcacacagtctctgtacgatatgatttctgtaaaaaaatgacaagcacattattattggttggtttattaataactttctacttattaataggtcttggacttacactgctaccaatatcagggaaaatgcatttttttttttgccatgactgaattatttcaaagtaaatgggttactactgaaaacacagctaccacctgcatggctatgaccaaaatagtaatattcatatacacagttttgtagtactattttcaagtaaactsttttgcaaacactgactgctacattgaagtacgttacattttgggtgaaatttttctaaaaataaataaatttcaagtgactcttatttgttttgattgcttgtttttaagttcatgacatgctaagattccttsagaggactttatttcctctgctcagtgcaaattaccttatatctttcccaggtttttcraagtgatcttcaatattctggtctttccattggcttcctaaaatgcagacccataaaattatcatgaattattacaaactgtagacacattactagatttaatgttcactgtacacagtgcccatgcctgatttattcaccaaatcattcccttgccacattccaaatcataaatagcactgatgrtagggaaagacttctgtaattaactgaaatgtgttgtcattcttacctacagaagccaggttcctgcaggtttcctgcatcacttctctgtagagattcttctgagaagaatctagcaaagcccattcctcctgggtaaagttcacagccacatcctcaaaagccacygagtcctagaacattccacacatgtggatagaaggatgggtgagactgacagcactgggaatctatactcaattcataagctgtttacatgatttgataatttccaagcatttattctatgacttgattgtcacaactcttactctgttcacacatactccctcccacacagcagtactaatgctagaattgaactattcaaaaaggcaacagcaaagtggaaatacccatctcattagagaatccagggagtaagatgtgctgctaggttacctcttaatttcacttcgtacatttctagtatctgccataataaagtcctacctgatgtgcataagtgagttaataatatcagtcctaagactacttattcttaaaaatgcctgctcacaaagttcaatctttgtttgtattagtaacttacattttgaaagggattccaccaacctaagtaataagaatgactcactgcatctaaatggtttatgcaatatagttgccaaaactttttctgctaaaggtctattattttgtgtcactgcagtggtgcttagggaaccagacaccaaaacacagtctgaacactaagtgtttaatgagtttccctggtagacaatattttatatgtgctgtcacttgttaattggggagttgagcccattccatgtgattacaccaagagagaataggcttattaaatttaattgagtagtaaataaaaccaataattgatatttaacaatttactaatacaatttttaaatttctattgcacaatgtcaaggcagaatggaataagaggaaatatggcacatgttttttaaaatgacattaatgtcaccacttccagatgctattcctgtgaaatcacataaattcccaaatcaggcttttttaggcaagaaaaactagtttttcatacctagtaaaaatgacaaatgtctaatgattttcagtcatctaaaaaaagagttatgtcttgcctaacatacttttaagattttcaaccaaaaatattcaggacagcacagtattagcagagagatgagcaagcagaccaagggctgaggacacaacaccctgtaaagttttcacagggggacatcaacctaaagacattttggtaatatgcacacttaggaaagatgaagagaggcacaaagatttttttacagtagagtgtcagatggtttattctccgctttcctctcatgtaaaatgtttgtaaacagaaaaatattttggccgagcgcrgtggctcacgcctgtaatctcagcgctttaggaggccgagacgggcggatcacttaaggtcaggagttcgagaccaacctagccaacatggcgaaaccctgtctctaccaaaaatacaaaaattagctgggcgtggtggcgggcgcctgtaatcccaactactcgggaggctgaggcaggagaatcgcttgaacccgggagtcagagrttgcratgagtgagactgcatcattgcactccagcctggcgacagggmgagattccgtctccaaaaaaaaaaaaaaaaaaaaaaaaaaagaatatggtttgcttcctcattaaccttatcaaagcctctcatttacgccccttctgtggaccccaaaccacaaaccatgactgcggtacctggtttatgaatcgccgtttgctcaaacacacggtttaacgttttaacaaagcctcggcttaattttaggggaagaaaggtgggactggaagccccatgaaccacagctcctcccatgctggaaccccgcacaccgagacaccgagtcggggctctcccgcatcaccctcccgtggtcaccacactacctggataggggaggcgargggttcccgayagggmtccggccggcggaagtggcgcccgcaggtacagacaggatgcaggggttccgctgcccgccccrcccggcccggccctgaacagaagaggactgagccccggctacgccacggcgactcggtccgcaggttccggagccgatggcgtggargcccgagtcgcgccacagcaggtttcaaccagccctcttctccacttcgggaagccaggcgcrgtccactcaccattcctcggcttcccgggtgtmctggcgtcagctagggatgtcccaatactcgcaggtcacagggtggcagaggctgctgcagagccacctgggcctcccagagccaagractagcagcggagactaacaggaagagccggctccggcgaaggagagacaaagcaacckccaggcagatcccggaarccgccctctcctttccggcggcgcgcctgattgaacggtccccaccccagcgcccctgattggatggggcttcaggccccgcccctcaggccctgagtgacaggagattgcgatctcacgtgaggctggatgaggtcagaatgaccgcttttggcctagcggtttgtaggcggtgcgtccttcctgcgctgggatccgaccatgcaagaaggacattcacatttaacctgtatacaagttatagctatttgtgccttttatatatatatatatatataaaattggaagcaatataatgacagttctgtaactgcccagggagttcaccttgcccgctacctagacagagccgatttctcaagacaggggaatagcaatagagaaagagtaattcacgcagtgtcctctgtgcgggagaccggagtttttttattttattttatttttttgaaacagaatcttgctctgtctcccaggctggagtgcaggcttggagttttatgattattcaaatcagtctccctgagcatttggggtaagagtatttagaacgtttattttgccaaggttggggatgcatatgcatgacacagcctcaggatgtccttgatgacaygtgcccaaggtggtcagagcacagcttggttttgttggagagaaatgctcggtgccgcaaagtgaaaccagcactcaagcgaaagttttctcagcaacgcaatttacttctgcagaagcgtgctgctcgcatcaatcacgatcgcaagagcacactgaacagaggaaagcaggggtttttattcctaacgcagtccctacctctggcatgggctggggtcagaccgcacgatctaaactgacccggttggctatttgtgaatattttcccaaataaggaagggggaagggggatgtgagttacaatggtgggacttgcggtttccaagggagaaatgggtgcagagcaggtaaccaagggaacagatgtgagttattgattagaactgacggaaggttgtttacagtaactaagggcaaggaggcatggagaacaagaaagttgagttcgaaaacaaaaaaacaagaaagttaacatgccaaaccttggaagagaaactgactgtatctgacagctttatacattttagggaaacaggagacatcaatcaacatatgtaagatgaacactggtttgatccgggacaacctgaagcaaaagcgggtcaactcgaagccaggagggggcttccaggtcacaggtaggtgagagacaaacggttgcattcttttgagtttctgattagcctttccaaaggaggcaataagatatgcattcatctcagtgagcaggggatgactctgaatagaatgggaggcaggtttgccctaagcagttcccagattgactttcccctttagcttagtgatctggggggctcaaaacattttcctttccaatttcccccttttcttttaaaaatattttggagaaagcattttagaagaaaatcagtctctggtcccaggttttgtccaatctctcatggagtagctgggattacaggcactggacaccacgcctgcctaattttttttttttttttttcgtagaaatggggtctccctcagttgcccaggctggtctctggtgcccaacrccgggctcccggtaatctctacaaataatccagtgaaggaatgccagagagtggaaagtggaggatgactgacaaaggacgcccgagtacgttttcacttcaagctctacaggtaagtagggcgctcggaaaattccagggtaacctccggaaactatgggtcaggctgagagtaagtttgctaattactgaagccttgtccggcagttactgcgccgcggaggggtaattgtgagtacccaaaatctcccatctttgttctatctggtaaaaaagtattctctttggttcccggaatatggaaccatgaatgtaaaagactgggacaaggtcggatcagacttaaaacgagcacaacaagagggccacgatattcccttcttgcttggtctgcgtggcctgcaattaaaacagcactggagcccttccacactgaggaggagcttcaggatgacatagaaaactttaataatcaggagtctaatgatcagcaaaatcaaccatcacagtctagttttaaaaaggccgagaaacgggaaggtatatatgctaatctccaaaaacttataaaagaaacagtgccacctacttcgcctttaggggaaggtctggaatggccacccccggctcagccttacaaatttttggaactggagcctgagacgcggcttgccgctcccattgttgcaggccccaccaataactatggcgaagggaagcttcaggctcgcctaacagccaattacgatcagggaatgatcctctaccacctgttaattgtggtagaggaatgctgcgagccggtccaaatacaaattatggcacggggacaatcccgtcatccattcgccaggcatgagaaatgggggatttggatgctttgcagtttctggtaattaattcgccagttgaggagcccagagaacatgctcaagcatgctggcagccacttccttttaaaatattaaaatacttaaagcaagcaattggacaatatgggccaaattctccttatgttcattccttgttacaatctgtggcttataacaggcgtttaatacctatggattgggaggcactagcccaatccactccgtccccctctgaatttctccaatttaaaacctggtggacagatgaagcaacaaatcgggcatgcagaaatgctcaagtccaacgtcccgttaatatcacatctgatcaattgcttggaatcacatggggtactctaaatcaacagaatggtaatgggtgatgaggttgttgatcaggtcagaactatatgcctaagagcctgggaaaaaattcacaaccctggtacaacttatccgtgttttaactcagttcgacagggtccaagggagccttatccagattttattgcccgtttgtaagatgcggctcaaaaggctatttcagattttcatgccaggaaagtgatcgttcagctgcttgctgatgaaaatgctaatacagaatgtcaggcagcaattagacctattaaaggaaaggcagatctaaatgaggaaaaagctttaagtgaatacattaaagcctgtgatggcattggggrgcacttatataaggccagcttccttgctcaggcaatggctggactaagggtaacaaaaaacacatgagtgttccccaggtcttgctataattgtggacagataggacatacaaaaagagagtgtacaaagaggcaaaaaaggcaaaactcaggaccgggccccaattcaaaacggggcattcccaattcaggacgggacatccctgactccaaatggagtgttcccaaatggattgaggcaggtttcaaccagccctcttccccactttgggaagccagccgcagtccaggaaggtcccaaaaggagtttatggcccactgccaaayggcacggtgggacttatactgggaaggtccaacttaaagggaattcaagtacatacaggagtagtggactctgattgctacggagaaattcaaattgttatctcctccactgttccctggagtgctaatccacgtgacagaatagctcaactgttgcttttgccgtatgttaagttaggagaaagctcagaaaaaagaataggaggatttggaagcacaaattcagcaggcaaggctgcctattgggtaaatcaagtctctgacaatagacctatttgtatggtcaccattcaaggaaaacaatttgagggtctggtcaacataggagcagatgtgtcgatcatagctctttaccaatggccaaaaaactggcccaaacaaaaggccccagtgggtcttgttgaggttgaggatttgcttgtatttcaccaggagagaatcagcttcctgtytgggtacccacaagacatcttaagctgtgccatgagacagagtccaagaagaggaaaagacctcagaatgtctctgcgcccccagttcgtcagayggctcagatgaacatctctgttgagcagatggaaaccagtaaaactccccaagcaactccaccgacctgggggcagatgaagagactggctcacattgcagaagagaacctgaggtctcagaacaagccgctgaccaccagtaatctaatggtagctatgatggcggtaatctccttggtggtgagtcttcctgtagcagaggcagatcaaaattacacctatttttgtaataggaggaaggaggaggaggaggaatgttaatgaatgtttctattggttatcgctttcctgccatctgcctggggccagcagcaggatttttaaattatgatacacaaagttggatggtttatgttcctgcacataacggatcaaaagcctttattcatgcaatcagtggaagaacatttcaatctttggacactattaaataccttgagcatggctatgttgtgacacatcgccagattaataaatttaaacctaataagaacctcctgttattaaacggtcagaaaagctagaggtgctaacctgggaagattatattgcaaacagtgctgctgtactacaaaataattcctatggaatcatcattgattgggcccctaggggacaatttgcagtaaattgtactggacagagtgaagattgtagagagactattttgcaaacgactacccagataatgcaccaaaattacatagaagaattgaaacaaattaccctattaagtgggaggagaacggtatggctcctccaagcccaaaaatkattgatccaattataagyccagaacatcyagaaytgtrgaaattaatgatggctcaaagcccaattyggatttggaaagsagaatrtaaaacagagacccrtagtaaaaaacttcgatttgttgtagccatgacctctaatcagatggtcccattgcagagttgtgttaaacctccttttatgttggcagtgggaaaaattaatatcttacctgactctcaaaccatatcatgcctcaactgtcgtctttttacctgcattatttctgcctttaataaagataatagcattttactggttagggcccgagaaggagtttggatacctgttttcctcaatagaccttgggaggcctgtccctccatacatattatcactgaagtactaaaaggaatacttaatagatcaaagagattcctatttactttaatagctgtggtcctgggccttgctggtgttgctttgcactcttctattcaaactgcggactttgtgggtagttggcagaaaaattattctaagctttggaattcccaaagccaaatagatcaaaaattggcaaatcaaattaatgatctccgtcaaacagtaatttggatgggagatcggattatgagcttggagcatagaattcaaatgcaatgtgattggaatacttctgagttttgtattactcctagctcttacaatgccactgaacacgattgggagatgattagacgtcacctacaaggaaaagaagataatttaacattagatattgctaaaccgaaaagacagctttttgaggcatctcaggctcatctcagcctgttgcctggagctgatattcttactggagccgctgatggcctttctaacactaatcctttaaagtggattaaaaccataggtggatcaacaattgcaaattttattttggtttgtgtctgtttatgctgtttatttttagtctacagatgccgacggcgccttggtagagaagccagacacagtgaacgaaatagcaatggcggttattaataaaaaaaaaattaatagagtcgggcgcagtggctcacgcctgtaatcccagcactttgggaggccgaggcggacggatcgcaagttgaggagatcgagaccatcctggctaacacggtgaaaccccgtctctactaaaattacaaaaaattagccgggcgcggtggcgggtgcctgtagtcccagctactcgggaggctgaggcaggagaatggcgtgaacccgggaggcggagcttgcagtgagccgagatcgcgccaccgcactccagcctgggcgacagagcgagactccatctcaaaaaaaaaaaattaatagagacaaaaaaagggggacatatgtgggaaagagagtttctggaatgccagatgagttggtcccccctgcgtgagacatccatgggaagccatgggcggcctctgaggagaaaagtctcctttttgccttcatgtctttacgcatgccacaggtgctggcggagataacactcccttgaagcagtggagtacaatcaaacatcttggctgctcctgaaacccgctcccacgcatttcagtccggataaggtaaagatcttaaatagtttagacacacgcctttgctagaggaaattcacagaaaccgccacggctacacatcttattaaatgagtcacgagttctccttcattgattaatccttttcctcatcccttctcacccctcccatttgccctaagaacgaagagctggtaaaccaataaattgggtggaggccgagagctcggggccgcgagcaagcctccgacgccctggtcccctggacccgccggttaaactgtgattctctttctaaatcctttgtctgcgccggactcggggtacccgccgggtggtgtggggctggtttccccaccagctctcgaactcctgcactgaagcgctcctcccgcttcagtctccccagtggttgggattacaggcgtgagcccccgcgcccggccaaagggccccctaggaccggctgtctcccccgactacgcaccctcggcccccagcctcgcgccagacacggcgccgcagccccagcgcgcgggggtggagagagccgcggggcaggggcgccctgtgggtcccgcggtcacgccggatcgctcggccgcagtagtggggcccgggcgggcgcagggccgggctacggggaccggcaggcgcgcgaagggcccggggcgccgggaggactcgggttcacagtcgctcccgctccggaaagtttgcggcggctgccccgggagggacttcggcggggaggaggcggcggcgccaggtggccgaagtcggaggggtccgtccgctcccgcagcctaggagcgcgccctccccgccggtgccggggcccgtggtgggggtcgcacccaccgccgcttggccgggaccgtcttggctggcgccgccttggagctacgataaacgcgccggtgcggggagcggccggggcggagggacccagcgagcccggggagggccggggtcctgcatgcggaggcgccggggagggtgtggggtcagggcccgcgcggcgctgcttctgctcccgaagactgcggtcggagctggcgcagcggagggtgcggctcccggagcgcgaggccgcagcggggagtgaccggaagtggcctctgcagccgcgtccctgggcccatgtcagggacggctctggctgaagcaggaggacggcgtttggagggtggggtgggcgcgtcctctcggcggcccgcgtggactgacagccaccactgcccccacgctgccctcgtgcccgcggttctaagaagtcgaatgccaggcggaggcgacggggcaaatggcccaggcttgggaggccgctggcggtccaggtcccgcaggatgtggaggattttcgaggagggcccaggggctggagggtgcacaggcccatcttgcacaggagccacggccccggccttagctgggcggagcaattccggtgccgccgccccttccccgcccggccatgctcgggctccaggcgggctgctgcagggggcctgatccggtggacgatcggctcctcaccccggcaagggcccccacctcggccgctgacagcctcgcagggaggccccagcgatgagcaagggggctggcgggaggacgggaggccccgccggcctgagtcctggacaggtgattggcaggtgaatgagctggagtgtgcagcgtgcctggctgggggccagggaagatctgccgggacctcaggggctgcaggctgccaactgcccgccccagctctggatgccctactcgaacctcagtttcctcacctgccaggaaggacccgtatgtcaggggtgttttgacgattaaactggacaatccaaataaactcgcattagccctccttggccgcacatctttctgactttgtacgaaactctggaatgcctgtaggtggggaggcaggcaggccagaccttggcccctggctgcattgtcccttctgggcgcccccactcctcctgggcccttttaaagcacatacctagcgaaacatctggacctcagagagcctcagagaactttgtgcatttccaaaaccaaaatgctttcttccctgaccccatgttctcatcttactccaaaacgcaaattccttgggcagccagcttcagaaaagggcctcaatttgatgtttgttctctgggacccaccccagggcccttttgatggagcatcattccacctccatccccaccccctccccccggggcttcccccagtacactgggggctcttaactgtaacaacctggatctggccactagactcccaaggcaggggacagggaacacagttcccccagcagactggcctagccatggcctgatgaacagtgatctctgggcaggagacccaggacaggaaatatctcygccctctactgtcagaccctcctgccttcggggtgagatcaccttttgccacagtgggaaaaacaggcacagggccagtgaccagcaaagtcagggagactgtgaccgggaaacatgcccaggcgctgaacagcacttccaggttgccacagcctttgggcggttcttggcatgtggcaccctggttgggtcagcaccttgtggggtgggggtgctggcaggagcaggtgctgtgggacccacagcaggaggggaacattttcaccctatcctggcacagcagttttgttctctgatgtgtgtgatgggaaaaaaaaaaatcaaaagaagaagaacactttatgacactttccaattagaagtttccatgtccatagtaaagttttctgggagtgtagccttgcctgttcattcacatgttgtctgtggaaggctgcggtcacgctgcaactgcagggccccgtccttgagacggatgcattgacaaagttgaaaatattgaccctcggctctttagggagtttccagcccatgcctggttttgagcactgtctgctgagaccccaggctctgggctggctccttcctcactcagggctccagtggcctctgctggtgtgcctgtaaagtgggggtgccatggggcctccctatgggggtgttgagtcctggagtgccaggttttggggtccctgcatcacagttgaccatctccctggcagagatcccagtgcctgattctggccagtaggaatatttactcttaaccaatggggacaccttggagctgagctgccacccacccagcagtggtcccatgacaccccctgtctgggtcaaggttggggcagggctggtgtcctgaactgcatcctgatgttcagcagcggtggctgctggtgctcaatgccttcgagagaacgctgaggccaatagctgctggcagcggctcacccaggttgtgtgtactgtgcccttctgtgtgcgagtgacaggtgagtgcctgcaggggtcataccaggctgtgtggagggggccagaggttaaagttccctgagcagctgtgtggtccaggagcagccaaggggtctctggaggtgtggctgccacaactctaccctgaaggtcttgcttgtcattggtggagaggagaggactcccaggaggtgctgcctgagggaccccatttccatctgtgaggggcacctagggtcctcctggggcgagtcagagactgggcccttggggtgaaagtcccttctctgggctgagaagcagcaggcactggggcgtgggctgcctcggggcccccgcccactcgcaccctctcctgcactgcagctgccctatcctcaggaggtgaggaagatgggaggatgaggctaagacacaggctggccgggggtgaggcctgctcctacccagcaagcccaggcctcaacaggcaggtgagggactgaggcctggggcatgacctccctaagtcacctcagggtagagaaggagctgggccacctagatgggtctgtatgcctggccctgggctctgggtagcaggcggggggtgggaggggacacccatgctgcagatggggagactgaggcgcggggctctgagggctccaggagcaaggaggaggccagggctggcctgtggggactttggtgttgactctgggtgaggtggacccctgcagatgtgagtacagcagagctcaggcggctgcaatggggtggatggacccaggcggtaagggcaccagcagatgactgccacagcccagtgcggggagggtgtctatgcggggctgtagattagtgccagcagggtttgggtttcccagcagatggctgtgtgtgtgagacagcaatcaggtggacaatgcccaggggttctggcttggaacagaggctggtgcacgttgctcagctgtagatggcctgggtggggaactgagacttggctttggagaagccaagagacgtgcacatgcgagtgagtgtcatgctgggatggacacggtgggggggcagtcacacaacctggggaccaatggtgtgtgggctgagcccccatgcctgctggagtggagcaggcaaggaggtgaggagcagccagcccgggagaaggaagtcgggggaagcccagggatctctgtcactgggatctctgtcagtgagaccgtcaactgtgatgcaggcaccccagggggccagaggccaggacagcagtggatcctgggataggatgagaattattttggctgtgctgtccccatggcccctactcctgaccacatactccggtactctcgccctgagtccctgcttgcccccgcctacctgaccatcccaggtaggagttaggcgttttcatcccatgtgagcttgggctgtgagggtcccgggacagcagcatttcagaaggcactgtctggccgtggacagcattgttgagtcactgtgggtgcccggtcctgagaaagagcccctggtgcagttttctaggctctgtcttctggggtctctgcccgctatcccgggaagcctgggagggcagctcagagctctgggaagtgcctcttcccagcatctgtccacactgtgctcaccagtgccttggcgtcatcccctgagaggtgggcatatgtccctgtgggcgggtgacagcaaggtcatcacggggagggggcgtgtccctgtgggcgggtgacagcaaggtcatcacggggagggggcgtgtccctgtgggcgggtgacagcaaggtcatcacggggaggggkcgtgtccctgtgggcgggtgacagcaaggtcatcacggggaggggkcgtgtccctgtgggagggtgacagcaaggtcatcacggggagggggcgtgtccctgtgggcgggtgacagcaaggtcatcacggggagggggcgtgtccctgtgggggggtgacagcaaggtcatcacggggagggggcgtgtccctgtgggggggtgacagcaagnnnnnnnnnnnnnnnnnnnnnnnnnnnnnnnnnnnnnnnnnnnnnnnnnnnnnnnnnnnnnnnnnnnnnnnnnnnnnnnnnnnnnnnnnnnnnnnnnnnnnnnnnnnnnnnnnnnnnnnnnnnnnnnnnnnnnnnnnnnnnnnnnnnnnnnnnnnnnnnnnnnnnnnnnnnnnnnnnnnnnnnnnnnnnnnnnnnnnnnnnnnnnnnnnnnnnnnnnnnnnnnnnnnnnnnnnnnnnnnnnnnnnnnnnnnnnnnnnnnnnnnnnnnnnnnnnnnnnnnnnnnnnnnnnnnnnnnnnnnnnnnnnnnnnnnnnnnnnnnnnnnnnnnnnnnnnnnnnnnnnnnnnnnnnnnnnnnnnnnnnnnnnnnnnnnnnnnnnnnnnnnnnnnnnnnnnnnnnnnnnnnnnnnnnnnnnnnnnnnnnnnnnnnnnnnnnnnnnnnnnnnnnnnnnnnnnnnnnnnnnnnnnnnnnnnnnnnnnnnnnnnnnnnnnnnnnnnnnnnnnnnnnnnnnnnnnnnnnnnnnnnnnnnnnnnnnnnnnnnnnnnnnnnnnnnnnnnnnnnnnnnnnnnnnnnnnnnnnnnnnnnnnnnnnnnnnnnnnnnnnnnnnnnnnnnnnnnnnnnnnnnnnnnnnnnnnnnnnnnnnnnnnnnnnnnnnnnnnnnnnnnnnnnnnnnnnnnnnnnnnnnnnnnnnnnnnnnnnnnnnnnnnnnnnnnnnnnnnnnnnnnnnnnnnnnnnnnnnnnnnnnnnnnnnnnnnnnnnnnnnnnnnnnnnnnnnnnnnnnnnnnnnnnnnnnnnnnnnnnnnnnnnnnnnnnnnnnnnnnnnnnnnnnnnnnnnnnnnnnnnnnnnnnnnnnnnnnnnnnnnnnnnnnnnnnnnnnnnnnnnnnnnnnnnnnnnnnnnnnnnnnnnnnnnnnnnnnnnnnnnnnnnnnnnnnnnnnnnnnnnnnnnnnnnnnnnnnnnnnnnnnnnnnnnnnnnnnnnnnnnnnnnnnnnnnnnnnnnnnnnnnnnnnnnnnnnnnnnnnnnnnnnnnnnnnnnnnnnnnnnnnnnnnnnnnnnnnnnnnnnnnnnnnnnnnnnnnnnnnnnnnnnnnnnnnnnnnnnnnnnnnnnnnnnnnnnnnnnnnnnnnnnnnnnnnnnnnnnnnnnnnnnnnnnnnnnnnnnnnnnnnnnnnnnnnnnnnnnnnnnnnnnnnnnnnnnnnnnnnnnnnnnnnnnnnnnnnnnnnnnnnnnnnnnnnnnnnnnnnnnnnnnnnnnnnnnnnnnnnnnnnnnnnnnnnnnnnnnnnnnnnnnnnnnnnnnnnnnnnnnnnnnnnnnnnnnnnnnnnnnnnnnnnnnnnnnnnnnnnnnnnnnnnnnnnnnnnnnnnnnnnnnnnnnnnnnnnnnnnnnnnnnnnnnnnnnnnnnnnnnnnnnnnnnnnnnnnnnnnnnnnnnnnnnnnnnnnnnnnnnnnnnnnnnnnnnnnnnnnnnnnnnnnnnnnnnnnnnnnnnnnnnnnnnnnnnnnnnnnnnnnnnnnnnnnnnnnnnnnnnnnnnnnnnnnnnnnnnnnnnnnnnnnnnnnnnnnnnnnnnnnnnnnnnnnnnnnnnnnnnnnnnnnnnnnnnnnnnnnnnnnnnnnnnnnnnnnnnnnnnnnnnnnnnnnnnnnnnnnnnnnnnnnnnnnnnnnnnnnnnnnnnnnnnnnnnnnnnnnnnnnnnnnnnnnnnnnnnnnnnnnnnnnnnnnnnnnnnnnnnnnnnnnnnnnnnnnnnnnnnnnnnnnnnnnnnnnnnnnnnnnnnnnnnnnnnnnnnnnnnnnnnnnnnnnnnnnnnnnnnnnnnnnnnnnnnnnnnnnnnnnnnnnnnnnnnnnnnnnnnnnnnnnnnnnnnnnnnnnnnnnnnnnnnnnnnnnnnnnnnnnnnnnnnnnnnnnnnnnnnnnnnnnnnnnnnnnnnnnnnnnnnnnnnnnnnnnnnnnnnnnnnnnnnnnnnnnnnnnnnnnnnnnnnnnnnnnnnnnnnnnnnnnnnnnnnnnnnnnnnnnnnnnnnnnnnnnnnnnnnnnnnnnnnnnnnnnnnnnnnnnnnnnnnnnnnnnnnnnnnnnnnnnnnnnnnnnnnnnnnnnnnnnnnnnnnnnnnnnnnnnnnnnnnnnnnnnnnnnnnnnnnnnnnnnnnnnnnnnnnnnnnnnnnnnnnnnnnnnnnnnnnnnnnnnnnnnnnnnnnnnnnnnnnnnnnnnnnnnnnnnnnnnnnnnnnnnnnnnnnnnnnnnnnnnnnnnnnnnnnnnnnnnnnnnnnnnnnnnnnnnnnnnnnnnnnnnnnnnnnnnnnnnnnnnnnnnnnnnnnnnnnnnnnnnnnnnnnnnnnnnnnnnnnnnnnnnnnnnnnnnnnnnnnnnnnnnnnnnnnnnnnnnnnnnnnnnnnnnnnnnnnnnnnnnnnnnnnnnnnnnnnnnnnnnnnnnnnnnnnnnnnnnnnnnnnnnnnnnnnnnnnnnnnnnnnnnnnnnnnnnnnnnnnnnnnnnnnnnnnnnnnnnnnnnnnnnnnnnnnnnnnnnnnnnnnnnnnnnnnnnnnnnnnnnnnnnnnnnnnnnnnnnnggggcgtgtccctgtgggggggtgacagcaaggtcatcacggggagggggcgtgtcctgtgggcgggtgacagcaaggtcatcacggggaggggtcgtgtcctgtgggggggtgacagcaaggtcatcacggggagggggcgtgtccctgtgggggggtgacagcaaggtcatcacggggagggggcgtgtccctgtgggggggtgacagcaaggtcatcacggggagggggcgtgtccctgtgggcgggtgacagcaagrtcatcacggggagggggcgtgtccctgtgggsgggtgacagcaaggtcatcacggggagggsttatcttcctcctggtcccctggtgccccctcctgggggatgacagttcagcatttccaagagtcttggcaggaaggccgcccccaaaccagtccttaggaaggagaaaaccrytgggctgagggtagaggctgcagcagccctggacaccagaagggkgcakagacggggcctcctggatgccatcctcacccggtacccaccaagccctggagctctacagagggaggcctaggggcgcagattctagtgggccatcgctgcccagccatctctgaagctcccagttctccaggcagccggatttccccttctggtaaactgttcccaaggcctgtgccggttcatgcacccagctgggtcctgggccttctcctggtgggcctgcctcagtgtgcttccctgggcaggtgggtactccgctggcagatgcccttatgacctgaaggtctcaaggccaaggtggagcacgctggacctctcagcaggagctgccagctggaggaagcagacagggaggggacacatggcccagctctgagaaagcctgagatgggggaacatgacgtcggggctcctgggagcctcgtctacttcagcaggggtctttaaaaggccaacactccctacacaggaggaaaaaccgagattgcaggcgagggcaaggttggaagggcgtcgggtcagacgggcctctgctccccaccttggctatggccttcctgtgcactctgccagcagggaccccactggactcagctccagcgggtggacaggaaccagcttgtggtgccagacaccaacaccatttgcttctgatgcctgaccatgggcaactctactccctccatctggctgaagagccagaagaagttctgtggaaagcatcacacgcgagcatcgaggtgggcctggagggtggtgggggcatggctgccatcctctctcgcccttccacttggagccgaggcaccggcagtagagtctggttatgaagagggcggtgcgttcagactgctgttttccacrcatgtcatgaagaacaagctcagcagcatccagcaaacttacatgctggacaggctgtgtgtgggctgtggccttcaggcagggagcatgaagtgaggtagccctaagcccagctgggccctctcaatgtgttctcctcaccagcgccttctgctaggcagcgaggtgcagctccatggcaggtgtacagcaccttagcacacggaggtgaatgtcagcaaggcgggcctggacagcacaccgtacctcactgttctcaaggtgggcaccaccgttggctgggtacagggtggacagcacgccctacctcactgttctcaaggtgggcaccaccattggctgggcacagggtggacagcacaccgtacctcagtgttctcaaggtgggcaccacccctggctgggtgcagggtggacagcacgccctacctcactgttctcaaggtgggcaccaccattggctgggcacagggtggacagcacgccctacctcactgttctcaaggtgggcaccaccattggctgggtacaggggaatgggcaggctggaggcctcgcttcactgaagtcttcacttcacgggtagatttcattgaaatctactagcattatagaatttttggagtaacctatgaaagacaaaattatgttggaaggccgaagcgggaggatcatttgagtccaggactttgagaccagcctgggaaacgcagtgaaaccccatctctacaaaaaatacaacaatcccagcactttgggaggccgaggtgggcggatcaagaggtcaggagattgagatcatcctggctaacatggtgaaaccccatctctactaaaaaaaaaaaaaaaaaaaaaaaaaaaattagccaggcgtggtggcgggcagctgtagtcccagctactcgggaggctgaggcaggagaatggcatgaacccaggaggcagagtttgcagtgagccaagatcgcgccactgcactccagcctgggcgacagagcgagactccgtctcaaaaaaaaaagaaaaatgagctgggtgtggtggcggcatgcacctgtagtcccagctactcaggaggctgaggtgggagcaattttccttcttgaacccgggaagtcgagacttcagtgagcccagatggtgccattgcactccagcctcggagacagagacactgtctcagaaaaaaaaggtaccagcaggaaacaaaatcctgtgcactgagtagttctccaggatatgaacttgttggttcatatagaacctgctatgaaccaaagtccaaaattagatgtggtttctcctaaagaatgtgtcaattcataaaagtgggaatcactcctgtgactgtctctcataattggttcaaaaacatttgcttttctctctgcaactttgtatatttttaaattaattaaatctttttactatatgtgtatttatcctatttcatctcgggtttaccttgataatttgttcctaatgaaatatttattctgcgtttgtagtattccatagtttccacgtttttaggttttctgggcagtcgacatggaagatttatgagggtagggctttggtgtcatcagtgaatgaccaagagttttcttttcttttctttttaagagacaaaatcttgctctgtcatccagtctggagtgcagtggcatgatcttggctcactgtaacctccgcctcccaggttctagcaattctcctccctcagcctcccgagtagctgggactacaggtgcctgctgccatacccggctaattttttgtactttagtagagacggggtttcaccatgttgcccaggctagtctygaactccygagctcaggcaatccacctgccttggcctcccaaagtgctgggattacaggcgtgagccacggtgcccrgtgacccagagttttctctgttgtagcatgacaaatataaggatagctgatatacttaatactcatttttattgtgtgagtcaaatgagttattgcatctaaaggaaaccagtgaagcatgccatttgactttggattatttcaagacagcacactgagcccacatccacwgtttcattaatatttagataggacagaaaagcaaatgttgataagaacaaatactacaccacttaataaataatgaatggtatgaataatggaaatttgatgaatcagatgaatcagtacttatttagttcatacaatgtgttagtcattattctaagtgatttatacctatacacttaatacctaatcgtttaacatgtataacacaatgatttatggagaatgacacattgataatcatattaggtggcattaaaaccatagaaataaaaatsttctggtatayaacacaaatgaacacaggaaagttaaataacttgattaaaaagtgtgacttcaatagcaaagacatggattcaacctaaattcccaccaacagtgaagtggataaatgcccatcaacagtgaagtggataaagaaaatgtggtacatttctttaccatggaatactatgcagccataaaaaagtgaggtctccctatgtgtcctaggcactggagtgcagtagctattcacaggcacacttcagcctcaaactcgtgggctcaagcaatcctcccacctcagcctcccagatagctgagatttcgggtgtatgtcgccatgcctagccctgggagttttgcagtaacacccattgaagtgcacaaggcgatgacctttatgtcagatctttcaaaatagttcaagtaacaacggtcatccccagttatgttctcatgtgtttcmcggtgctacagagagatgtttctgctgatggtggccacgtggttgagttctgatcaatgagacttagaaagaagtgcctggggagaatggacttctgtaaattaaaaagcaatggcttccaacctaattccccatgacctatcagcttactatttcctcctggttgctgtttggaatgtggtttgatgcctggaggtgggacagccaacttggaccatgaaggaataagcatgaacacaataactaagcatagacaatgtcagagagagaacatgaaaacaaacttgtatctcataagatcactggactatttcatcaatcatgggctgctacctcttcaacagtgtacatgagacacaatacacatattatgttctttttttttttttctgagacggagtctcgctctgtcacgcaggctggagtacagtggcgcgatctcggctcactgcaatctccgcctcccgggttcatgccattctcctgcctcagcctcctgagtagctgggaccgcaggcatccaccaccacgcccggctactttttgtatttttagtagagatggggtttcaccgtgttagccaggatggtctcgatctcctgaccttgtgatctgcccgcctcggcctcccaaagtgctgggattacaggcgtgagccactgcgcccggcctacgtgagccgttttttgttaatagctttattgggatcacacacgtatcgaacattggtttcctaaattagcaaatcgaccatttcctcaggttattccamgttcttccaagatgcgtcagaagcattctctggaggcagttgttccaaatggtgaagagtactagatggatcccaatctcacaggattcttgcttctattgcagaagagttactttccaggacttcaaaggtttagagaagctgcttgattcgtgtggcttgcagaggtgcatgggctttggagtcacgaagttaatcctgagtcccagcccagcctcttagtagctgtgaggctttgcacaacttccttgtcttggaaagttatataaacctcatctgcaagaaaaggcatgatactgattgcaaaaatggcagcaactcttcatcccttcctgtatttatgccctttgtgatgtgcttttrgctgggactacaggcacccgccaccacgcccggctaattttttgtatttttagtagagacggggtttcaccgtgttagccaggatggtcttgatctcctgacctcatgatccgcccgcctcggcctcccaaagtgctgggattacaggcgtgagccactgcgcccggcctacgtgagccattttttgttaatagctttattgggatcacacacgtaaaatttagccatttaaaatgaatgattttgtggctttttttttttttgagacagagtctcgctctgtcgcccaggctggagtgcaaaggtgtgatcttggctcactgcaacctccacctcccagrttcaagcgattctcctgcctaagtctcctgcgtagctgggattacaggtgcaggccaccacatgtggctaattttgtatttttagtagagacagcgtttcaccatgttggccaggatggtcttaaactcctgaccttgtgatctacccgccgcggcttcccaaagtgctgggattacaggcgtgagccaccacgcccggctctgattctgtggcttttagtacatccacagagttgcccaaccatcatcacagtcaatttgagatgatcaccccataaagaaattctgcatcctgtagcagccaactcctttccccccagcctatgcaactttctgtctaatctactaatctactttctgtctctatttgccaattctggacatttcatataaaaataaaatcacgcaatatgtggggtttgtgtgtgtgtgtatgtggcttcttttacttagccaaatactttcaaggttcattcatgttgtagtatgtatcagcatttcattccttttgttttagagacagggtctcgctctgtcacccaggctgcagtgcagtggtgtgatcatggcttactgcatcctcgacctccccaggctcaggtgatcctcccacctcagcctcccaatagctgggactacaggcacacaccgccatgcccggctatttttttatttttttgcatttttagtacagacgagctctcatcatgtttcccaggctggcaactcctgggctcaagtgatccacctgcctacgcctcccaaagtgctgggattacaggcatgagccacagcgcccggccttcattccttcttatgggtgaataagatttcattgcaaggatagaccacattttatcctctgacggacactggagactttttcacacattggctgttacgaatgctgctgctgtgaacatttgtgtactagcttttttgtggatgttttaatttctcttgtgtatctgtacctgggggtggagtttttgggtcaaatggtacctctatgtttgaattttagaggggttgccagactgttttccagagtggctgcgccattatgcaatcccaccagcagggtgtgagggttccaatttctccgtatcttcaccgacacctgtttttgtcttttttttttttttttttttttttttttttttgaggcagagtttcctctttcgcccaggctggagatctccactgactgcaacctctgccttcccgtttcaagggattctcctgcctcagcatcctgagtagctgggattacaggcgtctgccatcacacccggctaaattttgcatttttagtagagacggggtttcaccacattcgccaggctggtctccaactcctgacctcgtgatcggcgccggcgccgattaaaggcgccaccgcacccagccatctgtttatttatttcattttagtcatcctactgggaatgcagtggtatctcattgagtttttggtaacaactttattgagagaggattcaaacagcatagaattcacccatttaaactacatgcagcaatgtggctggatctcatattaattagtccaagtaaaataatccagataaaagtaaggacatttgaataaaagctattttcactggggaaaaaaagtaaatattgtacaattgtattcatataaaattctagaaaatgtaatagtccaggcacagtggctcacacctataattccagcactttgggaggctgaggtgggcggatcatgaggtcagaagttcgagaccagcctgaccaacatggtgaaacccgtctctactaaagatacaaaaattattattatattgtaccctattttaaatatcatatatattattcacaaatgaatgtaacattgtatacaaggttaagtgtatataaatgaatgtcccctaggcaaggctgggtcccaacccagagaggaaaccctcttggagaagagctgtagccagaacgctgcctcattcagacacgcgcgggagctgtcacctgtcactaagagtctgagggggcggggcctgaggccctacccaatcaggggcaccggggcggggactgcctaatccggcgctccgctagaaaacccgaggcggcttccgggtgtgcccggcctttgtctctcgtgcccgcacgtgcgtgtctcggtcagyagccctgcgcttctccttcactctcggcggttcaggaggctctgccgcagccggggccctcctgtgacctgcatgtactgggggattcgcagggaggatgtcgggacaccccggaagctgggaaatggtgagttgcgccgccgggggtctggagaagggaaggggctgtggcggccccgggccccgggctcccagcggtcggctcccgagggcggacccgggtccctgctggcgcggcgcggcgcggccctcggtcctttctggcgcccggcagagctgggcgggcagcggcaccccgggctccggtcccgtctctgcaccgcgacttccgtcctgcccgaagcagcttccctccccggcccgcgcccgcagccccgcggctcctcgggatcctgcagtgagacccgaggcgcctcaggggagaggcccagcgcggtgtgcgggctcgcgcctgcgaggagctgtggccactggcgtttccagtccctccttaatcctgttaaaaattaaactgaggtttaattaaagcgttacagagtttgagcaaacagcgattcatgagtaggggagcacccagccacggtttttggtttgtgggccaccggacggtcttgatggaaaggcttctgtaaagtgtgtaaggaaacaaaccaaatttatttattttttattttaatgatcgggtggggcggggggggggtctccctgtgttgcccaggctggtcttgaacttctggtctcaacctcccgaagtgctgggattaccccgcccagcccaaagcaaccccaatttaataactgattggttataattatgtagttctgttattcggattatttaggtggatggttcctggttatgtaatcagaggtaaattgctgatttggggttaagttttctttcccttcaagttaattacaagaaaggcatgaagtacctttaggttttcttggtgaggaactcagggcaccatcatcacttaagggaggagaccacccctcatattgtcttatgcccaatttctgcctccaaagaaagaagaagtaaaaactaaaaggcagaaatgaaatccacaggcagacagcccggcgccgcgtcctgggcctggttacagattgacccttgacctgaccggttgtgttatctatagattccagacattgtatggaaaagcactgtgaaaatccctgtcctgttctgttccgttctgattgccggtgcatgcagcccccagttatgtaccccctgcttggtcaatcgatcacgaccctctcacgtggacccccttagagttgtaagcccttaaaagggacaggaattgctcacttggggagctgggtttttggagacgtgagtcttgccaaagcttccggcagaatgaagcccttccttctttaactcggtgtctgaggggttttgtctgcagcttgccctgctacaacttcagtctaatttcttcctatttaattatttccacaagggtactggtttcccctgcattttccaaatgtaaggcaagcagggtctcaaatccatgaccgtattccccagcctaactcttctagaacttgcagtaaaattctgaatttccagtttcttcctcgtactctcaaactccaacttcccctttccaatttacaacattattatttgttctttattgtgcatttgaaccagatgcagtattgtaattgtttatcatgttttcactgagcagtgaggagctgtttctgaacattccttgtgaaaacagagaataatcacctgatctagtccactataaaaaattctttgtacctctcctccttttgtcttccctaggcacactcacaaacgtctttggatggaggtttccctttggaaccttcacgtggtgttgtgtcctcagccaccctcctgtcttttctgggtcctgggttcaaaactgtttgaggatgacctaatgtgcccacactggccctgtctcttggagtgtcataaatagtgaatgtcagctgttgggtcctcttctcccagaagacaaggtgaggtttaggggtggagcctctcagaggagcagctggatggcatgaatcccctgggaccgagaggagtctcctgggatactcttctatactcttcctctaaaaagctaatccactaggacttagatttttttttcttctcttacccccgttatcactccttagagacaaaatgctggtcaggcagtcggatactggtattgagggaagaaagaatttctgccctctggattgtctcatgcttgtgaagggagaacagctattccaaagtacaaggaaaccccgccccgcagtgaggcaggaacctgaaaagcaaaatgcatttggggcacagtggggacacggcgcagttttctgggggagggtgggcattgagtacttcccccagcaggatggggtgggaggattcaggagatgagagggagggtggacattgagtacttcccccagcaggatggggtgggaggattcaggagatgagagggagggtggacattgagtacttccccgagcaggatggggtgggaggattcaggagatgagagggagggtggacattgagtacttcccccagcaggatggggtgggaggattcaggagaagagagggagggtggacattgagtacttcccccagcaggatggggtgggaggattcaggagatgagagggagggtgggcattgagtacttcccccagcaggatggggtgggaggattcaggagatgagagggagggtggacattgagtacttcccccagcaggatggggtgggaggattcaggagatgagagggagggtggacattgagtacttcccccagcaggatggggtgggaggattcaggagatgagagggagggtgggcattgagtacttcccccagcaggatggggtgggaggattcaggagatgagagggagggtggacattgagtacttcccccagcaggatggggtgggaggattcaggagatgagagggagggtgggcattgagtacttcccccagcaggatggggtgggaggattcaggagatgagagggagggtggacattgagtacttccccgagcaggatggggtgggaggattcaggagatgagagggagggtggacattgagtacttccccgagcaggatggggtgggaggattcaggagatgagagggagggtggacattgagtacttcccccagcaggatggggtgggaggattcaggagatgagagggagggtggacattgagtacttccccgagcaggatggggtgggaggattcaggagatgagagggagggtggacattgagtacttcccccagcaggatggggtgggaggattcaggagatgagagggagggtggacattgagtacttccccgagcaggatggggtgggaggattcaggagatgagagggagggtggacattgagtacttcccccagcaggatggggtgggaggattcaggagatgagagggagggtggacattgagtacttccccgagcaggatggggtgggaggattcaggagatgggatggtctgacttgacccttgagtcagccatgtccgtgctcgtcagtactgctactcgtttgtcaccttgaaaatacttgttcacttattttaacttcagtttttcgctgattgaaaaatacattttatcagtacagcttgagagataatattttcaaaaggccaagaaagaggtgtatatcagaaaaatattagatatctagtcatatatttcatttgttaaaaattcttaaatggcttttttcttgcccagagggagtgtagtaagtttcacaggtttgttcttttctgggggtggtttcaacccgaattccagggcttagctttgggaatgctaccagggaaaaatagggacactgtcttccattatggctgcagaaaaatacgttttcacaagaaagtatactcactaacagaagctcactaaagcatcagttccacctttgtgccgagcggagattctgtgacagtggatgactctgtttcctgttacctggatgtccaagtttaatggcaaatctgtgggtggggacttggcatttttagatgtgttaacatcgaaataatttctttatgaaataatatgttatcatgtaaataattacatgacttgtttattgtatgaaaggaatacttctgctttccctgttgaggtatgaaatgtaagtgccttgcaattttattccctccaacatacataaaagcagagtttgagtgattttgctggactcttcaaacactgagtattttttcatttgaaacaaagtgggggccaagcgcggtggctcacrcctgtaatcccagcactttgggaggccgaggtgggcagatcatgaggtcaggagttcaagaccagcctgaccaacatggtgaaacctatctctactaaagatacgaaaaattagctgggcgtggtggcgtatgcctgtaatcccagctactcgggaggctgaggcaggagaatcgcttgaacccaggaggtggagattgcagtgagctgagattatgccattgcaccccaacctgggcgacaatcaaaacaaaacaaacaaactaaaaaactcataataagcatgtgaatccttcaccagcaaccaggttctctcatcaaaattgactagaaggatggtgtgacccatggagagaaggaagaacagtgtggtgctgcggcccacctgagagccaggcggggaaggggagcctcctcctccagcccagggaggcagtgagtgagtgcgctacccagctggggaaactgctatttccatggagctgtgcaacccacggattggaagatcccactcrcaaacccacgccaccgaggcctgccgtcccaaccctggaacgcccagattcttacagcctttcagctggaatctacttaagcctacccaactcccagggggaggggcaaccagcactggccgtggctgcctgctgtctaagccatttgagttccttggggaggggcagcagccagtactgggactccaactgcctaacgtgctaagctccctggacgggaggaggttggcacccatttctatagctccaggctgcacttttcccctgctttagccagggaggctgtacagctaggtcccaagacctgtccctacagcccaatacaccggctgtggcagtttgcagccagagtgcctcttcaggcctaatcccttcttcattgggtggggcttccctggagggtctccaataactccagccagatgctcagggacagaatttggatctccctaggcctgagcccctagggggaggggtggccrcagtctctgctgaccagcagacttagcctctcctcctggtagttctgaggaatcttggcagccyaggtgagtgggtttccccccagtgaagcacaccctctccaccaagggacaaagtctttcattaaacgggtccttttccctgtgccacccaactgggtgagaccctccaacaggggttgtcagacaccctattcaggagtgatgctactggcatccggttggtgtcccttgaggtaagaagtcccagaaggaggagcaggcacccatctttgctcttctctagcctccttgagtggcatctccaggcatgggagtgaatcagatgaatacgcctgaagtgaacccccagcaaactgaggcagccctacagaagagggacctgactacttaaagaaaaacaagcaagcagaaactgacaacagtgtcaacaacaacaacaaaaaaggccctcagaaaaaccccatccaagagccagcagcctcaaaactgaagctagacaaactcacaaagatgagaaagaatcaatgaaaaaatgctgaaaacccaaaaggccagagtacctcttctcctccaaatgatcacaacatctctccatcaaggccacagaactggatggaggatcagttggacaaactgacagaagtaggcttcagaagatggstaataaaaaactacaatgaactaaaggaacatgttctaacccaatgcaaagaagctaagaaccttgataaaaggttagaataagggaggagaccacccctcatattgtcttatgcccaatttctgcctcaaaagaaagagtaaaaactaaaagccagaaatgaaatccacaggcagacagcccggtgccacaccctgggcctggtagttaaagatcgacccctgacctaaccggttgtgttatctatagattctagacattgcatagaaaagcactgtgaaaatccctgtcctgttctgttccgttctgattaccagtgcatgcagcccccagtcacataccccctgcttgctcaatcaatcacgaccttctcacgcagacccccttagagttgtgagcccttaaaagggacggaattgctcactcagggagcttggcttttgagacgcaagtctgctgaagttcccagctgaataaagctccttccctctttaacccggtgtctgaggagttttgtctgtggctcctcctgctacaaaaggaattgctaactagaataaccagtttagagaagaacacaaatgacctggtggacctgaaaaacacagcatgagaacttcatgaagcacacacaagtatcaacagctgaattgaccaagtggaagaaaggatatcagagtgtgaagaccaccttactgaaataagacattcagaaaagatgaagactgccttactgaaataagacatgcagacaagaagagagaaaaaaaaatgaaaaagaattaacaaagcctccaaggaataagggacttcataaaaagactgaacttatgattgactggagtaccagcaggagacagggagaatggaaacaaactggaaaacacacttcaggatattagccaggaraacttccccaacctagcaagacaggccaacatgcaaattcaggaaatacagagaacaccattaagatactcctcaagaagaacaaccccaagacacataatcagcaaattctccaaggtcaaaatgaaggaaatactgttaagggcagccagatagaatggccaggtcacctacaaagggaagcccatcagactaacggtagacatctcagcagaaactacaagccagaagagatagggagccaatattcaatcaatattcaatattcttttttttttttttttttgagatggagtctcactctgtcacccaggctggggtgcagtggtgcgatctcagctcactgcaacctccacctcccaggttcaagcgattctcccacctcagcctcccaagtagcggggattacaggcatgcaccaccatgcccggcaagttttttgtgtttagtagagacagggtttcatcatgttagtcaggctggcctcaaactcctgacctcaggtgacccacccacctcggcctcctaaagtgctgggattataggcatgagccacggcgcccagcctcaacattcttaaaggaaagaattttcaactcagaatttcatattcagccaaactaagtttcataagtgaaggagaaataaaatcctttccagacaaatgctgaaggatttcgttactaccaggcccgtgctgcaagagctcctgaaagaagcactaaatacggaaagaaaaaactggtaccagccactgcaaaaacacaccaaaatataaagaccaatgacactatgaagaaactgcatcaactaatgggcaaaataacaaaatagcatcacgacaacaggatcaaattcacacataataataataaccttaaatgtaaatgggctaaaagccccaattaaaagacttggactggcaaattggataacgagtcaagactcatcagtgtgctgtattcaggagacctatcttatgtgcaaagacacacataggttcaatataaagggatgaaggaatatttaccaagcaaatgtaaagcaaaaaaaaggcagggattgcaatcctagtctctgacaaaacagacttgaaaccaacaaagatcaaaaaagacaaaaaagggcactgcataatggtaaagggaactattcaacaggaagagctaactattctaaatatatatgcacccaatacaggagcacccagatgcataaaacaagttcttacagacctacaaagggaattacactcctgtgtaataatagtatgagattttaacaccccactgtcagtattagatcaatgagacagaaaattagcaaggatatccaggacttgaactcagctctggatcaagtgacctagtagatgtctaaagaactctctaccacaaatcaatagaatatacattcttctcagtgccacatggcacttattctcaaatcaaccacataattggaagtaagacacttcttagcaaatgcaaatgaactgaaatcataatagtctctcggaccacagtgcaatcaaattagaactcaggattaagaaactcactccaaaccacacgatttcatggaaatcaaaaaacctgctcctgaatgactgctaggtaaataataaaattaaagcagaaatcaagaagttctttgaaaccaatgagaacaaagagacaatgtaccagaatctctgggacacagctaaaacaatgttaagaggaaaaatcatagtactaaatgcctacatcagaaagctagaagcaagagcaaactattccaaaagctagcagaagacaagaaagaactaagataagaactgaagaagacagagacacaaaaaaccctccaaaaaaatcaacaaacccaggagctggttatttgaaataattaacaaaatagaccactagctagactaataagagagagaagaatcaaaaagatacaataaaaaatgataaagggagttatcaccactgaccccacagaaataaaaactaccatcagagaatactataaacactcaatgcaaataaactagaaaatctagaagaaatggataaattcttggactcctaccaagactaacccaggaagacgtcacatccctaagtagaccaataacaagctctgaaattgaggcagtaattaatagcctaccaatcaaaaaaagcccaggaccagatggattcacagcagaattttaccagaaatacaaagaggagcagataccattccttctgaaactattccaaacaattgaaaaggaaggactcctccctaactcrttttataaggctagcatcatcctgataccaaaacctggcagagacacaacaaaaaaagaagacttcaggccaataaccctgatgaacgtcaatgcaaaaatcctcaagaaaatactggcaaactgaatccagcagtacatcaaaaaacttattcaccacgatcaagttagcttcattactgggatgcatggctggtttaacatgcaaatcaataaacataatccatcagataaagagaaccaaagacaaacaccacatgattctctcaatatatgaagtaaaggccttcaataaaattcaacatcctctcatgttaaaaactctcaatcaacgaggtattgatggaacatatctcaaaataataagagctatttatgacaaccccacagccaatatcatactaaatagtcaaaagctggaagtattccctttggaaactggtataagacaaggatgacctctctcaccactcctaagttctggccaggacaatcaggcaagagaaataaaagggtattaaaataggaagagaggaagtctgtttgtagatgacataattttatatttgaaaaaccccatcatctcagccccaaaacgttttgaactgataagcaacttcagcaaagtctcaggatacaaaatccctgtgcaaaaatcacaagcatttggttacaccaataggcaagcagagagtcaaatcatgaatgaactcccattcacaatcactacaaagagaataaaatacctaggagtacagctaacaagggatgtaaaggacctcttcaaggagaactacaaaccacygctcaaggaagtaagagaggacacaaacaaatggaaaaaattccatcttcatggataggaataatcagtatcacaaaaatggccacactgcccaaagtaatttacagattcagtgctattcccatcaaactaccattgacattcttcacagaattagcaaaaactatttaaaatttcatgtgaaattggccaggcacagtggctcatgcttgtaatcccagcactttaggaggccaaggcgggtatatcacttgaggtcaggagcttgagaccagcytggccaacatggtgaaattccatctctactaaaaatacaaaaattagccaggcgtggtggtgtgcacctataatccttgctgctggggaggctgaggcaagagaatcacttsatcccaggagktggaagttgcagtaagccaagatcatgcyaccgcactctagcctgggcaacagagtcagacccatctcaaaaaaaaaaaaaaattatatggagtcaaagaagacccaatatacccaagacaatcctaagcaaaaagaacaaagctggaggcatcatgctacctgacttcaaactatactacaaggctacagcagccaaaatagcatgctactggtaccaaaacagatatatagaccaacggagcagaacagagacctcagaaataccaccacacatctaaaaccatctgatcctcgacaaacctgacaaaaacaagcaatgaagaaaggatctctgattcagtaaatggtgctaggaaaactagccagccatatgcagaaaatggaaactggactgcttccttataccaaaattaactcaagatgggttgaagatttaaatgtaaaatccaaaaccataaaaaccctaggagaaaacctagggaggccaggtgcagtggctcgtgcctgtaatcccagcagtttgggaggccaaggtgggtggatcatgaggttaggcattcgagatcagcctggccaacatagcgaaaccctgtctctactaaaaatacaaaaaaaaaaaaaaaaaaaaaaagaaagaaaacctagggaatatcactcaggacataggcgtgggcaacttcatggcaaaaatgccgacagcaattgcaacaaaagcaaaaactgacaaattggatctaattaaactaaagagcttatgcacagcaaaagaaactgtcctcagagtgaacaggcaacctacaaaatgggagaaaatttctggaatctatccatctgacaaaggtctaatatccagaatttacaaggaacttaaatatatttacaagaaaaaacaaaaaactcatcaaaaagtgggcaagggatatgaatagacacttctcaaaagaagacatttatgcatctaacaaacacatgaacaaaagctcaacatcactgatcatcagagaaatgcaaatcaaaacaatgagataccatctcatgccagtcagaatggtgattattaaaaagtcaggaaacaatagatgttggtgaggctgtggggaaataggaacgcttttacactgttggtgggaatgtaaattagttcaaccattgtggaagacagtgtggcgattcttcaaggatctagaaccagaaataccatttgactcagcaatcccattactgggtatatacccaaaggaatataaatcattctactataaagacacgtgcacacgtatgtttattgcaacattatttacaacagcaaagacatggaaccaacccaaatgcccatcaatgatagactggataaagaaaatgtggtgtatatatatatgtgtatatatataccatagaacactatgtagacataaaaaggaatgagatcatgtgctttgcagggacatggatgaagctggaagtcatcatcctcagcaaacacaggaacagaaaactaaacactgcacgttctcactcataagtgagagctgaacattgagaacacatggaaacagagggggaacaacacacaccaggggctgttgggggttggggggtgaggggagggaacttagaggacaggtcaataggtgcagcaaaccaccgcggcacatgtatacccatgtaacaaactcacatgttctacacgtatcccgttttcgtttgttttagaagaaataaaacataaaaattctggactaatttaaaatgaacaattctccgatcaatcacatggcaattccttgccccaagagtgcagagaaagaaaggtacatacatagacccaaaacttactagagtagaaacccataagcacatcttcatgaaccagtacatctgtaggaaaattgaaagtgtaattggcaaattgtttaaagctgagtgtgaacatgattgacagtaacaaataactggaaatgtcaagctgggaactgcttagggcaaacctgccttccgttctactcaaagttaaccctctgctcactgagatcaatgcatatctgactgcctcattttggagaggctagtcagaaactcaaaagaatgcaaccattgtctcttatctaccgatgacctgaaagctccctcccgacttcaagttgtcctgcttttgctttgagttgtcctgcctttctggactgaaccgatgttcatcttacatatgttaattgatgtctcatgtctccctaaaatgtgtaaaaccaagctgtgctccgatcaccctgggcacatgttgtcaggacctcctggggttgtgtcatggatgcgtgtcctcaaccttagcaaaataaactttctaaattactgagacccatctcaaattttcacggttcacaccactatgtaatacccttgttgttttaaatctttattggtttaaatctgttttgtcagaaactaggattgtaacccctgcttttctgttttccatttgcttggcagatttttctccatctctttattttgatcctaggtcactgcatgggtctcttgaaggcaacataccatcaggtcttgccttcttatggagcttgccattgtgcgccttttaagcrgggcatttagcctgtttacattcaagattagtattaatatgtgtggatttgatcctgtcatgttgttagctggttattatgctgacttgtttgtgtggttgctttatagtgtcactgatctgtgtatttaagtgtgtttttgtattggctggtagcagatttttctttctatatttagtgctcctttcaagatctctcataaggcaggtctggtggtaatgaactccctcagcatttgcttgtctgaaaaggatcttatttccctttcacttaggaagcttagtttggctgggtatgaaattcttggttgaagatttttttctttaagaatgttgaatataggccctgagtcttttctggcttatagggtttcagctgagaggtctgctgttagcctgatggggtgacctttgtaggtgacctgccctgtatagctgcctttaacagtctttcttttattttgaccatggaaaatctgattattgtgtgtcttggggatgattttattgtgtagaatcttgcaggggttctctggtttccctgaatgtgactgctggcctctctaccaaggttggggaagttttcgtggatgatatcctagaatgttttccaacttgtttgctttcttcccatccctttcagggatgccaataattcatagatttggccactttacaaaataccatattgctcagaagttttgttattttttattctttttaatttttctgactgtcttatttcagagagccagtcttcatgttctgagagtctttcctccacttggtctattctgctgttaatacttgtgactgcattatgaaattcttgtagtgtgtttttctgctctgtcagaaccatcaggctcttttttatatcagttatcttgtctttcagctccagtgattcttagtttttttggattgggttttgcattttcctgaatcttgatgatcttaattcctatccatattctaaattccatttgtcattccagccagctcagcctgagtaagaacccttgttgaaaaactggtgtggtcatctggaggacatacaacactctggccatttgagttactggagttctttcattggttctttctcatgtctgcaggtgggtgttcctgtaactgcagtgtagattgagtacagtcagtacacttttttttctggatgtcttcgcagagccaaggctttgtgcagggtcttcatttgtagctgacttgtctttggtctcacagaggggaatgctagcaaggtgtttttggtgttggaacttcgggatgtgatccagtaggtggtgcttaggcatactggttagttggtaggctcttgcttggtcatgtggctcccctatattttctgacagttgcagtcatgctccctctcaatgttctgaaagtgtgggcttctctcccacttgaatgctggctataaattgtggcttggcactcttgggctgcccaccacagctctggggcactctcagggcttatgttcctcccctggcttggaggcagcagaggaagggaccttaatagtggttgtggccaaaggtcttttgcttgtctcctgggggctccacccaagaggagccggttagcaattgctaagtgcaatcagcccagaacggagggtctgtgctgtgggaccaagcccagggtttcctatctggtgacaagcagggggagtgggtggaacctgtgggagatgaactggtctcctctccttgggtcaactgcagtttgttgtaggtgtggataaggcacttatggtatttgttcattcatttgtctgaggatagcaagggcagttccaytgcagacagcggtagcaaggcttttgtttgctcctgggggctccacctccaagaaatgcagaaccatagttactgggggtgttcagctggtgggtggggcacctgcactgctggcataagcttggggttctgcttgttggggagcaatgggatgaaggctcacagggagaaaagactagtctctcggtatggtggctgtggtggtatgctgttaagcttgggtgtagctctcaggttctttgtttcttccccagaccaaaggcagcagggatagaactattactgtggcaatggcagaggggctgtcatatgcctctgggagcctctccatggggaaactctgggccactactggtgggtatgctcagccatgggagaggtgactgttctgtgttcatgagctgggggccctacagcagcaaaactgagaagacctgtgatgcctgccatagtggatccccaagggtccgcactgggtgcagcaagcagcccatatctcagtccccaggagaccacctgctgccagttctgaaaagcctggtgacctctatggtaagtctgaggccatttatcaagaccyagttcagacacaagcacagtaggtccattctctgctgacctgggagcagctctcttagcttgccagctctgggggcctctgtgctgcagtgcagaacttctacaccatggactcccaggtggcctgggttccctgctgagggctgggaatctcagccaccctgacttgtgccagggtccagccctggctggagaagtccagagctccttctgggagaaagataggaccagcccytttttggaccaaaggtaactcagcctatctatagatgagatgaagcttgacctgggggtctcctgaccctattcagcaaagaaaacaggtctgggagtgaaaacaaagacttgctgcttctcagattcttctggatgaccagcagtgacaactttagacacaccatgttaataacagaacctgtggtggttgtagaaaaggaatttgaacaatatactgaaaatggtaaacccagttttctttaaggctgattactgacaaattttgtatttcatataagacatctgatgtcttttggctgtcttatgacagtcatgcatttctgtaaatcagaaaatattattagggtgtaatcattcatatatgtttgtatattaaaaagagtagcaaaatgaatatatatttatatcttccccacttgaactcagaaaaggctgtagctcttcactctcccaggccgagtcctcagaagattgatattcaccaacctttaatagcattctctctggagaaatgcttctattttttcagtttgatgaaatcaccatgccattgtttttacttttcattttcttacacagaatctaagacaaggtatattaaatgcttaatgatcctattcttcacctggctcatatcatttacctaattttaaactttcttctactctaaaaatttcaattcatcttatgtattgtagaagattttaaatctaatacaggtattgtctttttttttttttacatatattctattggcattttacactgggatcatggaatatttcattatgtaaattatttaatttttatgtagaaaaaagaaaattattttggtgtttgttttgttctttgctctataatttccattacatactgattagataattttttgagtattttaaattttaggtaattatgcattttatccataaagaatctgcatgtgagagagagagctattttctcctcacttctatttcatctccatcctgacctccccagaatcctcagctctttgtgtagttggatagcagtttataattccagtaaatgggcctaattcaataatataccacaaatcagtttgaaaccaggacatgccttcaagacacaccsaaatgcctatatatataataatactaagttacaattgatgtaaaaaataaaattacaaaaggattgttaaagtaaattcaaagggacatcaggcctaaaaaatccctgaggaaatgtgtgatcagaggctttcccaggcacacactgctctacagccctaccacacaggcttaaccgagaatttgaccccggaaggtgacggatgaacatgtgtcctggtattctgatctacagaaatcctgccctctcttaatgatccatccagagctctaggatcgtttctagatttatttactacacrcagactggaagtttttgacagaagctttgaactgggaaccctaccctgttccaccagcttctctagaagtacaatgttctaattactcctgagagactccatctgagggtaactctctgagccaacaagatttaaagtgagaagaggaaaaaggcaagagtcgggctatgtctaggattcccttacctgacttatgtctttggtttacccaagtattgataagattcgtctctagatggtagaaactagatggaggagcactagctcacagaagtagacaatgggatcagtgctccatagatccagcttaagctcagccatgagatactaagtctctcagaaaaaaaagtaacagttctccatcatctacccccgtagcctcagacagctaggcagtaagcatgcatgctcaataaaactccacatccacatcacagagagagatagaacaatcccaaaggaccgtgaagggtgatgtggagagaccaaaaggatatgaacccacagcatctgccctacyatctgctccaatactaaccctgtcctttcccaacatgatttccagatttttctttggccctcactaagggtgattcagaaagacaaaaagttattaatgcccttccattctccatatctcctgaggtctcagttgtttactctgcgggtttcgggtagctatccctccccaactacatccacaaaattagtgtatctcattcagcaccaagaatttcacctttattctggtcactccctaccttctcctagacattttatctagaaaagccagatgaaatagcgacaaaaatgtttacataaaactcaaccacaactaagttggagtatcataatcccactttgggctaggttgccactcagcctactacaaactaggcttggggcagttaggggaaagctagggtttagagctgatgtgaaagtcagctaaaagcttgctaccgagcccctgtcaagctgaatcctaacccaaggaggactgagggctgcgtagctttatattccacttttgaggtgggtgtcagctaaaagcttgctacagagctcctgtcaagctgaatcctaacccaaggaggactgagggctgtgtggctttatattccacttttgaggtgggtcaatttgaactctctgaaagcccgcaaaagactagctctaaaccctagtctagtacaaactaagctagggttgcatttagcggaaaggaagattatcttttctttctttctttttttttttttgagacagagtctcgctctgtctcccaggctggagtgcagtggcccgatctcagctcaatgcaacctccgcctcccaggttcaagcaattctcctgcctcagcctcctgagtagctgggactacaggcgttcgccaccatgcctggctaatttttgtatttttagtagaaccggggtttcaccatattggccaggccggtctcgaactcctgaccttgtgatccacccgcctcggcctcccaaagtgctgggattacaggcgtgggccactgcgcctggccagtgagatgcatcttttcaggtagtcagtgtggaatctcaaatttgggaaacagatctctacagctctcaaccatttcattcttatcctggaggcagtcaaaaagagattattcctttttagaaagaattacattcagtcaacaaattgtaacatatggatcaggagaaggaaaagatggtaaaatcagccaatttttagtagatttgatgataaaagacacaacgttgtcagagtgcaaatggttctgaaatttgaaaaggtgacagagattagtttcaagggacacatggtgtgtctggagtcagtttttatgttgatggtgtgagcagtgacaaggtattaacaataccttccaaagtgagtcaaaaggtcggtgaagtcattctattgagaacggtcgggggcctcccacactgtgagacaaaaagatcacctttcaccaagaaccacaagtctggctgcagtgctgccctcagcattagacatggattcagattcaatccacagcctggttatagtcagtctcttcagagaacaggctcttattaaaaacttctgttttttttttttttgacggagtttcactcctgtcgcccaagctggagtgcagtggtgcattctcggcacagtgcaacctctgtctcctgggttcaagcgattctcctgcttcagcctcccgagtagctgggattacaggcgcctaccaccatgcttggctaatttttgtatttttagaagagacagggtttcaccatgttggccaactcaaactcctgacctcaggtgatccaccagcctcagcctcccaaagtgctgggattacaggcgtgagccactgcgcccggccaaagacttgtaattgagtgactggacacagcagtaaatcagctgctgaggttatttccagtttgcagcctgaaaggtttccttttttcagacagtctatagtttttaatgcaaaagaccaaacagctataatgtgagcaatgaccctgagttctgaccattgagtggtgtgaccaccccactcaggttccgcatggctgacactgaagttcagaagccaccatagacagtagctcagtgaacaccatgtattggtaaagcagggacagaaatttagggaatacttagtgaagtgggggccccatagagccagaagctttgcttcatatagtgcagcagggcataaaatttccaccaaagatagattccgattttccctttagaactatttctgtgccagtccaatttccttctagaatacattatttatatttaacaagtagtcttttgaggtctttcataaragttcaaattgacccacctcaaaattggaatacaaagctaggcagcccccagccctccttgagtttggattcagtttgactggagttctgtagcaagcttataactgactttcacattagtgtaacctgcagtggtgtcagggtggctatgagtcagacaccccaaagaatatctttaggtgcaggctctttttgtcaaaggcctcaaatggcaaagtgatcaagtttttcttgactgctggaagaattaagcaatgaaaatatgtccacttagcttcactaaaccttatttggaaagcagaactctgggtttttttcaggtcttcttgttattgagaaaacagtgcttactatccaatgtgctaagagccaatacattgagttgtcactggatttttgtttttgagacaagctttatgttgaaagttcactcccaaagagacaggagtcccaagcccgaatctgtctccctctgctggcatcaaggcagaatttctactagaacaggtaccggggggtagcttctgaggttaggaggtgactagcggatgataatgggaggtctggaatgtccatgggcatgcccagttatctcttcatgcttcctcatgggtcatatgtgcaaatttggggggagttagtaggaaacatagtggaaattcaggctatgatgtcagcaagctcattctgtgcagagtcccattggttctattggtttaaaccaatttcagctaattacttttatctcgtaagtggagggaatttcagtgttttagcaagttttttttttttttaatttgccatcctgtaaactcaaggatttctgttagtcattggcttaacttttttttttttttttgagtcggggtcttgctctgttgcccaggctggagtccagtggcacgatctcagcccactgcaacctccgcttcctgggttcaagccattctcctgcctcagcctccagagtagctgggattacaggcatgcaccaccatgcctggctaatttttgtatttttattagagatggggtttcaccatattggccaggctggtctcgaactcctgacctcgtgatccacacggctcggcctcccaaagtgctgagattacaggcgtgagccactgcgcctggctgcttctttaactttttgaagcacagtctcaattatcagctacatctactagcagagagatattactattctagacaggagcactgagacagacacctctgtctttgcagctaacagctcatgcagggtgaacattttgcatatcagagtgtaaaggttctcatgataaagactgacctgccctctgtggcaaatggagaattctgtctctctcacactcttctacctgtctcccacccagactggaataatcccctccggcacttaggggacagggaagcacaaacacatacaacaaaattctaactgtaaattttggtgtagaaacacaagaagacattgagttagccccaaaggccccacctccattgttttgtgacatttctgctttcatggtgaaccctgcccaagccctgtcagtgaagttttggtatcagcgagtacatagagagagagagattctctgcttataagcaaggcaccaacacccacatttccttttagtttctagcagcctgttgactgctttcagcaaaaccacaagaacttacagtattttctatttatccaaagtgctctatcagctttgtggactcctcattctttcctactttggctaggagaatgaacatatgagcacatttagactgctcctttcaattctccctctcacacaacaacctcgctaacaggttggcgagtggagggatcttactcttactcaactctcatttgggtaagagaatttgctacttgttccaggaagccttctcataagccctggccaggtctgtgaagaatctttctactttcctcttataccaggttataaggttatagatttatcagaatcaatcgcatcatcacccaagctgtcaaaaatgtgaacattcgtggatttttttctatttgcaagccaaaaaatgaagactgtcaacttcatggatattagaagaaggcatgagattcctaggcctgatgaaaaatatttgatggttcatcacacaaatggaagcaagagctccatatctgtatctgttccccacgtccactccaagtgacagggatgatcaaagagacccaactggatgctttctgctcagtagattttgatcacagctgaggaatctcaaggttaagaaatcccagtgctttggcagggcacggtggctcacgcctgtaatcccagcacttttggaggccgaggcgggcagatcacgaggtcaggagattgagaccatcctggctaacacggtgaaaccccgtctctactaaaaatacaaaaaaaaaaagaaaattagccaggtgtggtggcgggtacctgtaggcccagctactctggaggctgaggcaggagaatggcgtgaacccaggaggtggagcttgcagtgagccgaaattgtgccactgcactccagcctgggtgacagagtgagactccgtctcaaaaaaaagaaaaaaaaaacaaatcccagtgctttaacatgtgtttcaaagaaaaccttccaaccactgcctcagagaaaggcataatctttattaaattgtccaggtatttatttggcctttgacctgaagatacacatccttcaagtctgtttctttcatttaaaaaaatcctgaaaaagacagcccagaagaaacgcttayacaagatgtgggaaaatgaagtgagagatccatgaagaattgtcttccaaaagggagcaacattcccttacatgtatgagaatattgatacagccattataaaaaaccgtaaggtggctcatcacaatattaaactagaactaccatattatccagcaagcccacttctgggattatatccaaaggaaataaaatcagtatctcagagagacttctgcaatcccaggtttattgcagcattttccacaatagccaaagacacggaaacaacctaaatgctcattaatagatgaatggatacagaaattgtgatacacacacgcaatgaaatattattcagccataaaaaagaataaagtcatttgtgaaaatatgaagctggagaatattaagtaaaataagtcagacacagaaagacaaatgttatatgatcttacttatagatggagcttaaaaacattgaactcgtagaaacagactacatagtggtttccaggggccagaaggtaggggaaatggggagacattgctgaaaaggtacaaactttcagttataagatgaataagttctggcattctaatgtacagcacgggtggcaatagatgttgtctcagtcccttcctgctgctttaacaaaatacctgactaggtagtttatacatgacataaactcaattgcttacagttatataggctgggaagtgcaaaatcaagccattggcagactgtctctggtgaagaccttggtctctgctttcaagatgacatcctgaatgttatgttcacagacagcagaggggcagaaagggcagaactcactccctcaagtccttttatgaagtcattcatctcaatgatgagggcacagcctttatgacctcaccacctcctaaaggcccccacctgttaacactattgttttggagtttaaagtttcaacatgaatttaggcggaggacaaacttttaagtcacggcagatgatactgattttgtaacaattaccacacaatgtgtatttggagatatcttgaatatatccaatattatctgtcaactaatattttaaaattaaacatacaaataaataaaatatgaaaataayttatccattgagcaaaaaaggcccactgaagatttctgaccaaaactaccattgactctttggtgctgtggggctgctgaaaactgaaagatgaagaaaataacagaattatacagtcttcacagaaaagtcagctctgagggtgagatattaacttgggtgagacaatgacaggtgacagcaaatgaaaaagaattcattatattttgttagcttactggaaaaaaataaaattactagtcataaatctcaattctgaatcaactgcaaaatcaaattttaaatatacatcctgattaaaaaaacaaaaacagcatctctgtggccttaaaatagagaaagatttcttaaataaaacaaaaaacatttaatatgctggggaaagaacaaataaaattctattaaaattaagaccttatcaaaatacagaataaattatattttgttagcttactggaaaaaatggaattcctagccacaaaaacactcaattatgaatgaattgcaaaataaaaatttaaatatacatcctcatttaaaaaacaaaatctctgtggccttaagagaaatatttcttaaataaaaaatatttaatatactgggaaaaataacaaataaaattttattaaaattaagagcttattaaaatacagaaagagagagactgagtgagagagataccaaagaaaggaatcctatccagcttcatgtaaagaaccaccataaatcaagaagaaaaagagccctaaaatagcgggagatgagcaaagtaagtcttcaaaatagaggttattcaataactaaaaagtgtgctgaaatgttcaagtctgttagtaatcggagaaatgtaaataaagcctgagaccatcacacagcaaccagaagactaaatgaaaatgacagaaaataccatgtgttgggctgggcgcggtggctcacgcctgtaatcccagcactttgggaggtcgaggcgggcggatcatgaggtcaggaaatcgagaccatcctggccaacatggtgaaaccccatctctactaaaaatacaaaaaattagccgggcgtggtggcgggcgcctgtagtcccagctactcgggaggctgaggcaggagaatggcgtgaactcgggaggcggagcttgcagggagccgagatcgcgccactgcactccagcctgggtgacagagtgagactccgtctcaaaaaaaaaaaaaaaaaccatgtgttggcaaggatgtgggtaccctaggaaattcacacgttacttgttggcatgaaaagtgttacaagtaaaaagtggtacaattttggaaaactggtaatatcacctacagctgaagagacgtaaacatacaacacaacaatgtgattattacacatgttcccaacagaaatttgtacatgtttcaccaataccaatacattttctggaatttacatagcagccctgttcctaataccctcaactaaaacacatgcatatgtgcatcagcacggagtgattaattgtctgatattcacacaacagaattcaatgctaaaaaaaaaaaaccaaaacaacatgcagaattaccgaaaaactcaaaacaacctactggattttaaaagccatgtacaaaagggctcctgctgcatgatgtttatataaagtataaaagaggaaagtgacctatgctgttagagatcaatatagtgtccatccctgagaataagtgactgggatcacaaggtggtatctggtggtatctttgggctaaaaatgttccccaccccccgctttttttttttttaagatctaaaaagcctcagacaaaactgtccccaatatttaaaactatatggtgctatccacttaggacatgtgcatgtatctttaaatattttaaatacatgtaagaatttttgttttaagttgaaggatgctaaatagagtattgctgcccacagggcacaggtattaagttgcttgacactgcgacagtgtttaaaagtaagctacaatttctaggttaaaaacaaaaataaaacaaaatataaataaatataataaataactatatatgtaattatatatatatgagggaaaagtagaattctattaaaatttagtacaaaagataaaaagaaaacagagtaggtattgtgaacgcagcaacgcaataaacccagtcccaaatatatccattataatattcaacaaaatagactaattattcctattaaagacaaatattacctgattgtatatagttggataaattaaccacgaattacctagtacagtgatatgttaaatataatagactttatggtaaatcattgtcattgtaattactattgcttttacattcttaatgtgcaatttttcaggattactgcttgatagataagcataatctgggtgtcacacagaaaaacaatcacaccgttatgtccagataatgtatttatgtatgtgagtatatactgtcagtttcttgtaatgttactattttgtaattatgtttacagttctatggagatgagtgaataaacatatgagcactgaacaaacatatacaacccatgtacttctgagaagattaagggattttaaaattacttatctagctttgggaggccaaggcgggcggatcacgaggtcaggagatcaagaccatcctggctaacacggtgaaactccaactctaytaaaaatacaaaaaattagctgggtgtgctgacgggcacctgtagttccagctactcgggaggctgaggcaggagaatcgcttgaacccgggaggtggaggttgcagtaagctgagattgcgccactgcactccagcctgggcaacagagtgagactccatctcaaaaaaaaaaaaaaggtcaaataaaatccaatactctgcactgaccattagtttcacccttagaaatgttacttgatttttttcaattattaaaaggtttccaacatgtaaatgtacaccagttaaagtgtccctgcaatgtattcatcactgttgtgatgagcagccatgtagtaactttctattcttcacaaatctgtgaggtaggtgctgccattatcaggatgagaacttaaacatcgagagggtaagtcatttgtctaaattcagacactggacaggagtagagtggggacttgatcctgtctggactgaagtcacggagtgcctttaactgacatgctctattatgattggtgagtcatctgctattagatttctggatgtgagcacatcacataactagtcttttcctttcttgctgtaacaattgccttataacatttcggatttctactcatgtaaagttacaggtttcaggtactatctctacctggaaacagacagtgtagaccatctgtgtgattaagggaaagagttcagaaccccagcaacccacagtggagaaaaccacctaagcctccagtgagggctactaaatcttgctgaagttagcgtccataagaaggtcattttgtctaagttcatcaagtcttgtggtcacaggattatatctttagaatgctggtgagcagccatgctaacgaaagccccctttggctaggagtttagtactgggaggggtactgggagaggataatataaagtgattatttcccttgtctttgctcatctgcacctaaatcatgaggatctatggatatgcacctcatcagaagagtgcacataacagcagcaagagaaaaagcagcacagaaaacacaaggtcactatgctttcctacacaacaatcacttgtcaggcaactgtctgagatacctaattctccccagagtggatgtctccttgtacacgcatatgtgtgacacacacacacacacagatataagttggctccgtgtccccacccaaatctcaccttgacttgtaataattcccacgtgtcaagggcaagaccaggtggaggtaactgaatcatggggacggtttcccccgtgctgttctcatgataatgagtgagtctcatgagatctgatggttttataagaatctggcattttccctgcttgtacttctccttcctgccaccttgtgaatttgtgaagatgccttgcttccccttcaccttctgccaggactgtaagtttcctgaggcctccctaccatgctgaactgggagtcaattaaatctctttcctttgtaaattgcccagtctcaggaatttcttcatagcagttcaagaatgaactaataaactacatatatatgaaataacactatatagtatatagcactataaactatgctagggtactcaaatttctttcaatatagatgcaaaatgtctcaaaagatgctacaaaactgaatttaccaatatataagaaghcttacacttcattaccaagagagatttaaccccccaaaaaagcaatgttgtttttgcatctaaaagtcaatttggctgggcacagtggctcacatctgtaatcccaacactttgagagggcaaggcaggagaatcacttgagcccaggagtttgagaccagcctgggtgacaaagttagacccaatttcttattttagaaagtcaattaatgtgatataccatgttaacagaataaatttgaaaaaccacaagatcattccaatagatgcacaaaaaccatgagaaaaacttcaacaacacttgacaatgaaatattcaataataatgaacagcaggaaactttctcaacctgctttaaggaatttattttaaaaaccctcagctaacatcatacatgatgataagactggatgctttctttctcagattagacacaagacactgttcgatcacaggtctctctccttaaaccaatgttacctatgcaaatagccaaaaataatgacaatgtaaagaacaacagatgaaaataataattcacgtgagaatatactctataataaactttacatacttacaaattgacagcaactctattagcaaagaaaatagactcatttatcaatggccaattaataacaaaataattaaactacacagaagttaaacctacaaatacatttcacacatctactgtgtaacccacaaaatttttaaaaaattttaaaaatattttatactttaaatatttaaaaaatattttttaaaatggctatgcaagaaaaaaggaaaagaaatacatttcaatttacccatataaccaacacactttaaaatgggtagaaaaaggaaatttatttaccagcttaaaaaagaagaatacatatttaactcttgtactactgcttgaagaatacttacagaagtcttgcctcagctgggcgtggtggctcacgcctgtaatcccagcactttgggaggctgaagcgggcggatcacgaggtcaggagattgagaccatcctggctaacacggtgaaaccccatctctactaaaaatacaaaaaattagctgggcatggtggcaggcacctgtagtcccagctactcaggaggctgaggcaggagaatggcgtgaacctgggaggcagagcttacagtgaactgagattgtgccactgcacaccagcctgggcgacaaagtgagactccatctcaaaaaaaaaaaaaaaagtctcacctcaattttttttttttcaaaagaagtgaaaatctatattctagagactctcttcaaaaatgagcaaccaatatattcaatttatttatagctcctaaaacatctcattcacatagtgaattttcttgagaattgtactataattattttccataaggttttccataatatttacatttacaggatttatttccagtgggagttttcacatgacctttaaagtaattgttaaaattcagaattttctgtatttctaggatttcaatctggtgggcattcttttatttataaggtcaatctggartatgtgttaccatgtgtctctgagtgagttataggataaatgaaggcattctcacattcgataccttcataaagtttttctctagaatgagttatgttataccatcaaataccactggaacaactgcaggccttaccacattttaaacattcatatggattttcttcagtgagtcctttcaagttttcaaaaagaaatggaaaaattgaatgctttaccttattgcttatagtcatagggtttatctccagtttgattcgtttcatgtatttgaggaaatctgggaaaattaagtactttcctacaccttacattcacagtttctctcaagtatgtgactrttcatgtttttgacaaaaactgtagtgattaaagcctttacatttttttacatttatagggcttttctccagtatgagtttttttatgcttccaaagggtactagcacgactaaasgctttgccacatttctgacattcatagggtttctctccagtatgagtcctttcatggtcacgaagggaactggaacatctgaagcctttaccacaattgttacatacatagggtttctgtgcaatatgagttttctcgtgtttctgaagggaactggcktatctgaaggctttcccacattgcttacatggatagggttcttcaccagcatgagcctttatatgtccttgcaaggaactgagacaactgaaagctttgccacattccatgcacacataaggtttctctccagtgtgagttctttcatggtartgaaggcaattggagtaacggaaggctttcccacagtgcttacattcatagggtttctctccagtatgagttctttcatggtcacgaaggtgactggaacgactgaaggctttcccacattgcttacattcatagcgtttttctccagtgtgaatccttttatgtctattaagagaacgggaaaaacctaaggctttcccacattccatacattcatagggtttctctccagtgtgatttctctgatgtatctgaaatgaactgggaatattaaaaactttctcacatattgtacaaccataatgtccatttccagtgtgcattactgtgtctctgtgaacccttgtgacagaaagggaagttttctgacattgtttacatgtacatggcttctttccgcattcctcacacccatatgggttgtttccagaatgagatatgatgtgcctatgaagggatgaatgacgtatgaagaatttttcacacacaatgcattcatgtggttttactctagcaggaatttttttgttcagattaaaatttggcatctggaggtttttctacactgacttatttaattttacacagtatgtctatcatatgacttctrcaaaaaatgacaaccccatcattaatggtttattagttattttcttttattactaagtctgaacttacactgctaccaatatcagagaaagtgcaggttttctaacataaacaaattgaasataaatggattgattagtctacaacatggctccctcccctatagctattaacaatacagtaatattctcatatgcagtttcttagtattgaatacagtttgggtattttctcccttcaaatttcatgctgaaatttgatcctcatgttggaggtatgacctggtgtgaggtgcttgggtcatgggagcagattccacataagtggcactgttgtggtaatgagtgacttctcgctctattagttcctgaaagatccgattgttaaaaaaaaaaaaaaaatggtcgggcatggtggctcacgcctgtaatcccagcactttgggaggccaaggtgggcagatcacttgaggtcaggaattcaagaccagcctggccaacatggtgaaatgctgtctctactaaaaatacaaaaattagctgggtgtggtggcatgttcctgtaatcccagctacttgggagactgagtccggagaatcacttgaacccgggaggcggaggttgcagtgagccaagactgcaccactgcactccagtctggataccagagagagactccatctcaaacaaaacaaaacaaaacaaaaaaaccccaaaaactttggcacttcctttctctctctcttgctccttctctccccatgtgacatgtcagctccccttccccttctgccatgactggaagctctctgaggtcctcatcagaagcagatgctggctttatgcttctgataaagcctgcagaaccattagccaaataaaactcttccttataaattactcagcctaggtattcctttatagcaatgcaagcagactaaaacaatactgttttcaagtgaactattttgcaaacatttaacatccatgttacattgaagtatatatttttggtaaaaactttgagaataaattgatgttgtcttaatttattttgtttgcttggtttttttttttccccgagatggtgttttgctcttgtttccctggctggagtgcaatggcacaacctcagctcattgcaacctccgcctcccaggttcaagcaattctcctgcctcagcctcccaaacagcagggattacaggcatgcaccatcacactgggctaattttgtatttttagtagagacgggtttttgccgtgttggtcaggctggtctcaaactcctgacctcaggtgatccgcccacctcagcatcccaaagtgctgggattacaggtgtgagccaccatgcctggccttgtttgctttaaacatatgattatatactacaattgaccccaagggggactgcttcctcttgtgagggcaaattaccttagatttcttgaagaatttttgtactgatcttcaatgctctggtcttcccctttgtttcctaaaatgtagacccagaaatatattacaaattatttgaaattatagaaaaattactagactctaggtgctatgttggggatatggtttgtacccaccaaaatgaatgctgtaatttggtcatcaatatggcaacattgtttgtgttatgggtacagattccttattaatagattaatgtccttgcttgggaatgcatgttttctcttactcttgcaagactgaattagttgccagagggcaggttgttataaaagcaagtttagctcccaagaattgctcttattttcttgctgtgatccctttgcacatgcccacttgcttctgcttcatgccctgagctgaagtagcatcaggtccttaccagatgcaaccttggactttctagccactagaatcataaaccaatataaaactatttttgtaaattacccaggatcaggtattctgttatcacaattaaaaaatagactaagaaacaagagtcattgcacactgggtccatgcctcattcactcatcaaagtgttccctttgtacattccaaatcatggaatgacattgaaaaccatgaaacacttactttctgattgactaagtgaagaaatattgtgattcttacctatggaagccagattcctgaaggtttcctgcatcacgtctctatagagattcttctgggaaggatccaacaaagcccactcctcctgggtgaagttcacagccacatcctcaaaggcaaccgagttctaaaatattccacatttttgtagaggatggatgagactgaaagcactggaaatctgtagtcaatttataagatgttcayctgattctgtggcgaacatttattctactatttggtcactagaactatgactctgtctacacttmctttctcccacatagcagtwcttttttttkttttttttttttttttgagacggagtctcactctgttgccaggctggagtgcagtggcaccgtctcagctcactgcaatcttcgcctcgcaggctcaagtgattctcctgcctctgcctctcaagtagctgggactacaggcacatgtcaccacgcccagctaatttttgtatttttagtagagacaggatttcaccatgttggccaggatggcctcgatctcttgacctcgtgatctgcctgtcttggcctcccaaagtgctgggataacaggcgtgagccaccgcgctcagccagcagttcttatgctaaagttgaactgttcagcaaggcagcagcagagaaggaacacccttcttgttggtgggtccagggagtaatatttgctgttatgatttttctttatagcatatacctgcagtacatatcatatcaaagtcttactatctggtgtgcataagagagttaatatgagccgtcacaagactacttacccttagaaatacctgctacaaagttcaacctttgctggtatgagggaacttacattttaagaggcatcccaacaacctaagtgataaaagtagctcactgttgctaaatagtttatctaaacaatctggtatttgctgaacccctgttttccttccaaaagtctattattttgttttattgtagcagtggtgcctagggggatcagcctcaataaacaaacaaaaacacactctgagcactgagtatctgatgagcttccctggtagataatatttcatatatgatgtcacaactttttaattgggaaattgagcccaatccacgtggttacacaaagagaaaatgtgtagaagcttataagtgcttcactcaagcccaaatttaatcaagaggtaattaacactaataatcaatattcaataatccaaaaataattattttacaatttctactgaaaaatgtcaaagcagaatagaataagtgaaaaggcatgcgttcaaagaaaaaaactcaatgtcatctagatgtcacytcttacaaatgatatttatgtaaaatttcatagatgcctgaaacagactttctagcagttcagcagaaactacttttcaaaacctacagaaataacaaacgcctaacaaccgtcaaagtcttctgaataacagtgtgatggtttgcctaatacacatcaatgattttcaaatataatattcagggcagtgtagtataagcagagagataaagaactaggccaagagaaaggcatatagtctttaattagctggaattgatatggaaagctgactaataacagaggaggcattgtaggatagtgaaggaagtatcaagcactttaaacatggaacaaagctaaccggtatttaattgggaaaaaaatgaattgcattgacctctattagttggacaataatcaatttgtcatatattcaaaagtaaaaagtataaatagaccacttgcagaagtcacagacaaggttttttttgacatatgaataggagaaaaggagcaaacaatagagactgacaaattcaaatatattaaaattaggagaattaaaagacaaaaaacagtaaaataaaaatctgcaatacatgcaatataaaagaaattagtgtgcacagtaaaaatgaatgaaaacatgattaaaaaatgggaaaaaaaagcaaaagatacataacaagaaaaaagaccatttatggaaagagatccattttcttggtaataaaacagccaaataatatggcatattactataataataatagtaaataatagtycacattctttagaagaacaaaaattagagaatctcaagtggtgattaccacaccaaataaatacgcagaaatgaaggccaaggcagtggatatactccattgctatttccagtaatttgaactttaccacaatctacagtccagtaatttttctctaatgtccagaaaatttattgtgcattatcagagtttatattcagcattcttaaggaaaagaaattccaaccatgaatttcccatccagccaaaagaagcttcataatcattttcagacaagcaactactaagagaatttgttcccactagatctgccttataagagttcctaaaggtagtgctaaatatggaaagatcattaacagccaccacaaaaacacacgtaagtacatagaccagtgacactataaagcaagcatacaaacaagtctgcataataactagctaacgacacaataacaagatcaaatctacacatatgaatagtaaccttgaatgtaaatgggctaaatgccccaattaaaaggcaaaatgacaagctggatagagaaacaaaaccaatcgtatgctgtcttcaagagacccatctcacatgcaatgacgcccacacattcaaagtaaagagatagagaaaaatctacaacacaaatggaaaacagaaaaaagtaaatytaggagcaataggccataccatatagcctaggtgtgtggtatattatgccatctaggtttgcgtaagtacacgctattatgttctcactataaaactgcctaacaacacattaagcaatgtatgactgtatatctttacttatatataaaatatattaacccttggcaaaaaaaaaaaaaaaagcagggattactagtcaaatttcagataaaacagactttaaaccaaaaacaaaaaaagacacgggtattacatattggtaaaaggttcaatccaacaagcagacctaactatcctaaatacgtatgcacccaacacaagagcactcagattcatacggcaaattcttacacacctacaaagagacttaaccacagagttaacagtgggaggcttcaatgccccactgatggtattagatcataaaggcagaaaactaacaaagatatttgagatctgaactcaacacttcaccaaatggacctaatggacacctacagaactcttcaccaaaaaacaacagaatatacattcttctcagctgcacatggcacatactctaaaatcaaccacacattcagccataaaacaatcctcaacaaatcaaaagaaaaaaatgaaattaaggtagaaaccaagaaattatttgaaactaataagaacaaacatacaagaatctctggaacacagctaaggcagtgttaagaggaaattttatagcactaaatgcccacatcaaaaactttgaaaagatctcaaattagcaacctaacattacacttagaggaactaaagaaacaagagcagaccaaccccaaagctagcagaagacaaaaaaaccaaaatcagagataaattgaagagagagagaaaaaaaagcaaaagatcaacaacttcaggagtcaattttttgaaataagatagattgctagctagactaataaagaaaaggagagaagatccatataaacacaatcagaagtgacaaaaagggtattaccaccagactcacagaaactaaaaaaaaaaaaaatccctcagaggctattattacaaacatctctatgcatacaggctagaaaacctagaaaaacgaatacattcctggaaacaaaaaacctcccaagattgaaccaggaagaaatggaatccctgaacagaaaaatgagctctgaaatttaatcagtaataataaacctatcaaacagaaaagccaggaccagatggtttcacagctaaattctaccagatgtattaagargagctggtaccattccttctgaaactattctaagaaactaaagaggagaaactccttaactcattctatgacagccagcgtcatcctggcaggcatacaacacatggcaggcatacaacaaygaaaaagaaaacttcaggccaatatccttgatgaacatagatgaaaaatccacagatgtaaaatactagcaaaccaaatccagcacacaccaaaaacctattccaccaccatgattaagtaggcattatcccttggatgtaacatttcaatatatacaagtcaataaatgtgattcacaacataaacaaaactaaaaacaaaaaaacaacatgatcatctcaatagatgcaaaaaaaagctttaaataaatttcaacatcccttcatgttaaaaaccctcaacaaactaggcatcggagaaacatacttcaaaataataagagctatctatgaaaaacccacagccaacatcatagtgaataggcaacagctggaaacattcctcttgagaactggaacaaggcaaggatgccctcttttaccactcctattaacatactactgaaataaaatgcatccaaataggaagacaggaaatcaaacttctctgtttgcaaatgatatgatcctataccccccaaaaccccacagtctctgttgaaaagctcctgataaacaactttagcacagtttcaggacagaaaataaatgtacaaaaattaggagcatttctatacacgaataatatccatgcagagagccaaatcaggaaggcaatcccattcacaatagccacaaaaagaataaaatatctaggaatatagctaaccaggagatgaaagatctctacaatgagttacaagatgctgctgggaaaaaaaaaacaaaacaaaacaaacagagatgatacaaatgaatggaaaaacattccatgctcattgataggaagaattaatattgctaaaatggtccaactacccaaagcaatttagattcaatgctattcctatcaaactaccaattacattgttcaccaaattagataaaactattttaaaattcatgtggaaccaataaagatcccacatagccaagcaagaagaacaaagtttggaggcatcatattaaccaacttcaaactatactacaaagctactgtaaccaaaacagcatggtaatggtataaaaacagacagactgatggagcagaatggaaagcccagaaataatgccacacacctacgaccatctgatttttttttttttcttgagacggagtcttgctctgtcacccaggctggagtgcagtggcacaatctcggctcactgcaagctccgctgccccggttcaygccattctcctgcctcagcctcccgagtagctgtgactacaggcgcctgccaccccgccctgctaattttttgtatttttagtagagacagggtttcaccgtgttagcgaggatggtctcgatctcctgacctcatgatccacctgcctcagcctcccaaagtgctgggattacaggcgtgagccactgcgcctggccaaccatctgatttttgacaaaatcaacaaaaacaaataatgaggaaaggacttcctattcgataaatggtgctaggattactggctagccacatgcagaagattgaaactggaccccttccttacaccatatacaaatataaactttagatgcattaaagacttaaatgtaaaaatttaaagataaaaaaaccctggaagataacctaggaaataccattctggacataggacctggcaagtatttcatgatgaagatgcccaaagcgactgccacaaaagaaaaagttgacaaatgggacataattaaactaaagaacttcttcacagcaaaacaaactaacgggattaaacagagaacctacaaagtgagagaaaatatctgcaaactatgcatctaacaagggtctaatatccagaatctgtaagaaacttaaataaattaacaagcaaagaggaaacaagaatgaaacattaaaaagtgggcaaaggacatgaacacttttcaaaagatatacaaacatgagaaaaatgaacattatcactcatcactaaagaaatgcaaattaaaaccacgatgagataccatcttataccagtcataatgctgttactaaaaactcaaaaaatagcctgggcagggtggttcatgcctgtaatcccagcagttcaggaggttgaggcaggaggattatttcagtccaggagttcgagaccagcttggacaatatagtgagacattgtctctaagaaagaataaaaaaattagccgggcctgttagcacatgcccatagtcccagctactcgtgaggctgaggtgggatgactgcttgagcccaggaggcagaggctgcagtaagccaaaatcgtgccactgcactccagcctgggtgacagagcaagacactgcctcaaaaaaataataaagtgaaaacaaaacaaaacaaaaccagatgctggtaaggttgtggagaaaagggaatgcttatacactgctggtgggaattcaattcactcattttggaaagcagtgtggtgatttctcaaagaaattaaaacagaactcccattcaacctagcaatcccatttattgagtatatatccgaagaaatagaaatcattctaccataaagaaatatgcatgcataggttcactgtagcattattcacaaatgtgtatataccacattttctttgtccagtctactgttgatgggcatttaggttgattccatgtatttgctattgtgtacatgtacccctgaacctaaaataaacatttacaaaataagcagaatacatatacaataagagtaaaacacatataaaagaaatctgtgtcttaaatcttatgtaaaaagtctctaagggcacaccagcaagttggataacattgatgaggtgaacaaatgtctagaaacacacagtgtaccaagaatgaatcatgaagaattagaaaatctaaacagactcacagttatatgacattgatgtagtaatcagaacccctaaattggacagacactacaacaagctacaaatgttctttataactattaatgcagaaatcctcacttaaataccaacaaaccatatttagcatcatactaacgcagaaatcctcacttaagtactcacaagccatatttagcagcacagtaaaaggattatacaccaaaaccaagtgagatttatccctaaaataaaatggttcaatatatgaaaaatcaatcagtgtaatgtatgacatttgcaaaatgactgaaatatcgtagctattgcaacggatgcaggaaaagtatttggcaaattattaagacccactcatgataaaaatacacaataaactaggactacaaggaaactacagtatgaaaaaccagcactaacatcaccatcaatgctgaaataccaaaacaaacaagcaaaaaaacccttttctcccaagatcaggaaagagcggtagagaacctctgcttttatcactcccattcaacacagtattggaaatcctggccacagtgatcgggcaaggttgctgtacagatttagcattaatgtgccaaatgcaggcaacagaaaacagcacagacttacccactctaacaaattcttcatcctgcaggaaacaaactgatgttttggttaatttttgtaattcaccaatttatgtaccacacttttgtgtgtggaaatgtattcactttctgtaatcataaaggaagagagatttttcctatttctcttccctggtagcattcctgattaaaagccctagaatttcatttgaaactacccaaaagaagagacgagacctcaaaaagttaccacatacactcaggggaatgaaaataaaatatatcaaaaaaactcttctaaacattggcttgggcaaagaactcatgaccaagaacccaaaagcaaatgcacaaaaacaaaaatgaacaaatggcacctaattaaattaaaaagcttctgcacaacaaaagaaataatcagcagagtaaacagacaacccacagagtgggagaaaatcttcaccaactatgcatcctacaaaggactaatatccagaattcacaaaaaactcaaatcagcaagaaaaaattccatcaaaaaagtaggcaaaggacatgaatagttctcaaaagaagatatacaaatagccaataaatatgaaaaaatgctcaacatcactatcagggaaatgcaaattaaaaccataatgagataccaccttactcctgtaagaatggccataatcataaaataaaaaacaatagatgctgggatgctggtgtggatgtggtgaacagggaacacttctacactgctgatgggagtgtcaactagtacaaccgccatggaaaacagtatgaagattccttaaagaactaaaagtagaactaccattcaatccagcaatgccactactgggtatgtacccaaaggaaaagaagtcattatatgaaaaaaacacggctgggcgtggtggctcatgcctgcaatcccagcactttgggaggctgaggcaggtggataacctgacatcaggagttcgataccagcctggccaacatggcaaaacccygtctctactaaaaatacaaaaaaaatttagctgggcgtgatggtgcatgcctgtagtcccagctacttgggaggctaaggcatgagaatcccttgaacccaggcgacggaaggttgtagtgagccaagatcgtgccactgcactacagcctgggtaacagagtgagactctgtctcaattaaaaaacaaacaaacaaaaacacttgcacacgcatgttaacagtagcacaatttgccactgcaaaaatatgaaacaaacctaaaatgcccatcaaccaatgaggggataaagaaaatgtggtggaatactactcagccataaaaaggaatgaaataatgggctttgcagcaacttggatggaaatggaggcattattctaagtgaagtaactcaggaatggaaaaccaaatattctatgttctcacttataagtgggagctaagctatgaggttacaaaggcataagaatgatataatggaccttggtgatttgggggcaagggtgggagggggtgagactrcatattgggtacagcgtacactgataaggtgacaggaccaaaatctcagcaatcaccactagagagcttatccttgtaaccaaaaaccacctgctaccccaaatgtattgatataacattaaaaatttttttaattaaaaaactaaatatatatataaagtggatttaaaatatctacatatatttaaaatatccacttctttctttgcctctttgtaaatattttatctttaaagctctattgatgaaatacattttatgtttacctaaggcaccaataaatgaacaaagctttgcaagaggacagcccagggaggagcagcgctaactggaacacagatatgtttgactcacatgtcaagtaagaccatctctcaagcaggagattccctggtccccggtctcctcattggagagaccacgtactcaaggaccaacctcccagcgcaatgcactgtggcccactgtgtgcctaaggtgcagtttgcttggcaggtttttgtgtcatcttcctgggaagaaattttcttgttctttaaggttgtttttctcccttcacaagtgtgaaagaatccagagggcaggaatcatttctgtctctccctcaaaataccagcattggattggatgacaccagtgtctctcccagtgtccccactgtgtcctcccaccccatcctgctcagggaagtactcaatgcccaccctcccccagaaacctgtgccgtgtccccactgtgccccaaatgcattttgcttttcaggttcctgcctcactgcggggcggggtttccttgtactttggaatagctgttctcccttcacaagcatgagacaatccagagggcagaaattctttcttccctcaataccagtatccgactgcctgaccagcattttgtctctaaggagtgataacgggggtaagagaagaaaaaaaaatctaagtcctagtggattagctttttagaggaagagtatagaagagtatcccaggagactcctctcggtcccaggggattcatgccatccagctgctcctctgagaggctccacccctaaacctcaccttgtcttctgggagaagaggacccaacagctgacattcactatttatgacactccaagagacagggccagtgtgggcacattaggtcatcctcaaacagttttgaacccaggacccagaaaagacaggagggtggctgaggacacaacaccacgtgaaggttccaaagggaaacctccatccaaagacgtttgtgagtgtgcctagggaagacaaaaggaggagaggtacaaagaattttttatagtggactagatcaggtgattattctctgttttcacaaggaatgttcagaaacagctcctcactgctcagtgaaaacatgataaacaattacaatactgcatctggttcaaatgcacaataaagaacaaataataatgttgtaaattggaaaggggaagttggagtttgagagtacgaggaagaaactggaaattcagaattttactgcaagttctagaagagttaggctggggaatacggtcatggatttgagaccctgcttgccttacatttggaaaatgcaggggaaaccagtacccttgtggaaataattaaataggaagaaattagactgaagttgtagcagggcaagctgcagacaaaacccctcagacaccgagttaaagaaggaagggcttcattctgccggaagctttggcaagactcacgtctccaaaaacccagctccccaagtgagcaattcctgtcccttttaagggcttacaactctaagggggtccacgtgagagggtcgtgatcgattgaccaagcagggggtacataactgggggctgcatgcaccggcaatcagaacggaacagaacaggacagggattttcacagtgcttttccatacaatgtctggaatctatagataacacaaccggtcaggtcaagggtcaatctgtaaccaggcccaggacgcggcgccgggctgtctgcctgtggatttcatttctgccttttagtttttacttcttctttctttggaggcagaaattgggcataagacaatatgaggggtggtctcctcccttaagtgatgatggtgccctgagttcctcaccaagaaaacctaaaggtacttcatgcctttcttgtaattaacttgaagggaaagaaaacttaaccccaaatcagcaatttacctctgattacataaccaggaaccatccacctaaataatccgaataacagaactacataattataaccaatcagttattaaattggggttgctttgggctgggcggggtaatcccagcacttcgggaggttgagaccagaagttcaagaccagcctgggcaacacagggagaccccccccccgccccacccgatcattaaaataaaaaataaataaatttggtttgtttccttacacactttacagaagcctttccatcaagaccgtccggtggcccacaaaccaaaaaccgtggctgggtgctcccctactcatgaatcgctgtttgctcaaactctgtaacgctttaattaaacctcagtttaatttttaacaggattaaggagggactggaaacgccagtggccacagctcctcgcaggcgcgagcccgcacaccgcgctgggcctctcccctgaggcgcctcgggtctcactgcaggatcccgaggagccgcggggctgcgggcgcgggccggggagggaagctgcttcgggcaggacggaagtcgcggtgcagagacgggaccggagcccggggtgccgctgcccgcccagctctgccgggcgccagaaaggaccgagggccgcgcggccgcgccagcagggacacgggtccgtctctggaatccgaccatggaagcccggggcgagggccgccaaagccccttcccttctccagaccccgggggggcaactcaccatttcccagcttccggggtgtcccgacatcctccctgcgaatcccccagtacatgcaggtcacaggagggccccggctgcggcagagcctcctgaaccgccgagagtgaaggagaagcgcagggctactgaccgagacacgcacgtgcgggcacgagagacaaaggccgggcacacccggaagccgcctcgggttttctagcggagcgccggattaggcagtccccgccccggtgcccctgattgggtagggcctcaggccccgccccctcagactcttagtgacaggtgacagctcccgcgcgtgtctgaatgaggcagcgttctggctacagctcttctccaagagggtttcctctctgggttgggacccagccttgcctaggggacattcatttatatacacttaaccttgtatacaatgttacattcatttgtgaataatatatatgatatttaaaataggaaacaatataataataattcttttaaaatttcagacttattaaccttcatggcctctggtcttctgaggaagcagtctgaggagcccgagttttgaaaagggaagcaatcctccaaggctgcgatttccacagaaatcacatgtgagccacaggtgtcattttaaaatttctagtagcaacagaaacgaggaataaacaggtaaaattgattgcaatactttatttaactcaatatatacaaaatattataatttaaatatatgataaatataatattaatgaagtattttttgttgttctgttttttggtactaaatctttcaaagtcactctgcgttttaaacttccagcatgtaccgattcagaccagccacattctaggtgctaagtagacccctgtgggcaatgactgtcacactgaagtgcagttttgagggctctggttcccctgacctcagggagtgaagggcccgaacccctcttttctgctagaggtgagggaatgccctccttctgctaacatctctcctcaggcccaagggtggcagagacagtgcccagagagagaagtgggctgcaataaagaagtatctagagggagtctactatttcccacctgctcttgccaggggcccagcctcttctatagataagacagtgaaaaaaagatgaggggccccaggagaagaaaacccatgtcttcagatttgtccacagccttaacctcaggactttagatgtagagggaatacattaaagacaaacttctcattttgcaatttggctttggccctaatggtcaggctgtggttttctgtttcctcctgtggtgtggaatttaagtgtgtgagtttaagcacaaatcacatgcatgtctacgtgcacttctgtatggctcaacaccgtctaaccagaaatccaactttacataaagggaaaaggaaatcagtacatacagggtgccttgtgtttgcctggtaaattgcaatcaacatgtcattgaatcctggcatcctgtctgcactaggtgtacgtattacctattgcttcacagtaaaattccccaaaacgtattagattgagctggtccaccttctaggctgggctcaagtgagccattcttctggtctctgctgggccctttcaggcacgtgtggtcagctgctggttgactaggcaatgctgcttctgagggtgagctgcctgtcaactgtggcactttggttttcctccctatagtatctcatcctctagcaggctaacatggacttgttattatggagatgacagggttgtgaaataaaaagcagaagcattcaagagcttttgtgcctcggccccaaactggcacatggtcatattcacagctttctactgccagagcaaataaggccagtgagattcaaggtttgggaaacagattctgcctctcaatgaaagcagctataaaagcacatcacaaagggcataaatacaggaagggatgaagagttgctgccatttttgcaatcagtatcatgccttttcttgcagatgaggtttatataactttccaagacaaggaagttgtgcaaagcctcacagctactaagaggctgggctgggaccaggattaacttttcgtgactccaaagcccatgcacctctgcaagccacacgaatcaagcagcttctctaaacctttgaagtcctggaaagtaactcttctgcaatagaagcaagaatcctgtgagattgggatccatctagtactcttcaccatttggaacaactgcctccagagaatgcttctgacgcatcttggaagaacgtggaataacttgaggaaatggtcgatttgctaatttaggaaaccaatgttcgatattacatattttttatttcttttcataggataaatttaaaagcacagatgacgcactccacatgaacgcaaatcctattcatccctttttgttgtttgtaggctatttatgattttcaacaaagactaaatcaaaccactgtgtctgaaataacctcttactctgaaagcaagtgacatgaaaatagacctgctgagaaaaatttcttcctgctgcaatttaacgaaacagctgactacaatttgaagccattctttgatttttttttttttttttttttttaagatggagtctcgctgtgtcatccaggctggagtgcagtggtgtgatctcggctcactgcaagctccgcctcccgggttcacgccattctcctgcctcagcctcccgagtagctgggactacaggcgccggccaccatgcccggctaatttttttgtatttttagtagagatggggtttcatcgtgttagtcaggatggtctccatctcctgacctcgtgatcagcccgcctcggcctcccaaagtgctgggattacaggcgtgagccaccgtgcccggcccatcctttgatttttaacaaggcaagcttgttttccaagacctcaaatagatcatgtgagtgtcagggctactatattgactcagaaggtggaccatatcctctgtttggagatggagtggtgagagggcctgcaccagcatgtgaagaccttaggtccataggtgagattcaatcatcaggtgtggtgttttagggtcctgatgtttatgcaaaagttatgtgtatattactaaaggtaaattgtagaacattacaaataatcatatataaaccaaaaatgtcaactacaattgtcattatgcattattattctaagtatttttaccacaattagaagtagtagcagttgttgctgctgccgctgctgttgtaggaatggagatgaaaacatggaataaagctctgctgcctggtcattctgctgctcctacggctgcagatgtgctagttctgcgcagactttagacttctgttgtgaagctgtaacttaagagactttcagtgctctgctgtggcaggaaaaaagtttgagtcaagacagaacaacaattctgtgaatttgaaggtggagggtaggatggttctggggcgcagttgaaggggaagaagtacacatcactgaatgaaggagtggaagcctatggtgaatggcagggtttggccatgaagcaaatcagatttggattttacggacggtcactcagtgaaactgacacacctgcaaagcgggaaatggaggacgaataaacaggtgatgtgttccagcagcagacaggagggccttctaagaacacacctgctcctttacccaggacctcttcctacaactccagcagacattctcatgtagaaacccacaatgtgatttcatcacattctgactccacattctgacaccacattctgactccacattctggctggtacagtatccttttctccattctcttatcttccccttcctcatttcattattgcacataaagcatctggggtaggcacacaagcatattgctatttttgtttgcttgtttgtactaaatgacatgtgttgatccgcagccaaatgagacggggcagaaaaatactggccccgtgaagactgtttctccaccagtggctgctcactcagctcttatctctgtatttcaggacttaaacaacaataacaaaaaaccataatacccttgcatagattgttcaattggtgaatttcaatgtttttaatatagcattgtaaaaccaaaaacaatttcataacttttttatctacgtagttgttacacatagggcaaatctgtatataggactatgtatataggactatatatatacgcgtgtgtgtatgtgtatatatatatagtcctatatatagcatatagcatatatatttatatatgtatctatactatatacatatgtatgcatgtatactatatacatatgtatgcatatatacatatatactatatatacacatatatagtatatatacactacatatatactatacactacatatatacattactatatatgctatatatatacactatatatataatatatataaacctatgtatataggactaaatgacacttgaaagaatgaatctcaaatacttttcccttcaaatccactgtctgtttaagtatacattttgcatataatgaaaaaatacataaaaattaaaatgtaaggtttatctcactatccagtgtatcagttggaccaaaaatgaggaaaaagaggcatcttgtctgcaggaagttctcaattctcctgggacccccgaaccacctgcgccccccaagcagaccccgttcttggcctgttgccagtggcagtgcatcctgatgaggcttccacgtcttggcccaggaggcacagggagggtaggaggttgtctgtctcacagccaggccaatatccctgacccaggaccctctggaagaagattcccaaggtccccgtcagcttttggaagggttatgccattctagagaaattataaatgttcttgggggttgacccataggtgagctgggcatccctgtgctcttgggagctggagcaggcaggaggcccatcctcctgggcacagccgccatggctgcagacccaggcatctctgcactctggagggctcaggaaggttcccccacccccacaggcttggaagtgctcgctcccactgtctggcttctcctcactcttggcatccactccaatcacagagaaaaggggagtctgggcccacgcacctatcaacccatcacctaggtattaagcccagcatgcattagccatctcctctttgacttttaacatgaaattctcatgatcattttatgttatcaatgaccagtcataggttttaaaatgctggctgttacttgtgtataataacaatgacatttttattaataaaacaaaacacgggatacttttttttcaaagaacacattaattgcatgtaaaattgcttgtggatttgtgtaaatggtttttcattctagtacactcctcttttcttcagaggtgtcgattaagctcaagactttataatcagtctttcgtttcttgttcattcaatggtaaatttttcccatcattattcataattatgtaaatacctgggacttacaatatttagaatagtccgaggtgaaagccaacataaggatgaacttgatctgcattatctgtttcctgagagggctcgggagcttcaccctcagccccagccacccatggctgtcacttctcacagtgagggctgagatgtgcatttagattgatcagtttttaatgtatcaggtaggacccaatagtcctttgcactctgacccacctacagataagctctctgattatgttcttctatattgtttctcccaggtcagtaccatattattgtaaatcctgtgattcatagtgaagttgccagattcatcaagtaaaaaataggacagaaaattaactttaaaatttaaataaacgacaaatgacttttgagtgcacaaatatgtctttgtcaatgatcagtagttagattctgagagataaatttccaaaaggaataatgaaaataatatactttagctgtcaattctaatccacagtattgtgatccttccttgtgcagtctcaacaccaatgacctcaagagacttgttagagagagactccatctgatgattcagcagataaagtatttttcagcatgtgattgttatttgtagagagaagggtgtgaa

SEQ ID NO: 96920 - DNA, 13990 bp, Homo sapiens
aatcgcatcaaaatctcaatggaatcttttaagacctgaaaaaataattcaaatctcatctagaaaaaggaaccgacaaaaaataaaaattctaaaaagtgttaaggggaaaaaagttatcagagatgggcctaccagatcttacaagttatcataaaacatcagcaataaagccagcatgggcccaaggggaggcacacgggagctcttcttactcttcttgctacttttctgcatgtgtgaaattacatcaaaataaggaatgacattgtatcaaagtcaatatgggtgcccacagcacctgagtctattacaccaggggtccccacccccgcctccaccacggaccgtggcctgttaggaaccaggttgcaccgcaggaggtgagcagtgagtgagcaaagcttcatctgtatttacaagcacttcccattgctcacattactgcctgagcctcacctcctctcagctcagtggcagcattagattctcacaggagcgcaaaccctattgtgaactgtatgtgagggatgcaggttgcatgctccttatgagaatctaatgcctgatgatctgtcactatctcccatcacccccagatgagaccatctagtttcaggaaaacaagctcagggctcccactgattctacattatggtgagttgtgtaattatttcattatgtattatgaggtaaaaacaatggaaataaagtgtacaataaatgtaatgtgcttgaatcgtcccaaaccatccccctcctggccagttcatggaaaaattgtcttccacaaaaccagtccctggtgccaaaaaggttggggaccgctgtattacagcacagagacttatatctctgaatagatcccaactgcaagtccctggaagagggtccactgaggcccggtcacctctgggcagggtggcaggctctgggaggccagggtttctgtctcaggtggggagagctcctggagagagggacctggaagtcagttcaaccaggcaaggctgactggacactcactgggataaagcactgtattcaggagttaggtcagaaagtccaccttttaatcagcctaagaagactggagaccaacaagttcatcttcacaatcactgaaatgtctctgaagcactgaggtctcagtagcaataaaacagaactatgataagatgatgcaggggaaggatgagtgaatggacagatggacgggcagatgggcctgtagaaagaagggtggattgacaagggaataaacctacctggatggccaggaaggatttggaactctttctactctgaccttgcatacttcactctccttcataactggcctgacccttccatttacaaataccaaaaatgtttttcccagacaagcttgtctcttctttcatcatgcaagcttcactgcagcaccttctcctctgccagtgggaattaactccatacaaaatgcactctgtgtgcatctttcagcaggccacccgagacgacagtcagcatctcctgtttgctgcctgtgggtcaggccctgcctgtgggtcatgccctgtttgatacctgtgggtcaggatccagccagcagtgctggcacggagggtcacagagcaacctgggtgacagcgccacacaaagcccagccaagcccactccttcaagggcaatgaagggcatggctgccccccagagggctggccctcagagggtcaagtccagcacacacagacgttgtgttgtatgatcgttttgcagcaaccagccaactcaaaacctcacttgtgtgatcgtttctccaaacacttcaggaggcgggtcacagccacatggtctgattgacatcacatgacacacatttgcctcacctccttatgccaaaataaggcatattcagttttatctccactaatggctctttagctttaccttgtaattgcagtttattgtttcatggttgctgtagataattaaatatgcaaccttaacctaaaatgtgacctaaaatatttagcattgaaatagaaatattttacatgacaaaaattaacaattatggttttagaataaacatttttaaaagtagactgttaaatttaaccttgttctatattccaaaggtaggatttggctcaaatattgaaaattaccagaaagtgatgctggttcaaaatgagaaacattctaactggacaggttgcctgttgctggcatcaatcaagtagaagcaggatattcacctgctacatgaaattatcatattaaactacgtataattgttacaaattgtttgtaatcctcaactcacactaattttaattctcacaactgcagatgctaagcattgttggaatgaatggcctttataatcttttcaactgcgagtccatatactctggtacatctgcccccccttattcccaaatttaatctatgcttattctaatatggaccttatacatcaacaatgattaaaaataccaccttataggctgggcccggtggctcacgcctgtaatcccagcactttggaaggctgaggtgtgtggatcacctgaggtcaggagtttgagaccagcctagccaacatggcaaaaccccatctctactaaaaatacaaaaattagctgggcgtggtggcaggcacttgtaatcccagctactcagaaggctgaggcaggacaatcgcttgaatctggaaggtggaggttgcagtgagccgagatcatgccactgcactccagcctgagtggcaagagcgaaattccatctcaaaaacaacaaaaacaacaaaaaaatcctttgagatttcagtttaatcatgatgaactaaatacacatattcatttctgcttcctctgcaaccccacttgaaaggctagaagggattttttaaaaaaggttgggtgggacaaacaaaagaaaaacagaaggaatgagcccatgaggacaaagaaaacaagatgacagcaaatgctctcaggaaaattttggtagcaggagagttggtgaacaaatgataacaggtttctgctttttccactctattagcagcctgtgaagagctgggtgtttgggagtggtgacagaaataagccatgtagcacgccagaaaacgtcctctccacaaatctgagacctagaaacaatgagtttcctggaggtggccatgctgaaacacttacaattctggatgcctaagggcaggagtcctggatccttgccagttactgtagctattgttattggtgggcttaaagtctactttgttgctacttattttttgtcttttcttttctttttttttttttttttgagactgagtcttgttctgttgcccaggctggagtgcagtggcgcgatcttggctcactgcaacctccgcctcctgggttcaagcgattctcatgccttagcctcccaagtagctggaattacaggcacatgccacctcgctcggctaatttttgtatttttagtagagacagggtttcaccacattggccaggctggtctcgaactcctgacctcaggtgatccacccatctcagcctcccacagtgctgggattacaggcgtaagccaccatgcccagcctccttgctactcattttctgtgtgtcttctctctcccatgttcttctcctgcactcttttgggttaatcaagtattctttgtattcaattttatctccatcagtggctctttagctagctataccttgcaatttcagtttgtttatcatttcagtggttgctctagggaattaaatacatatccttatcacagtctacttcatattcctgttatatcacttcctatctaatgtaatctgctgtcttaacaagagcagaagttcgttgcctcaccatgcaacctttgtgctattgtttcaaatattttatttctacatgttacaaacattattatttggtgttctttgtagattggttctttcaaccgacttcctggatatattttttcctcctttgtaaagggaaaaagacacaggtctacatagtactgaaagataaaagcatctcagactagtattccttcaatcacggaagtgtttcttccacttttatcctatttttggaagagtaatcaacactctaagaactaaaagagaagggaactcgtgtcagatgtgcatacaatgctaaaggaatttaaaattatttacagctccttcttctttccaactgactttttcattggaaatttgttcacaaagttaaaggcacatctcttaaccagaacagaacattttgtacagcaaaacaagagagaaatttcaaaccaaaaagagatttcatcacaaggttcgtatttgggaagtaactttgccatctaccaactttgagtggtttcaaaatttagtctaaaatattctcattttcaaaggcaaagaatgagaacagagaacttttaattttcagataaatcaaatgcatcaaaatttggatctgtgctttccaagatttaagagctagaggttagaaattatttaaattttaattatatgaaaattaacaccaattactctgatgcggctaaatagaaagtagaaaaaaattttaactggagacattctgtaaatttactatttgtgcctggctaggaacgatgtgtgggaatgagcttcacctgccaacgggaggtgcatctttttaaaacatgcatctttttaaaaattagagtcaacaagacccaaaataagagttttctaagaaagcaagatataatttcattctcccttttatgagaatgtctgtatgcttctcaaaatctaaaaatcaaaagttttctttttaaaaggtactatgtatacctgctgagactggatattttagcaattggtttatttagtttggttactggtaaactttgtataacctattatgccgtcaacaaaaaaaagccaataaaacaatacctcaactctacattgttttttttcccagtgtatttttagtgacattattcctgacaaattgagaacagagggtcaatgagacacaataggattttaagacagaaagggaagaaattgcctcctattggagaaggcatacaatacttaactcagggttttatatgtcactgagatgagcaatatccaacaacttagaaagctccctcatataccggcttgcaaaaaagagacacgtaggtgacggattcaaacccagtcgaagagcatggacttttaactcaactgacaaaaaaaataaaaaataaaaaaataaagcgggcgcaggtggagactgaccacaaaaagaaatgtaccccaccagcatctggattgtcacacccaggtcctaagactgccagtctcaaggtttgttgtttagcccctgtgaaagcctcacacggtcaccacaaagtgtcacctcagttctgtgatccatagcagttttactccattaaccgtggctggcctgaaatgcccggtcctggtcttgcttagatgaggacttatgaaaccaaggaaaatgtcaaaataagtatagagaaaatgaaactcaacaatcctatactgatcacattgtgtaaattgtgtttacacaggtgtaataacacattttgtaataactgggctctttgtttaggctgatttaaagatgcttaaaaatgcttaacagtatttttactacctgtatccctaggtcgagttacctgcatttgactcataagcaatttctaagatttggtttgtcatattataagtctgctccattaggtgtctgcagtttaattgaacatgtaggtggtattatagtttaaggagggtttaagcattgaatgttaatcaaaaacattgataagcaaaggaaaaatgaaagtgactcctttcatgactgttgtatgctctgtaagttgggtgtaaaggtttaaggtggaaaaaacgtacctcgagggaattaattttaatatacgagataataattaaagcatgattggccggggcgcagagcagcaggtccgctttgtctccccggggcgccgcgcggtgcagttggggcggcgcggcgagcggggcgcccgggcgcgggtgcggggtgtcggggcgcgcgcgcctgttggccgctcgccgattcctgccgagtgtagagaggagagggagtgaacagggagcggggcttttgtctgttggtctctctggactgaaaacagggagaatagaagcccaagactaagcttctcaaaatggtttactacccagaactctttgggtcagtcaagaaccatttccaaacaaggacatggagggaaggtttcctaagggaagacttcctgtcccaaagaaagtgaaccgcaagaagaacaatgagacaaacgctgcctccctgactccaatgggcagcagtgaactccgctccccaagaatcagttacctctactttttttaatcgtaacacctccatttgtattacatayggtgtatgggtattgatgaggtcatggtattatatatgggatttttttctgtgtaaatcattaagtataagaagaaactatgtgactctgagccttgctttagagaatttacagtggacaaataggtrtcatcaaaccagtttttaatcattctgactcaagtgaaaatgctcagaatttcacaccgtgaatccacgtttacaacccttacaggtgggccttcaggcctggttcgctacaacgtcttccacaactcaaactcccaccgtgctcacacaactggtccactcctgagtcccccctttttttttcatttagaatgtaacaaacctagtagtttatgcaattgtctgtatatctctatattttatccatgtactcttttgatgtatagaagtagtttgaaactcattgtttccttgtggtaactgaccgagatgctgccacaggacctgagacactgatgaatggtgctattttggactttcaacatgctccttggcgaggtagctctgatggagttattttttatttccatgttctaagaaggtgttggtactctgtttccctgaatgttgttctctagactggattgacttgttttccttgtgtcttcagtgtggctttcttcctcagtgttgtaggttgagtgaatgctaccagagtgtgagagacgattgtctcgtcggctggcacccacagacatgcagtcacggtagtgggagcaatcacaaaactgtaatttacttaccaaatctcttcctttccgttgcctcgcctgcctgacttagagaaagaaaagcaataattttacaggcattttgaggtgtctctttgggttctttctgtttgaaacggtatttgtggaaaaaaagagcaaaacctttttaaataaattccccctgaaaaaaacccaaaacactggcatctgagtaggaatatgaaaatgacaccttttccaaatattaaattggaaaacaatgtctacaaaatcatggtacttttttaaaaggcagagcattcttttttggcaattttgataagcaaggtgtagatttacatctttgtccttgctcccaacgaaatggataaacaaaaataaattaccatctactcatggaatgttgttgtgttagccagtctgaaagcccaccttaatttttatataactgtcttttagctcttcttttgacagggcaggccttgttctgaactgtttcgcttctgactgttaaacaccgatgacgcatgcactgcacttctttgttttcttcttgctcccccattggcctgagtttcttgtgcattactcctctccctcctttgttagaataggtatatcagctgtgtaaatagagcaagaaaacagtattctgcatctgtggcatttatgtagagttgcagctgtatactgctgaaaatgcaggcttttgtaacagtgtgatctttaccgatgcactcatgacaagtacccaatgtattttagctattttagtagtatttgttcaataaatatgcaagctgtaaggtaaaaaaaaaaaaaaaattaaagcatgattacatgggagtgttgcttcccatgtacaaaagcacttcttaggaactaaagcactaatactttctgcaagaacaattgtcactgatttctactttagaactatagggctgtgcaaaatgaaactaaaatcagaaactatgacaccaaacaatccatgtattcttacgaaattcagaagatggccgtgtctctggttactaggacttctagaaattgagtgccttaaaatcctaaaaattttacagaccattaatatattaacatgaaacctgatcttctgctaatgtagtatctgtaattactatgagaaacgttctatttaatgattttccatgtttctaaaagtaaactacacataagcaatttttaaacttttagtaaaagaaaaaattggtttgatcacactacctctattctggcaaacatgaacccctttaaggaaaatcattcaagtcatatgaacccattgactaatttatgcatcattttaactaatttcttccataggatttctatgttgaaaatgaaacaatcttcgattcttaaacaggagatggattctacgagtggctttctataggagaaaaaacttactagaataaatgttttattagctttagcacatctactcaacattcatagaactgctaggaataaaaagtgaaaaaacatgaaaatgaatgaaaaatgagactcagagagattagctgacgtggttcaaaaacaaaagcctcagaggaggcctgcatgccatgtatgtactgctaaagggatgtggttctagaaacgaaaggggagagaataaaatatatattggcaatgcttaaaccaaaatgtattaagacaaaacaaacttaaggcactaaaaaccaaggataaaagtactgaaaataaatctaatgctaaaacttctcactgaactccaaaagcaaatcttttgaaccacagtatcatgttaaaaactaagattttacagctgtgctactactaatagtgtctgtgtgtgtagatacacagatgatatatagatgaacagagagctgcatagagacatagattgatagagcgatagattttaaaacatttatttgccattcactactttgcaacaattctcccaatttggtttgaaaagagacaacagttgacttttgttcaaagtccaagtaaagagagaggccatgtttggagtgagaatcctttaataactatatttatttccagagaacaataaatacagaaattgcaagcagtatatgtaacagtaatattttctttaaatacagaatcacctacttttatacaacttaacaggcaaacatgttattttgttgttgttgtttggaaattagcattgggaaaagctatataacagaggaaattccaagtaaaatcaaacagtgttcactcttaactctaaacacagtgctcccactactggttctgcattgaggcggaggggaaggccagaggcaggcttagcttcgggcggcagcggtctggggctgctcggactggagctgcttgccaaggtattccctgaaaaaaaagaatgaagtaaggagaatgagaatttcaatagcaaagaatcacttccaaaattgaaacacattatgcactgtcatatatacttactttaacatccaaaaataactaaaaagtcctagaaaattaaacttttccaaatttcaaaagtacttgtgctgtatgaattctacttcatgtatcatacacaaacaagttatgacaaagacaaactagtcattctcctatttttatgaataacttgtaaagttattacgattacacaaacaggtgattacaaggaaatgtaattacttcctggggaaagactactttcctgttcagataaaggtcttgtttactgctactgccatttctgcaatctaagaagttcaacatcacctcaattacgattctgaatgacctcataaatgaaaaacaaatgtcctgctattagagaatatgtgtatcttcaccctgggatgacacaagagtacgtgaaaataaatcaccaaaagtagcattgggagtccccacaccatcaggagctactggtctggggcactcactctgcaccagcacagtctaaagcccacacagagacggtcagcccagaaccacagaacaatcccaggagctgagtagcagcactcactccacagatggggcaatggggctcagagcagtggtccccaatccttttagagcactctcattcagaaaataagcatgtgcccacagtatgtgcatatttagctctaaagtacatacagacaccactgtgaattccaggacagaaaacaatcttgtccctattttcctttgaggcacttgccgaaacttttgttttagaaccaattaggaagaagaaaaagaggctttttaagaaaaaactatttaaaagttttcctcttataaaaaagcatgagttttggaatagagacgtgggtttacgttccagctccatgacctcctgggtattcccatgggggctctaggaggcactgggtatggaggccctggctgggctgcaagcatcaggtacactgtcaataccatcgtctcttgcctatcgcctatcaactgtgtgagcatcgccaagaaaccacctttgggggccaccgatgtacacaggtaaatatgactccgcctctctccacagtggtccagaagagggcaagcatttcacctgagctgctctccccctgctactgccgcctaggccaaagcagcaaagattttaagacagaaaagacagaagcactgggaatgaggacaagaaggaaatgtcacgcagtggcggagcagcagggaggaggaactggtggcccagagcatgtgaagtgtcacgcaccactccccccaatccaaaggctgttcattttttaataccatgagactgaatgaagcatcccaggacatgaaaatgggttatgatcttttccatccttcaaggaaagttcttataactgactcattaattttggatgtcacattaaagtgtttaatattcttgtgctaccaggaactacgctgacataatttagacaatgggatcttatttccaaccagaagttaagttcacgcaaaggctgaaagggaagccatcctatcatctttgttagacaggaaaaacaagagtttacagtcactatcaatgctgctcctctgggaatgcctgcaacttgggagcatttgtggtcacacagatttgttttcttggtggtggaggtaataatatttatggcaaatttccagaacttataaatatatttttcctacatatatgtgagaaatcaagcctgaagttagatatgcttcattttaaggaggtcttcaaatatttcaattttagactctttagtgtggagccttagaaaacattttaaaagtgtactcaaagacactgtgccactctccaatgacagtaagacgtggttctctccctaaagcaccaatgtcaaggaccaacttctaaatgtaagtttccaaaaatgactaataagaatgtatgggaaagcctccaggagctcaggcagggaactggtaagttatcacaaagggtcctgtgcgtctggtcacagacaggctcccacctgctccttcccttccagaggcctgagggtagttcattccccatatcagacttcactaatacttagcagacaacaagtggtgaagataattgatttcttcacaaaagaaacactcttgaagtggggccaaagtaggacagtaaaacctagcacaggtgcgctgttccagcagagaacgtaaagacacatgcagccacagcttccaccctaccatcttccattcatttttttcttcctggtcaaagatataaattacaggtaacatcctctcctacacaattttttttttttttttttttttgagacagggttttgctccattgcccaggctggagtgcagtggtgcagtcacagctcactgcagccttgacctccctgggttcaagccatcctcccaccccagcctcttgagaagctggaactacaggtgctcaccaccatgcctggctaatttttgtatattttgtacagacagggtttcgtcatgttgtccaggctggacgctaactcctgggctttagtgatatgcctgcctcagcccctaaagtgctggggttacaggcgtgagccaccatacccggccaggctcactctcgtttattcgtacatacaaggtagcccggaggcatctacttcttcctgacctaagtacgtgacacatagaaaaatcagcacctcctttcttctgcctagttgacagttcatgtaatttggatttgggggaagaacaaggactcatatagatgaaaaagggtccaactaagaacctgcacatcaggggccccaggtggaactttgtgagcctggtttgagtattgtaggtcaaaatgccaaaagcccagcaagagaagagcccagacaggattcatggaaagaagaatacaatttcctcctcaagctttcttgaaattgttgtttgttatggcatgtggggtgttagatggctttctaacataccaggaggaactgaactgtggctccactgaaaagggtattaaaaacacctaacctatacgaactttggggaaaatccactccttcgaacttggcttttatgtattttattctatttttatttttttagagactgagtctcactttattgcccaggctggagtgcaatggtgtgatctcagctcactgcaatctccacctcccagattcaagtgattctcctgccttggccccccgagtagctgggattacaggcacgcaccaccacgctcggctaatttttgtattttcagtagagatggggttctgccatgttggccaggctggtctcgaactcctgacctcgtgatctgcctgccttggcctcccaaagtgctaggatcactgcacctggccagcttataaaatactatagcttgctcccctgaatgtcgaatgacattatgtagtcaatgaaaacattcccaagactgggggacacaagcctgcctctgaatcctctgtgccaggcacagggggtcctgccatcgagggcctgaagctgggaacacaggatggctgttgccatctggaccgcgttccgagccaccatggaagctttatcacaggtatgcccacacattctcccctctcattttagagcaccctgtgagctgggtattattaatatcttctcccttttacaaaagaggaaacagggcctcagaaaacttcattaacttgcccaagagctaagtgagcaaagcgcctactcagggctctggtcctattctattccagagctgcctggcttccagtaagagctcagaaaggtgcagaaggcagacacttcctttttcataaattagaaaacaacaagtgggtgtgaaaaatttcttcaggttaaaattacactactgtcaggcaaaagcaaaaactagtatagattttacctcaggggataataatatatctagaacaaaggatgcaaggagatcttttgtgaattaatctgggtattgagtcatcctcaatacatgaagatcaatacaataaaatttcaacttataattcagtcaaaaggtgcctgacttatacaagcaatctataggaatgtgacattaaatctttgcttctgccacctaagatgcaaaatttgtgaggtgcaatatttttcttctctttaacttcatccacacctgaaatctcctgggatctcaacatctctgaaactgaaaaaagggcagtctgaaaacctactcccctttttaaaaacccaagtacataaacggctcacaaaagagatcatactgctgcaaaagagtttacatctgatgaagaaacactgaaaaactgacttccacttcccacaaggcacaaggtgcctgaggcttgacaggggcattctgaaggtgactgactatctagctt

SEQ ID NO: 96921 - DNA, 12786 bp, Homo sapiens
gtcaatcggtcctccaaagctaagagcatgtaaaattaaatgtaagtcaaaaaaatttaaagaatatggttaggaagaagaacttacctatgcagaatacaaaatgtaatttcttttttcccctataccactatcaacaccaccagataattctcaactaattcttacaagctgaagaccaacttggattttgatgtacaaactgcttttgacgatatttcattttaaacagataaacacttttaaaaaaaaaaatgcaagccgaagacacccttttgagaaactaagaaaacagatgttgaagccatttgtttagatgaagaggaattttcgcttttataggaatacaatgattcatgaagaggaaaaaagtctgtcatcaagtttacttcaatagatactcttgggtttgaggcagctttctaaatatggccattgcttttcttcacatctcatctctcctgaaatatctcaaactaccactaacaaacattacttttattgtctttgttcttttaaattttctgcttagttaatatattgtgcaggggaaaaaccacaactctggtactacagcattacatacttgcttttattgcttaggtagcggtacaaaatacctactgctttgttgatctatcacaaatatgtcagcttgagaatattacaacaggaatacaagaaaccctaacaataacttcttatataacagctctcctcaaccccaaaacagatggaataagagaatagtgaagttttcctaagaagttctaacaaagagaaaaatcacctttcttggtttgtgtttagtggagatgctaagaagaattaaacagggaaggccgggtgtgatggttcacgcctgtaatcccagcactttgggacgccaaggtgggcgaatcacttgaggtcaggaatttgagaccaacctggccaacatggtgaaacaccatctctactaaaaaaatacaaaaattagccaggtgtggtggcacacacctatagtcccagctactcgggaggctggggcaggagaatcatttgaacccgggaggtggaggttgcagtgagccaagatcatgccactgcactccagccgcctgggcaatagagagagagagagactcagtctcaaaagaaaaagaaaaagaaacaaaagggcattaggaagggcaacaggtctcttccgaggggatggcggggtccatccacccacaatcaagaggctctcttcggacgggcacggtggctcacacctgtaatcccagcaatttgggagactggcgcgggcggatcacctgaggtcaggagttcaacaccagcctggccaacatggtgaaaccccatctctactaaaaatacaaaaattaaccgggcatggtggtaggcacctgtaattccagctacttgggaagctgaggcaggagatttgcttgaaccatggaggcagaggttgcagtgagcagagatggtgccactgcactctagcctgggcaacagagcgagattctgtctcaaaaaagcaaaacaaaaaaaagagactctcttcatataacaaccctcctatgactagcaccagagttcacacaattctcctgtgatttcactataattgcccacatttttgtgaacaatctctttatcaaatcctattaataccaatgtcatctctttcctgccaggatcttgactgatagaccaaataaattttaaaacaaacaaacaaaaaaagcagttttgaaatgtcttcttgaaacctcatcctcctgaaagtagactcacacaaagcaacaccttttgaaaatctaggcctttttttttttttttttttttttttttttgagagggagtctatctcttctcattcaggctggagtgcaatggcgcgatcttggctcaatgcaacctccacctcctgggttcaagccattctcctgcctcagcctcccaagtagctgggattataggcacctgccaccacacccggctaatttttgtatttttcgtagagatggggtttcaccatattggccaggctggtcttgaactcctgatctcaggtgatccacccacctcggcctcccaaagtgctgggattacagaaaatctaggcttttaagacttgtaaataagaagatatgctgtgaattttctttaaagagcaagcctttgatatctctctttgaccatgacatattaataacgctcaaagttgaatttccgtcagcccaactttatcccaaagagaatgaaaaatagtagaagactacctccaccttatgatcttgacaattttggaaattactatattattaatatatgttaatttacatagttatatttccatacactgcacattaacactgaggaccaggaccgtgtcttacgtttgttttcctcacactaaatcatgccttgcaatagttcctttaacagaggatatatctgaaaaataatttcttgacagttggaaatagtatcaacagtaaaagaacataagcaggaaagctagccccaagagatatgcttggttactctggtattttcttatttggcatgccttattaaatgattctgccaccagaagaaaaataaaagcctcactgttaggtgaatataaaattttaggaaaacagctgtataaccatcaagattattttccacaagtagctaacatgaaacagaatttacaacagaggcaggaagaagagtaggtgtagttagaatagaaggaaatgaggaggctcaacaagaattaattactggtaattacacatgctacagcctctcttttctccaccctctagctaatcaacagtgggaacagatgtggtctgtggtattggggaggggggtgcttaacagctgtttggagaacatgccattaaaaagcagccttgtccacagaaacccaagagttttagtgtttgaaaaaaaagaggtaatgaataatgaccacagtcttactctgaacttcagctcattcaggccaacaataaaaaaaagtctttctcctgatttctaataaactatggcagtagctttgatattttctgttataagagtacctcaatatttcaatatttgaatctatttcacatatctcacccaagtagtcccaaaaccagtagaaaaattcaacttttttgagtaaacattcaataaatcttaactataatgattatcacaagaaacactctaaaactcccactatagagaataccaaattaggatgaaataatcctaaatttgctaaatcatctttttggacattttttcatggataagaactctatgcaacacggaacttggaacatcccagcttacttcttataaaatctgaagcatgtggcacaaggtcaatgtatataatcattcctaaaaaataaaaacacaaaccaattccagggataaattttaaaaaacaatacaataggccgggcgtggtggctcacgcctgtaatcccagcactttgggaggccgaggcaggtggatcatgaggttaggagttcaagaccatcctggccaacatgatgaaactccatctctactaaaaatacaaaaattagctgggtgtggtggcctacacctgtaatcccagctactcgggaggctgaggcaggagaatcgcttgaaccgggaggtggaggttgcagtgagccaagatcgtgccattgcactccagcctggacgacagggcaagactccatctccaaacaaacaacaacaacaaaaacaatcaaggctttaacagtttagcgtactcacagaacaaaagttccaacctgtttgtgcttcctccaaagtctgatgactaccagttgggcagggtcagtgacatctcctacctcatctaggatacccccaagtttcaaggaatgaggatagatgacacaggtctggcttccggaatttatagttgactgctacttatgatctgaaacccttatgctggagtagcagagaagatttttgtctttggaaccatttaggctccaaaaggctgtataataagtccatttgttcacaaatccaaagcactgctcaataaacgattatgccaccgattgacagtaagcatattgcctgcttttgctgaaatgtgcaactgtgttagaacctctgaaagttcttgagcagcttaacaattgcaagttcttcttaggttaaatgttttatatatatatatatatatatatatatacatatacataaataaatgagtgggggctgtatatacacgtaaaatgagtgcacatattcatatacacttgcaggatatgacactaatttctcatatctaatcttattaaactgaacttgcatattctcaattttacttctgtgtatttttggggcaacttcaaaaatttcattcagtttcagtatatgtaaattgcacaaaactatgattcaatcctgttggggataattagagaaagatgaagctgcagttgagaataggaaaggaaggtaaaagctaatgttggaacagaaataaagatttttagaatgaagccaaactgacgacatctaagtcagcaggagggagcaggatgtgagtggggagctccagggagatggacgtcaacaatttctccatttaaaaatcagaaaggcaacgaacagtgtcaaagaaaattagccatagtggaggaggggaaatgtctcaaagcatgcttatctgcaacaaagccaattttcccttaagggatagtaaatgaaaaagaaaatggatcccttattactaaataaaagagtataaagggtcatttgtattacattgagaagacttaaatgaatgtaaatactgtttgttcttaagaatttccatagacacactctaaactttaaacctcctgcaactatagtttctatgacgtctaaagttctcagagttaatttctacatccaaccacagttttcaggaacctctttctcctgaagagtaaaggactgtacctttcctttgcaattcaccaggataaagctattctttttggtgtactctgcaaacccacctttagattctgagaaataattctaattatctgcaaaagagtacataagaaagtttaaattaacccttcatcctgaattatgttgcttttctgcatcagcaaagacacattaccatgcaaaataatgagctttttttcctgatagagaatgtatttgggagagaaatgggagtttctggcaaaaaaataaaggcttcattacttcagctttaaatgtaaattaggcactcagcggctttcaagttgggacagttttccctacacaagataagatgaattatattttattccttagttcttaacaagagtcacttctttagacatacctaacccttaaacaaaggctgttctttgtcatagctagggaaatgtttttattactgatgttctttaaatacgaataaaaatctcttttccatactcatgcttataacaagctgttacttcagcaaagaagatctaaaatgcatatagaaaaaaggggactacttgctttctctgtgaacattacacatatcacccgacctaacggaaaggccttaaaaaaaaaaatccatgaacacaggccctttccatgttatttgtgtcttcactttctttcatcaatgttttatagtttataatgtataggccttctacctccttggcttaatttactcctaagtattttattcttttttatgctattgccaatgagatttttctcttaatatcttttttcggatagtttattgttagtgcatagaaacaactgatttttgtatgttgattttgtatcctccgaatttacagaattcacttattagttctaacagttctttggtggaatccttagggttagggttttctatatataagatgatgtcatctgcaaacagtttaacttcttcctttctgatttgcatgccttttacttttttctcttgcctaattgctctgcctaggacttccactactatgtagaacagaagtagtaaaagtgggctctttctgctgctccccagctctcggatacagccgacaccatgggtttcagagacctgaaaagccccgccggcctccaggtgctcaacgattacctggcggacaagagctacatcgaggggtatgtgccatcacaagcagatgtggcagtatttgaagccgtgtccagcccactgcctgccgacttgtgtcatgccctacgttggtataatcacatcaagtcttacgaaaaggaaaaggccagcctgccaggagtgaagaaagctttgggcaagtatggtcctgccgatgtggaagacactacaggaagtggagctacagatagtaaagatgatgatgacattgacctctttggatctgatgatgaggaggaaagtgaagaagcaaagaggctaagggaagaacgtcttgcacaatatgaatcaaagaaagcmaaaaaacctgcacttgttgccaagtcttccatcttactagatgtgaaaccttgggatgatgagacagatatggcgaaattagaggagcgcgtcagaagcattcaagcagacggcttagtctggggctcatctaaactagttccagtgggatacggaattaagaaacttcaaatacagtgtgtagttgaagatgataaagtcggaacagatatgctggaggagcagatcactgcttttgaggactacgtgcagtccatggatgtggctgctttcaacaagatctaaaatccatcctggatcatggcatttaaataaaagcttgaaagattaaaaaaaaaaaaaaagaagtagtaaaagtgggcatccttatcttgttcccaatcttagatgaaaagctttctgcttttcactgttgtgtatgatgttagctgtgggcttgtcatacatggcctttattgtgttgaggtactttccttccatatctaatttgttgaggggtttttatcatgaaaggatattgaattttgtcaaatgctttttctgcatctattgagattatcatatgatttttatctttcattctgttaatgtggtgtatcacatttactagtttgcatatgttgaaacattcttatataccagggataaatcccatttgattatgatgtatgattcttgtaatgccctgttaaattcagtttgctagtagtattttattggggatttttgcatctgtgttcatcagggatactggcctacaattttattttcttgtagcatccttatctggctttaatatcaggttaatgctggcctcataaaatgaattatcatctttacaatgagaattaatattgttaaagtatccataatccccaaagcaatctatggattcaatgtcattcctatcaaaattccaatggcatttttcacagaaatagaaaaaacaatcctaaaacttgtatggaaccacaacaaaagaccccaaatagccaaagtaatcttaagaaagaacaaagctggaggcatcacactccctgatttcaaactgtattacaaaactatggtaatcaaaacaatatggtactggcataaaaacagatacaaagaccaatggaacagaatagagaacccagaaataaacccttgcatacatggtcaaccgatctttgacaagagggtcaagaactcacaacagggaaagaaaagtctcctcaataaatggtactgggaaaactagatatccacatacgaaagaataaaattaaatccttgtctcatactatatacaaaaattaactcaaaatggatctaaaacttaaatgtaagactggaaaccataaactcctagaagaaaatatagggaaaaaaagctccctgacattggtcttggcaataatttttttagatatgacaccaaaagcacaggcaacaacagcaaaaataaataagtaagactgcaacaaactaaaaagaaagcaattaacaaaacaaaaagacaacctacaaaatgagagaaaatatttgcaaaccatattatctgataaggggttaatatctgaaacatataagaaactcacacaactcaatagcacaaaaacaaacaaccagattaaaaaatggcctgtaatcccagccactcaggaggctaatgtgggaggatcacttgaggccaggagttcaagaccagcctgggcaacacagcaagaccctgcttttaaaaaagaaattagggcggctatggtgagtggatcacttgagctctggagttcaagaccagcctgagcaacatggcaaaaccccatctttaaaaaaaattagaggggcatggtggtgcacgcctatgcctgtagtcccagctactggggtggctgaggtgggaggatctcctgagcctgggaggttgagactgcagtgagccctgactgtgccactatactccagcctgggccagaggtgaggccgtctcaaaaaaaaaaaaaaaaaaaaaaaaaaattagccaagcctgatgatgatgatgcacacccacagtcctagctacttgggaagctgaagtgggaggatcacttgagtccaggagtttgaggctgcagtgagctatgattgtgccactggactccagcctaggaaacagaatgagaccctgtccctaaaaataaaataaaataaaaataaaaaataaaaataaatgggcaaaggacctgaatagatatttttccaaagaagacacagaaacggccaataggtatatgaaaaggtactcaacatcactaatcatcagcgacacgcaaatcacaaccacaatgacatatcacctcacatctgttaggctagctatatacaacaaatgttaacaaggatgtgaagaaaaagaacccttgtacactattggtggcaatgtaaactgggatagccattatggaaaacagtatggaggttccccaaaaaattacatccaaaggaaatgaaatcagttatcttgaagaggtttttctgtacgcccatgttcactgcagcattattcacaatggccaagatatggaaacaacctaagtgtccgctgagggataaacggttgaacaaaatgtgggatgtatacacacatacaaaatggaatatattatttggccataaaaaaggaaatcctgccatttgcaacaacatggatgaacctggaggacattatgctaagtgaaataaaccagccacagaaaaacaaatgctgtatgatgtaacttatatgtggaatctaaaaacattgaactcaaagaagcagagagtagaagagtggttatcagggtctggggagtggaagaaatgagaagacgttggccaaaggggatgaactttcagttataagatgaacaagttctgggtatgtatggtacagcatgcatagtgatggacgtgttaatttggttgtggtaatcattgcacaatgtatatgcatatcaaatcatcacattgtacacctttcatatataatctttgtcaattaaatatattttttaaaaaaacagttgccctttaacattgtttaactttgcaagaaagtaatgacttttaaaagtgaaaaagggattaaacatacattcaatcatacagaatcacactaatgtaacaactgccagtatttgtggtactttgctcttgttttttgtaaaaggcaatcactttttcgaaattcacacaattttcttcacctatctagaatttagtatgtatccagatatacctctgtcctacaaagctccaattctgtccttcaccatggaatagtactggtcacccccaataaatatgcctctccattatattcagccactcatgagaccattcttacacaggcaaggatcaaaggggtttctctggatgttttgtcccagttaaactgaatatattataggatactacatccttaaaacctcaagttccctgaatcactcatggcaaaaatacagtctttggatgttagtctggatttttcctttcattctgtacaatgtgaatatataagcagaaagagaaaaagcaaatttattatcgtactgaattaatttgtaacacttaagaacctaacaagtgataacacatttttaatatcagctatacatttgagagattctccaactgccaagtgccttttcaagctaaatcccctaactaatattttatctgagagtatgactgacctgaatttttgcatcatgaaatcttaattatgtgaatcatcttaagattactgtcagtcggtcgcttctccttatatgatggctacgtgttttctgtttagtgcagaacagtgtacctgcacctatcttttctgttgcacttcagcaaatatccactgaagggtaaagaagctgggacgtttttattattacattagtgtctacttcaattcccattgctgcttacctgtgagacctataacttaggaggcgctaagaaaataaaaggtttatataatgttttatttttatttatttttttgagacagagttttgttctgttgcccaggctagagtgtggtggtgcaatcttggctcactgcagcctctgcctcctggattcaagtgattcttctgcctcagcctcctgagtggctgggactacaggtgcacgccaccacacctggctcattttttgtattttagtagagacgaagtttcaccatgttggccaggctggtcttgaacttctgacctcaggtgatcggcccgcctcagcctccaagttttatgtatatttttaaaaagtatatgtaaaatagtattttacatcatctaggcaggtttagtagatttatttagaaatataaatcttggccaggcacagtggctcacgcctgtaatcccaacactttgggaggctaaggtgggcgaatcacgaggttaggagttcgagaccagagtggccaacatggtgaaatcccgtttctactaaaaatacaaaaattagccgggcatggtggcttgcacctgtaatcccagctactcaggaagctgaggcaggagaatcacttgaaccctggaggcggaggctgcagtgagctgagactgtgccagcttaggtgacacagtgagactccatctcaaaaaaaaaaaaaaaaaaaaagaaatataaatcttgcagataaaatgataaatggtagaactgtttgactatcttcccccccaaaactaagcaggaattagatttctagaacaacgctttccaatagtacttcctgcaatgatggaaatgttctatatctgtactcactgtagtcactagccacataatggctattgagcacttgaaatgtggctagtgtgacttagaaactgaatttttatttaactttaaataatttatttaaatagccacctgtggctagtggctaccatactggacggtgcaaaatcagaacactgatatctgcacaagtaatgtaaggaaaactgttattaattgggatatattttaagaatggtgtggagactaaaaaatggttgagaatggcctggtatttttattagcttaaaaaaaataaatcaagaaaagactttaaacttggtgttaagaatccttagaagcatagcctaaaatttcacgaaataattaaatttgtccataaaagaaggtattttggcagtctgaatggggaaaatagattttcctatttctcaggccaaaaatttatagtacaaaagagtgtaggtaaggttatggttgactagaaagcagaaatggttaccagcatacctacacattatatattgcacttgtgaaatttagataattcaggtgacagggctctgtgaaaaaactacaaagcactacacacatatatcactatgtgctttcactattgctattgttgttatggttgttgcctccaaggaacctgcaaacaggtacctgccaaggctttgctggctgaccataggttttggtggatatatggacagtgataccactttatttgtactgaaaatatgacaaccatggctatcactgggtcttaacttcgtttactttttttaacagcaaactgagtagtactttaacctggattgtgggccactggtgtacagacaataactgaaggaacaatataagaatctagtatgtgaaaatggctcacaattccaatgtttgggtctctattagacctcaaggcatgtgattcatccctaaaggcatgttccctggatcttttaaagagaattccagtatatcccctcattaaacaacaacaacaaaaatcaaacatgtatgcttgggttccaggactttctaggtttaagtttagctatttattacatttactacattttcaaataaattcattttaccttattaagacagattagcctctcctgtggaaacatggtagaagtggggactgatttaataagggtttggcatcagtaaatcatataaaaaaacagaagtcaaatcttccattaccacttgaacagaataaaacggtattattggcagtacatggggaccactataagggactcaaacacttcccccacaccatggatgtaagggggaaaaaaatgataccctctgagggtaaaaacgcacttgcacaatggctaaggtagcactctgttgaaatcaaacaagagactctctacaggtgtgtacctaagctcagaatttggaagcctctacatgtttccaaaggtgatctaagtttaatcttaggaagcaggcctggaatgtgcttgtcatttagtgaactgtattgcagcttggtttgaaaaagatggtgtgaacaaaggaaaatggtcagcataaaaataagtctgaagacccagacactggcaagctttactgctcagcact

SEQ ID NO: 96922 - DNA, 18921 bp, Homo sapiens
aaaagtacaaaattagccaggtgtggtggcgcacacctgcaatcccagctactcgggagactgaggcatgagaatcgcttgaacccagggggcagaggttgcagtgagctgagatcatgccactgcactccagcctgggcaacagagcgagactctgtctcaaaaaaaaaaaaaaaaaaaagatctcgtattcattctgcaggcactggcgtgcccaccgtaggagtcagggtggaggagacagacccgatgcagggtctcagggcgctcacagtcaatgtcaacagtgtggcccatgttctgaggggcacccttcctcggggtatgacacaacacttcccataggaggaggaggaagtctgttggatgttgtgtttggtttctggggctgctgtgatcaagtgccgcaacccggtggcttacagcaacccagctgtattctctcacagttcttgaggctggaagtctaaaatcaagctgtcagcagggcccgtgctccctctgaaggcttcaagggaggatctttgccccgctcctagtttccggtgttgccagcaatcctcagtgcttcttggcctatagatgcatcactgcaatctctgcctccgtggtcatgtggcatttttcccgtgtgtctgtctttccccctccaaagttcaccagtcatacaggattaaaggcccaccctactcccatatgggcctttaatcctcatactccagtttgacctcatcttaacttgattccacctgaaaagactatttccaagtatggccacattcagaggcaccaggagttaggatttgaacgtaactttttttttgtttttgagacggagtctcactctgtcgcccaggctggagtgcagtggcatgatcttggctcactgcaagctccacctcccgggttcacgccattctcctgcctcagcctcctgagtagctgggactacaggtgcccaccaccacgcctggctaattttttgtatttttagtagagacggggtttcactgttagccaggatggtctcgatctcctgacctcgtgatccgcccacctcggcctcccaaaatgctgggattacaggagtaagccaccatgcccggctgtgaacatgtcttttgcgggggcacacaattcaactcccaatgtgtacagtagttaggtgacatttgggaagactgttccaggtagagaaaacagcaggtgaaaaggcccaaaggcaggagggcactggtgagttctaggaagtaaaagaaattcagcacagctggagtggagagtggcaaggaggtgcagctgaggcgactcatgctggaccttataggccaggtgggagggtgagagtaggccaggctacagtttgagagaaaaaaaaaatcccaaatctcagtgccaggcccagtacaggttcattttcagcttgtgtcaaatctgatgtgggccgaacagctcttctccatgaggtagctcagccgtgtagaacacatggtcgcggggtgaagggaagtctggacaaggcccccagtctccatggccccagcctgaaaggaactcttccactcacagaccacacagcaggggaggctggcaaggtgggggcacagatttctgggagccccaactgtctgtcccactcgtattcacccaaagtcaaggctaagacttcatcctgacagcactgggaagtcagccagggttttcacacagaggtagtgacaagatgggacttgcattttcagtttttccttttttcactgtagctctcagatcttatgacttgtgttttagaaagattcatctggctagaggactcctctgaagcaggggagctggagtttggtggagcggggaaagtggctgcagcgggagttggccacagcagaggcacgatatatttgtagttaactcatgcaacttccaccttgcaggctcagccaaaaaaccgaaaaaaagaatgtgagaaaaatcaattcatgtaattaaaaaacaatccaaaagcattttgtgtatgtcctttcctagattggagattgtccacattttatgcatatattctgaatagcccaaacccagggagtgtatactctatgggccttttaagagattttcaggggtaactgagctcctggctgacttgagaacctcactgtcatggaattgccctctactcagggtctgtaactgaacctaataacaaaagtagggaggcttgtgtcaaaaggacttcctgctgtttcccaaacagtgtggtgccttgcctctggcagaaacacccttggatacaatatgaaggctttatttatttatttatgtaatttcatttttttgagacagagtctggctctgtcccccaggctggagtgcagtggcacgatctcggctcactgcaagctctgcctcccgggttcacaccattctcctgcctcagcctcccgagtagctgggactacaggcgcccccccaccacgcccggctaatttttgtatttttagtaaagacagggtttcaccgtgttagccaggatggtctcgatccgcctgcctcggcctcccaaagtgctgggattacaggcgtgagccaccgcacccggcccggcattttttattttttgctgagactgacccctacctgcctgcagttctttctagtttatgaagtgttttctaagccattaccttatttgagcttcaggattctttatttatttatttatttattttgagacagagtctcgctgtgtcacttagcctggagtgtagtggtgcgatctcggctcgatgcaacctccatctcccaggttcgagtgattcttgtgcctcagcctcccgagcaggggggactacaggcctgggccaccatgcccagacttttttttgtatttttagtagagatgggggttccactatgttgctcaggctggtctcaaactcctggcctcatgggattctcctgccttggcttaccaaagtggtgggattacgggcgtgagccaccacgcccagctgagcctcagaataaattagatctttgataggagatctaatttacatcaaggaactcagaagctcagacacaccttgtcccacagtagccaggagccctggaaacaatccccaatgtggagttggacgtgttggtttcatggccacagttttagctgtggtttcagtattcttgtgtataaaatatgggtaactgcacaaagctattttgaagctccagtaaagcaaggttggtgaaagcattttgcaaactgctaagcgctgtccaaatgttgtatcctcagactttacacgtcactgaaagtgtttctgagtcgtgctaaagaaatccacgtggaagattaagggaatttatgcctgcagtaatgtctttgggctgcacctacactatttgactttgaacttaatttcctgaattaccttcactgcttggggagctgtgcccatcatctcctgcaggccacagccctggccctcatttctgtgggttggcaagggctggggtggaggtggggtgagcagtttgttagagaccgccctgaaagccttgctgccagatctcagtgacatgagtaaggtcgtgtggaaatatgtgacttcctgttatggaattagcctgggacagtgaagagtggccttggggtgaaccagagggcacttgcccacctgggtatgggtatcccagctgcacttgattgttactttgggggaaggcagtacagtgtgagctaaatcttcggactttcctagagaagcctgaaatccacgtatcttcatttttcattctcagggcaactccagtgcctgggtggagttagtgcctgagttggttgtgtagctttgggccgctgctcttgacttcagttttctcatttaaaattggtgatccacctgagatcaggagttcaagaccagcctggtcaacatggtaaaaccccatctctactaaaaatacaaaaattagcccggcatggtggaacacacctgcaatcccagctactcaggaggctgaggcaggagaatcgctagaacccgggaggtggaggttgctgtgagctgagatggctccactgtactccagcctgggcgacagagcgagacccccgtctcaaagaaaaaaaaacctggtgatctagctgggcaacatagggagaccctgtgtttacaaaaaattcgcttggcgtggtggccacgtttctggttccagctacttgggaggctgaggcaggaggctcatttgagcccgggaggttgaagctgcagtaagccgtgatcgtgccactggactccagcctgggttacagaacaaaaccttgtgtcaaaaaataaaataaataaaattggtgaccataccaccttactttggttgttaagatacagaagagaaaatggaatgcccagcccaccacactggtcctggctgcaggaatccactggaaacgctagttccttgtgttctgggttgctatttggtaacctgcaggctccagaggttgtaatcctgcttgccttggggcccaccacccatatgattaaaaggaataacgggattaccgaggcctttaaaattttgtggtcaaggagataatataaaggagttttgtgtattaggaagagaacaacgcccccaccctgtcctttacctcgtgagttcacgagtggtgtatttgttttgttttgtttttgagacgatgtctcgctctgtcgcccaggctggagtgcagtggcgagatctcggctcactgcaagctccgcctcccgggttcacgccattctcctgcctcagcctcccggtaactgggactacaggcgcccaccaccacgcccggctaatttttttgtatttttagtagagacggggtttcaccatgttcgccaggatggtctcgatctcctgacctcgtgatccgcccgcctggacctcccaaagtgctgggagtacaggcgggagtcaccgcgcccggcctccgtatttgtttaaaaaaaaaaaaaaaaaaaaaggccgggcgcgtgttgcacgcctgtaatcccagtactttgggaggccaggcgggcggatcacgaggtcaggagatcgagaccatcctggccaacatggtgaaaccccgtctctactaaaaaaacaaaaaaattagccgggcgtggtggcgcatgcctgtaatcccagctactcgggaggctgagacaggagaatcgcttgaacccgggaggcggaggttgcggtgagccgagatcgcgccattgcactccagtctgggcgacaagagcaagactccatcaaaaaaaaaaaaataataaaaaggaagaaaaagaaagacaaatgatttacaggaaaaaatttaagtaaacaaaagtacaaatgcgatgtcaatcgttcaggtggtgccaggggacagagaaccggggaacaccaaggtctcatcgtccctgcagagcatctctgggggaggcgacggacagggcgcgagcgcggggcttggagggcaccaaggtccagggggatggcgggttcagtcccaatccctccgacccgtgctgagggccttggaggaccccactcgcccaacctcggaagcccgggttctgccacttccagccacgcgtccttgggctgcgaaactttctccagcccagtttcctcttttgggacatggggaggcggaggctgccaatgctgggatggagtcctcgagagcaagagaccagcggcctcgacgagcttacaatccgattaggccctcccaccgatgtgctgtagctgcccgccgccctggacccggcgccgtcccgcccggcttcgggagccctccgtagcggccggactcgcgcgcgttctaaaatgaggacaaagcccgcccaggtctagagcgcgcgcgccgtggcggccaatgggacgctgaagctaggttgagtgacggacttgagcagccaatgagtgtgcagtttgttgcgatgtggcacccggctccggcattataaagggcgccacgagtcggcattgtcaggcggcggcaccgcgcgggacggagcttggctgttggtcggtgggttcccgtgcggcggcggccaaggaggaggagacacagttggagcagctccgtgggctgactggggcgaggcctcagcagcgcgagcttgagtgcggccgagcctgcggcgccttcccctgcgggtggggacgagcgggccccgcggcgtcatcggcggcgaggtgagcggcggccggcgggcgggagctctggcgggagccgcgccggcctgacgcgctgtcgccgctggttgcaggagccgccgcgcctcggcctagcatgtcggaagcgggcgaggagcagcccatggagacgacgggcgccaccgagaacggacatgaggccgtccccgaaggcgagtcgccggccggggctggcacgggcgccgcggcgggggctggaggcgcgaccgcggcgcccccgagcgggaatcagaacggcgccgagggcgaccagatcaacgccagcaagaacgaggaggacgcggggtaggtgcggccgcgggcggacgggggcgccgcctttgttccggggccgccttttgttggcgccacgcggcggggggaggggcggcggcctggcccgggtcggggctggtgcggcccgcggactgtcgccgctgcgttcgcgggccgggcctggcgctgccactcgcgctggagtttgcgggagtttgttgggtcgactttggcgccgccccggggccgctcgcgcgctgccagggccagggccagggccggagccggcgcaggggcgggcggatggcccggaagagggaaagcgctcggacccggggcccggcggcgtcttgggccgcgccgggggctgcgtgggcggagttggcgcgagccggggcccggacctccctcctccgcctctcccgggggcggagtcacggtctgaaccctgggcgggcttggtccccggaaacatcgagttccttgaaacgagttctcaggagttggtgragacgctggccctttgctacatggttgtagaacacatgaatttccagttatgagtggttaggtcccatacccctggtgaggtggtcccttctttgcttctcacaggctggggctgcagagccttgttaagcctcgttagggtcctggttgagttcaatttggagggtagtggagatttaacatctttctaaggtgctccttgcagactctaagggtagctgtagacttcgtgagaactttgcyagggccagtcctttccaaaatcacagcttgcttacaagacttgttgccgtgtgtctcaccctaccatttcagaaaaatgttcgttggtggcctgagctgggatactagcaaaaaagatttaaaagactattttactaaatttggagaggtcgttgactgtacaataaaaatggatcccaacactggacggtcaagagggtttgggtttatcctgttcaaagatgcagccagtgtggagaaggtaagctgggtactggatttcagcagtctcagtggaaacgatttgaattctaagaggacacctttcttaaagcatgactagtttgtgtggtctgcatgtgatttragtgctttgggcaaaacccaaagccggaggttatgttccggtttttgaggggatgaaaatacagattaagctgggagtgagagaatgtgctggagtggttcgggaagatgacagttgacattcattaccttttatgtgcctattctgggtacggcgctaaacatctgggaggattacaagagagtccatgattggtatgataggcttttagccccattttacaggacaaaaaccaaaaccctaaggctcagaaatgtaagtagaagaggtcacagctagtagggagtggagggaggattccttcccctgtggcccatcttcagcctatgctccgagtccctgctgcttcgcttctggagatgggcctcacgctgggactgcttgggcaggaagagcatgatcaaaggcttaagtgtgaggactgttttctaggtgtygaggtaaaccagctgtacttgaggtttgatgaaaattgggttgggaggttaagctggggtagaatttggagggggtgaaacacatgtttgtatctgtactggtgtctttatggcttagagagaagggccttgtctggctcgtgctgctgagtcagcctgacccctttctgttggaacaggtcctagaccagaaggagcacaggctggatggccgtgtcattgaccctaaaaaggccatggctatgaagaaggacccggtsaagaaaatcttcgttgggggtctgaatcctgaagccactgaggaaaagatcagggagtactttggcgagtttggggaggtgagtgtggctctgggaatagcccatcagctgcccctaaggctgccttctttctggtccttggtatccttggctggctagaccctcccaggcagggcttatttttcaccctctgtcttcaatggggtcttttctcctgtgagtcccctatatgctctggggtagggaggtattgggcctgagtttgcctatgctttttgcagattgaggccattgaattgccaatggatccaaagttgaacaaaagacgaggttttgtgtttatcacctttaaagaagaagaacccgtgaagaaggttctggagaaaaagttccatactgtcagtggaagcaaggtaaggtgttcccagctctgcttggcctcctgtgctgctggagagctggcccttagagggatgggttaggggttgggcctcatgcaggagctctccaggttggtcagactttactatttctctgaagcgtatgctgccctgattggggcagtgttccaatccttgaaagacttcccaggctgggaggactgccaataaacaacacaggatgtgagggaggtaggagaaggtggcctctgtgaatagagcaggttgagtagcctctttagctcctcacttaaagctagaggtgacagttctagattcttgagtccaggggtatgaagcctgcagtttaaggtctcagaagatcctagaacttctgcaactcactgattctcctctgtggtgaagtttttcttattccagagcctttctacctccttctacaaccaagtctttgtccacttccatccactttgagcacttttttttttttttttttttttgctttgagacagagtcttgctttgttgtccaggctggggtgcggtaacacaatcatggctcactgcaaccttgacctcatgggcggaccggatcctcccatctcagcctctcgagtagctgggaccacaggcatgtaccaccatgcctggctcatatgtttttttaaagcctggtctcaccatgttgcctgggctcaagccatcctctgccttggccttgtaaagtgttgggattacaggcatgaactgcctcacttggtcttctgggcacctctttaagttaaccctaaacccaggcaaaaatccttccaaagatctcccagggtcctggccagcttaaatccagggtcagttgtgctttcaaatgmgtggattcatgtgcagggaggtgtagctcttcccctcctgaactctggtcagggaaagggtagttcaggcttcaagttggcagttgggagttgaggktgcggcctgcagtggcagggtgtggcaggttctgtttctgagcaggagttggcagccagataaggtgggacaggtggaactcctggaagtctctatcctggctgggagtttggaaagagtggattaggatagtcttaaattttctataaaatgacagtctttgaggcagttaggggaagcagtggttattactccagtggacagtgatagaggcctttttctctatgtgccataatgggaaatgggtgggaagagcctctaaggcagagtttaagtgaaactactggtagtgagtcttaggagtaagtatatttagttggttatattcagtatttttaatttagtaggatagaatatatcagattgcattattttaatttgccaattaaaagtatgactgggacactgtaaaatgtactatttttaatgggtgtgcatgtcaggattttctttagaaatacactggtctggtctaatttatttaagcaggagcactttaaagtatcccaccctaccccattccacccccagkggacagaaaggaaattgactgacttgaggggatgcagacatctgggttattccaacagaccagtggttaggaggagggggtgggtagcattatggcctcgggcaggcccccccaccctgagcctctgaaagctgactttatctgtaagagggaggtcaggctcgccttctcaatagcgtgtatttggatgagatgagtttcttctgtaaagagaaaaagatgttaaaacctcattgtctaaggcccctcatctgagaagtcttgtctgaccctctagcccagcaggaccaaggtgtggtgcctggtcccagcctgtcctctgctcccctgggctgcagttggcccagttgcctgcctccattagatacggagttgctctggggctgagatgcccatctcaagtgcattctgtcggaagggttctctgctggaaggcctttggttttagttgggattccatgagctttagcccaaaggtggcctccyatactagcatattttgtttctcagcaaatggacctgatccaccatttgatgtttgtcgcagtgaaggtgtttgggcagtcactgccctgagtttgtcctactggcctgaccactgtcctcttgacttttagtgtgagatcaaggtggcccagcccaaagaagtctatcagcagcagcagtatggctctgggggccgtggaaaccgcaaccgagggaaccgaggcagcggaggtggtggtggaggtggaggtgagtggaacgtggatgaagataggtcctgtttccctgcctacatggagccttccaagcctgtcttggggctccctctggtgctgtgcagcaggggtgggcagattgtgtgaggttggggaygaacaggaataggaacggctctgggtcagggctgtatgcttgaggctgttgcctgctgctgccccttggaatggcttgggtgcccagggcagagagagcatttgtgttacactctgggggaggggatgtgatgggtgtcttggctttgtggatgtcctgagtctggtacacctgtgagcaggtaggcagaagggtgggtagggcagagctgtgccaggcatttatccccttccatcccaggcccctctgactccaaagcctgaactgcatctttttaaaggctaagctgccaaggagagtgggagtgatcagagagtgactgagtgagtgagctgccttgtttgccccaagtaaagttagcatcctggtctctgatcctctgcttgggtctctcagatgcagggttgggcccagggcccttatacaccagaacagcagccccttggcttctgcctgagttgccacagtaaccctgccaccccaaagggcaggatttcctccatcctagctcctgcgtatgctaaatggtccacgggcccctgtgccctgctccccccacaggtcagagtcagagttggaatcagggctacggcaactactggaaccagggctacggctaccagcagggctacgggcctggctatggcggctacgactactcgccctatggctattacggctacggccccggctacgactacagtaagtaggagagagggaggccccatccgctcacccctcgtccccaggggaggcaggacagtgtaggagccactggcagcaggggctttggagtcagacaggcctggctcagccatgggagctacttgattttgagccttagacttcggggtcttartaacatgaggaaggcartctctgctgtcacggctggtgagggtcctgggaagatgcatatcaagcgcgtggcacagggcaaatgcttgtaaatagtagctgctatggttgttctcgtccctaggtcagggtagtacaaactacggcaagagccagcgacgtggtggccatcagaataactacaagccatactgaggcggcagcaggagcgaccaactgatcgcacacatgctttgtttggatatggagtgaacacaattatgtaccaaatttaacttggcaaactttctattgcctgtcccatgtgcatcttatttaaaatttcccccatggaaatcactctcctgttgactatttccagagctctaggtgtttaggcagcgtgtggtgtctgagaggccatagcgccatcatgggctgatttttattaccaggtcccccagaagcaggtgrgaggctctgcttcctgctgccgctctkcagcctggacctgtggaccctggttgtaaagagtaaattgtatcttaggaaaccagtgtcacctttttttcaccttttaattttatattatttgcgtcatacatttcctgtaacggaagtgttaattttactgtactttttggtaccttttgggaatctaatgtattgtaaggtattttacacgtgtcctgattttgccmcaacctggatattsaagctatccaagcttttgaaataaaatttaaaaacccccaagcctgggtgagtgtgggatatgctgtgwgagacctcttgctcagggtcgagggaggcggggggggggtgccaggtgccctggacttggggctttytcctgcagcaggctcttccagctgcaggcccagttgtgggrgtatcctttaaggactgccctgcctagggctgagccccccttcaaagaaaggaatgagaggcctatggggagtgaggatggggcagtgatgagggcttacatccccagcaggcatgtcccctcctgggacaccttggaacaccaaccttcttggctgatgaatgaaaaaatgggattctttacacactagggcagtgccagggccgtctgaattggggcacaatagtgctcctcctggctggtgaagaaaagcctgctctggcaggggatgtttattggctggattggagcccaactccaggtctggtatttagggcataagactaggtggttacaagaggcaagggtgggttggggttccacgtggatacagccccataggtttcaagggaggatatagctgttcctgccatcaagtgcaagctaagcattggagaatttccagtgttgaagaaactaacctttgggaaggagcatcagtcagaacaaaaaaaagtcttaaaaaaaggctcagcttgccgaggctgcttgctgctgatggtaaggaacccgctgtgcatcttcaagagtaagaagcaaggcccactcacctggagtacacttaggcagagcagggctggcttagggctggagcctcagcgtttcacaacttctcaccttctcttccatgtctgaaaaagaccacaaagcaatgccgactcagtcacctttctctgctgaagatgccctgttgacttcagtgtccaaactggaggacagtttagagattgggccctctggctatccacacccatgtcccattccccaaaggggtggcagcagtttcctgaaaaacaaagccagccctcagttctcctgagatttgtaggctctgtccaggatccctaagcctgttctgtggccagcctttgctctccacaaacacactcctattcatcatatccctaccacttccaatttgtgtctagcagggatgggcctcccccagctccagagccctgggattaagcatacctgtgggtagcagtgatcacccagaggtaggagggcacaggttgcttggctggcagttgtgatctctactgtgagatgcaactgtgcctatttagggtctcactgagctgtaaatggcaacacagccatgagatttccttgtaagtggatttagggggaaccctgggttgaccacgaccatcctaggtgatggggaatgtggggtagagttttcattttgagttccgtcagtcctcagtggtaccaatctttcagccacccagcagccttgtgtgacctgtctcatgtacagaatgaaactcctgccatctctacatcctaggctggcggtaatggggtctcaactcccactgtagttcttatggcctgtttctcaggcccagtactgctttgtcctgcatacatctgatgcctgctcaggcaggctgggtggtggctcaccttccacctcctgacagcccaggaagctctcttaggtacaggcaggaataggagcagattgggccatgaaagaccctctcttgctccctgccctgtccagaggacatgtgcctctgctcttggactcttgtcccctccctgttccatgctaggaggctctagttgctggcttcaggctgagttctagagatatggccaagctcaggcttcaagctcaccagtcagaatggcatccagctttgccaccacctgccgtgcattgtccaggctgaagcacattgggggcttaaacttcaggatgttcctcccagggccatcagtgctcagcaaaacgtagttctccttcagcctgtgaggacaggacaccccttcacatggccttcaaggccttcctcagcctggccttggcctcatgtccagtgctccagccacactgtcctcagagccttccatgggccagttcctgccaggtcattttactggtcacctctcccagagtcctgtgcatctggcccacagcagcctgcttggagtgcactgcacctggccctgagcctgctgccccacagaacaggcaccttgcctcacctaaccctggagccacagtccaagccaagaatgaatggccacagggaaacgccagactgcaagagtcacctgcattctctggttttctgtgtggtttacgtgatgtatattgtttccttatatagagaatgtccaacattgcagttggtgtaatgagctccacgtgcccctcaccagcttcaggcatcttcctgccctgtcttccgggttatcttacaattccagtttaaaatgtccaattattcttaggaagatggctttatcttaacatcatttgtagctaataatcacttttagtccacagtctaacctcatctctgagatgaggggtctgcatgattgtgtttatattctttgatcattgttccccttcttttgtaaaccttgttatttttatttcttgggggtggggagtgtgccttctggtttcattttcctgtcccagtcttcctggcactgaccatggccacgccagaaagaacagggcttggactttggagttagacggccctggggccagatctagctcttgccacctagcagggtaactgcaggtgacttacccatttcctcactgaactggaaaagcacccccagggtattgtgagacacgggctgaacttgggatctgtttccttccatgccacctgaccattccgaatccctgaggctcctgggaggggggtaggagtaagctggggatgtgactgacagcagagagaaggcgggaccaggaaaggccaagttcaaatacagcacagagatttacatcaataccacgcgtgtctcacaatttgaataaggacacgtcaaataccagaagagctttccatggtgggcgtgggggaaggggtaggcctggggaatggagataaaagggaataacaattcaactagaaggagaagaagtcctgaggacttggggtccaagtgaaaggacaagcaaaccagggcattgggaccggtggagtctgagttctgagacacccccgacccagcttaggagcaggagtcttgtccatcccaaccacctgtcgtgcggcatgggaaccctgagtctagtgctgccacagctccctggtatgaatagagaaggtgtttcccttctccaggccaaggtggcattaggggttcctgggtctgagtgccctgctagcttgggcattctaggcagaggtgctgctctggtctgggaatagcctgtgtctcatctgcagcctttgtagtcaggcactgggtacagaactgctaacaccacttatctctgtcctcagctgataggatcagctgtcccccaacaactgcccccacccgccagccccagccctctttcaatcaagtctgtggcccagagtgctgggggtacagatgaggctcctttccactggccctgcaaagaggtacctgtggtgtctcctactccaggaagcaacttgtttcaagaagaaaataccttgataccaagtaggcagcctcttcagttgctggtgtccttgtggcctcatctttgatcagatccacaccaatgaagagcccaacacccctgcaagggaaggtgacgacatctcaggaggccaggcctgaggggccagggtgctggcctcagcctctgggctcctacctgtgcctcctgagggggctgagtgcaggaggcaccttcagaaggtggtgagaatagtttcagggaataactgggctgggagagatctttggtgtggacagaggagagaggctcaggggtagctagggatcaggtcatgtcctagctttctcctccccaggagagccgttttgggcaatagcacctctcagtgtctcagttcctcttgagagcggacataaccccaccatcccaggttgttaggaggtgaagaaaatggtaccacactgggccttggcaggtgggtggtgactgctgcccccagagcctcacctgacatccccgacgatgggatgtttgattttttgctgcccgaggagctgcatcaggaagctgcctacactggtggcatgatcctggagctgctccttctccaagacattcaggacggccagccccacagcgcaggacactgggctgcccccaaactgagccagggacaaagaacatgtcagatgccctggcagagtgggccatgccccagagtgagggtgaggcagaagaactgccacacgtgttccaaggccagtggcaagagcagaggccccaaaccccttagggcgcacagtcctcagcagtagtaagtggggttcaacatgggctgtcctggctttccaggagctaatgtgactgcaactcaggtcaggtatccctgaagtacagtaggagcccctagaagatacagaatcagaggagagggtgtcctgtttgttcccacagggctagtctttaccaagagaggctttaaggccccatctcctgggcccagacccagaggactggattaggcacttcctcctccagggagagtgagcgcagcacgccaagccccacccaggaaaagctgcttcacacccctggagggctctggctcctttccctcgcccaccctgtcctcatcctgcaggtatctgagtggagacctgtgttttagaggatcacgagcaaggtgtctcctgcaaaccacgttttttgtttcgtttttaaactacatctttaaaaacatcagctttgttgaggtataatttatatataaactgtgtttaaagtataaagttcaacgtgaggtgacaaatgtatgtacctgtgtaacctccctcgcagtgaagttgcagaacattttcatcacttcctgtgcaaccgtcccgctactactggacccaggcatccactgatctgctttctgttactatgagatggctacagggggctttgaaaggctgtgacgtactcctgggagtctagaaggccattcatatgcatagggatgtgcttatgcccagtgctgtgtgcatgctcaggtaagatctagaaagccctaagctctcaccactggctaccttgagcctctgcagaatgaggaagtaaagtctaaggcagttataaactcttggctgagtgacttacgggttccaggcaattaaggagatctaatggttagaggaccactaagctaatcaagcagagactatagtggccacacatgacaaagaacacaactttacataattagttcagaaaagacattaaacaagaaaaaggaaccaccatggggagggaggagaatatgatttccacagttgccacattatgttacttaaaatgtccagcttttaacaaaattctgaaacatgcaaagaagcatggcccagacacgggaggaaaaaaagcaatcaatgcaaactgcgcccgaggaagctgacactgaccttactggataaagactttaaatcagatgttacaaacatgttagctgggtgcagtggcccatgcctgtaatcccagcactttgggaggccaagatgggtgagttgcctaaggtgaggagttcgagaccagcctgggcagcatggtgaaaccccatctctacaaaaaataaaaatagccaggcgtggtggcacatgtgtgtactcccagctgcttgcggggtgaggcaggaggatcacttgagctccagaggctgaagctgcagtgagccaagactccagcctgggcaacagagtgagaccctgtatccaaacaagcaaacagaaacaaccccaaaaccaaatatgttaagagacctaaaggaaactatacttaaaaaattgaaagcaaagcatgaaaatgatgtcttaccaaaacagagtctaatgatagataaattattaaaaatcaatcagaaaatttgaagttgataagcacaataaatgaaatgaagcatttactagagaggctcaacagattttttttttttttttgagacagtctcgctgtcacccaggatggagtgcagtggtgcgatctcagcaaactgcagctgccgcctcccaggttcaggcgattctggtgcttcagcctcccaactagctgggactataggtgcatgccaccacatctggctaatttttgtatttttagtagagacggagtttcactgtgttggccaggctggtcttaaacccg

SEQ ID NO: 96923 - DNA, 35937 bp, Homo sapiens
aacacggaacctaaaaatctcatcatcaagcaacactagtaaaattctgatcatctctatgggcattgtgtatgcttatatgattcaagttaattctttttatcacaaaaaagtagaaagtcacagtgaaatcagtgctcagagaatccaagtccattttttttccttgcccttcacgcatttggaggtagaaattttgatgacaaactcttaagaaactttaccctctttgacgggccctggcatggttaacagtgccatacaagtggaaaaagatttccagggagaatgtggccttcaaagttcatgccagtagccagaaacttggaatctcttctgggtttcaccactgaccccattcatctctcctccttgtaacaagtaaacaagtaaattagggctacttctaattgtgcatccctgcaaaaactttagttccaccttctctgaaactcctttcttttttgttacctttcaagcaaagagtaacacagaagagaggtgattgcttcttccacaaagcacagcataataaaatgtttgatcaaaatattttaataaagattctttctgacatagatacacatacaaatggtcgtacatagctgtcatagtctgattgacctatttaatatatatatcattctttacacatccaaaacccgccaacagatccatcacagctcccaactcaccatccaacctgacaaactgaatttgtattatctgcaaggagtggaaaatagcaggactccatttttaaaaaagattttcttgattttcatagggcggaaaggcagtcaaacagccatgcaaaactaaaactgaaagctcactttgggtaaatagcttcttgttcttccttagttttctttctttttaaattttatttttttagaaaaataacaaaggatttcacaccataggcaaatcaaaccagtcttttaacttaaataattctccacagttaaaataacatatatgtacatatatattaaaagcaattaaattagaccttttaaaaatgcacagcacagcctggaaaaatatttgcttagcatgttcttacgtatagcaactattgctgtgatgtttttcccttttggaatgtaaaggagtcccctttcaaaaaagagatcaattcattcatcaattaagaatacacctttcctgtaatttttggactgaagcaatttattaaagctcaatttaaatacagggatgatgcaactgaaaatatccaggtgacctttcataaacctaagcagctcagatacatcaatatttctcttcatacttgttggcaaataaacctttaaacacttggcacacagcataagtaatctataaaacaattttagaggcattaaaaaaatctgcacataagacccatgactttaacacatgataaatactgttgatgtggaagggtcattgaagaataacaaataaataccatgaattgttaatacatcattgcagagtagaaagtaacaaggtgcacataaatatttttaaatgcaattctttcagccacagtcagtttttttatatcactctcgccaaaactttgagcattttcacaggattaaagttcagagacaataaaaaatacaagtctttcatagtaacatgtctctctctctcgctctctctctctctctgggttttatttccccctcacttaagtcaacatttcaagtttttctcctggctcagaatcaaaatttattttcaagtgccctttctgatttgtctgaatgaatattccatctctcatgctacccaacccctaacccctcctctccccctcagcactagccaaatccacaattattagtaggattagtattttgccattcaaacactctccaggcttaataaccaagcactacttctcaacttatgtttcacctttaaggaagattccacttcctcgcggtctaggctgccaccaaagttgccacttttctgagaaaaaaaagacatccatactccatcccaactccacctccctcctccctccctccccaccccaaagaccgagattctggggatgtcaaggctaaaagtcccgtttgtctctgatacttctcctcagttcttgcctctgctttgtttgctctgcaagtgtttcacaactacgagaggaccaaaataaagggggtggggagcagcttttcgctttcctctagattttgggtcggtcttgtgtttttcgggggtgtgtttaaggcttctccgtgcactgtttgcagaggctggaggagacgctgttaaacagggcgcacttctccgggcaggaggcagccgggggcagtccggcgctgaacgggtagccggctgcctgctcgtaggcgccgagcgccgggtgcagggcagcagctgctgccgctgcagccgccgagctgggcagggaggcagccgagatggcctggccctggttgaggtaggcgactaggcgccgcatctcctccagggcctgcgcctgcatgaggatgtagttcttggcgagcagcagcgtggcgatcttggagagctttcgcaccgaggggctgtgcgcgtaggggatcaccgcgcgcagctcgtccagcgcgtcgttcaggtcgtgcatccgccggcgctctcgggcattgatgttaagccgcagcgccttttgctctttggatttcttgctgctgctgctgctgctgctgctgctgccgccgctgccgctaccgctaccgccaccgccgccactgctaccgctgctgctacccccgccgccgccgccgcccaggccccccggggggacgctggcgccgccgtggaggtgggcattggagcagccctcggctgccttcgcgccaccacctcccgctcccggggaggcccgcgggtcggctactccggcccgcagcacgagctcgcagcgaccgtcgctgtcgtcgtcggggctctgctcgccgccgctgctctcggccaccgagccccggctcgcgctttcgccgtacttgaggcaaagggcggccccggccggcaggctgcttaggctagggtcgcccccaacgccggctgaamctactagcagcccggggacacccaccccgccgccgccgccgccgccacttcccgcgctgccgccgccgcctcctccaggcggcggcaacagcagccctgccccctcggggtcagccggctcgaagcagcccaggggcgacgaggaggaggacgccgggcgttcccgaggcggcggcgccagggacaggtccatgcccgggggcgtggagcggaaagccgcttccaagcgcttggaggtggaggcgctcaggctcttgtgcaggaagaggtcgtcctcgccggcggccgctgcaccgaggtgcatcccgcgctccttggtcccgcgccggtgcgcagcccgggccgccgcgcccgctgccgccgccgccgctttggccccggagtcaggcggccccacagacgcgcgcgagctgggctccggagctggtgcgcgcgtcggtcctggtgctgccgggagccctctccccttctttctttttctttttcgccttcccccgcgctcgccgcctcctcttcttcttcttcttcgtctccagccgatggtgctggctgctggggctcaccatgggccgcggccccgcatggtgggagggtgggcgcggagggagtggagccgccgccgccgccgatatgagcccagccccgcgcctcctctccgcaccgtttatcttgcttggattcaccttcaagagatttccggacccatcaaacagccgccgccacagacgggggagtcttttacatcattatctctgagtaggttattatgaagaagactcgcctgttgggacagcgctttctacccaatcaggttaacgttttaattaataggattaaaacggtaacaaacaatcgcaggcgctatctggccgcaagtctgaatagtttcatttcccaggtctgaagacaggcagcagctagagctttataaaaggcgcctgctccattattctgcctgccatctgtatacacagcttagcgcatatgtttgcaaggcgctgggtcctgttagtaacccaacaactgcctttagcttgacatgtgtggcgactttcactcatcaatgagcacactaaaagccctacttagagccgaggatgttctttgctccttcagcaaattgtagatcggcggcgaagcctgggagtcctgtggaaagcagacgcccccacccaccgcaccccaccccccactgcccttccctcgccactgctgtctcagcttgtgctaaattacccttccgggcgagaattatactccacccctgttcgtaggatgactggtctggatttggggatgggactttccgagagaaggtggtgtcccagctggcttgcccaaaattcactctaggttttcagctggtcagagagcaaagcagtcgtccccccgaacactctgcctcgtttccacacccgccactgcccatttcctacccagattggaaaaaaagaaagaaaaaagcaaaatgaagagcaagtgatcatgcagcccatttttttttaaggtggggtggcagtgattttgcagtggtctccaaataactgttacagtgatggtaattgtgaagtacacaatttcctaaacaggaagaaaacaaacaaacaaacaaaccggtttctcaaactttccttaagatgaaaatctgattgcttcaaaagagtcaacttcaccaggagtcaaatccgctcccacacgaagtgaggcatttatgcatatttatttacccggaagccatttaaggacatctggatcagcctcggttgttcttggagggttcgggaagggagaatgtaaaaacaagtgctcctctccggatgggcactggtacacgcggtcatctcactcctgagttcggtctctgggtacacatggtatttagcagctggttttcatccttatgacataagtaaaaacaatatttcccaacaccttccaataactctttcttatatggcagaagtactgaagactatgcaatttttggtttctctggtttcattaaaaaccttttaattgtggctttcggagttggccccaggtgttggactcttttcattacattttgctctaatgtgatgaaattctaattctctccttaccatatggttaaatttccccactgagaattagttgaaaaaggagaaataatctattaatctctgtaatagattcacaaatgaggttcgccacagaacctgtttttgaatggtaatatcagaacagttgggcaccttatttcataaaggaagggtgagggcgacacaaaaatgtctgtattttcacctggaaaggatgaaaggggctcagcagtatcttccataataattccctgagatccagtcttccggggacagaaatactacgtagacgtcggttacctacgctcctttggatgtcctggaacctaaagactgagaaagatcaggcggggctacgggaggctcttgtgcctgggaccgagaccgggggttctgcaggcttgagcggtcccacttgtctcgtctgggaccccgaggctgtttacatgcagggcagcccctcgctcaccgcacccctcccaccgtccctcccccggcgttcgcagctgttaacctctccctttagaaagctaaagacacgctagtgttattgtttttcaattagcagctttgttttcactgggatcataaacaaaggttctctctaaacataggtgggtcgtgtatgcatgacactaacttatcaaagtccttgggtcactttcgggagggcggaggctggcccggtcgtggctctgggcaggatggggacacatctcacaatgtctgacttagttctccagccagcttgccctttttgtgggctgccaccttctgcggggcgccaggattcttgccggcccgaagtggacatttgaagggcgaaggatcgatcatgtcagggactggtggggggtgccatgcggggctgtgagcggcagagccgggatggcagagcaggggcgacactgagggcggcaaaggccctgccagctcagctagacccaggatcttcgcaggacctttgtctttcgcccttaggcaacaaacacttgagcgcatctcgtggcccttcccgaccccatctccacgacctcctgccacctccctcctctccctggccatccaagcttctggaacaaacttttgcacaacttcattttactcggtaggagccaaaagcctcttccttttgtaattcaagaaaatccccctagtcttcccggaggaggtggctgcttaatagtcgctgaaaactttgctttgggaaaaggccgaagaatttatggaagctctaaataccggccttataacaaccgatagggaatggtctttgaggtttatgcactcgtaaacttttgctgattgcttctgggaagttgtcaggcacttaacactgcatttatcttacagggcaatgaaaacacatctgcccggtgtctcgttacttggtttaatcgtcgccagccctaagtcacggcctcggctccctctcctcaactgtgtgggatcccgccgcctggtttcggccgggcggaggggtgacgtcagccgctcacacagtgccccctggcmgctggagctcgggaaatctgtgcgctcgaacttggctccgccaagaagctgggcaaggatccgggctcctgatggaactggcaagttggaaaagtggcaaaggaaaagccaacatgagcgctttcggcttgcgcgggcagaaagggtgggaaatcaggccacggcgaaatcttctgactcacagatgaccgcttagaatgaaaactacggaagggaagtcctctgactctgcagtttcacagagagtcactgagttaccaaagcagttgggaaacagaggcagaggactgcccccactctgtccgcagcaggggtatgggaggcagctcgggacactccagggaccaagcgggcagtgggcgccgtccccgaggaacacccagcccagcgcccctggttctgggctggttggcttatcgaggccggttggccaaagcatcaggaaagggaacattctcggccgggtgttggataccaaattataaacgccagagcaccttgtgtaaagatgaatatcgttttgttactgcgggagggaatacacctactgctttgaaaggagtttaaaatattcagcagacagcaccgcattgaaattagtgcattgagctgcagaccaaactaatttctaggtactatttaaatttcttaatgatcatcttgatatttgcttgaaatttgagataggaacccaagtaaaatcagaatggaacataatctactctaaagagtaaagccagaagttcgtctttgttatttttatagtactgataaatagtttattacttcactagtttgaaaagttacaagtctgaatttgggtagctatgtgtatcttctgagaaggaaaattgtctctctgtgtttttcaatttatctctttcagaacagtctaaaaagtaaaaacaaagtttggcaaaaatgacaactttgcttgagaacagctctggaaaagcgaatccactgagagccgtgggaattctccgccagctgtgcttccccaaccgaggaagaatccaacccggaatatcgtttctggaccccaccgcggagaccccagctggaccctctcctgaaaactgcccggggaggggggtgcggtctcagcgccctccactgcggggtccaaggcgcagtagcggggcgcgaccccagcgctccaagcccagcattcttggcagctctccaggccccagtcagaggcacattgaccttgaagttgcacttgactcgcccactcggggctgcctggtggcgcctgggtcagcttgaaacccacgcagctgagggagctaggtgtggggttcaccatactgcgcccccgccggatttgggagcgcgggatctactcggaggcagagagattagccccagaggtcaagcctttcggcgtcgttttgtcatctgtattttctcgtccccttcgccgccgagtcctacaaagctcacttcagagagactgggtccacatgtgtgggctcatgaggaggaggacagcgagggtgacgacgctgggggactagcgcgagctggcgcattcctggcagtgagccaagggccccccgtcttgctagtctttccaagttgcttggcaattccaaaaatttcgactgtgggaaagttgaaacttgttcgtatagcgttctttcgaaaagattttccttgtctgtatctattttacagaaaacatactggtcctcactactgtttggggacgagttagcctaaatttgaacagaccttgaagacaaaccctgagccccgggaggcagccttctcagcgcgaggtgcacacacaagtccccgagcccaccgcgagggtctcacctggctcctgcgtggtctttccccactttggcgactttgaaggccagggggaccgtacagtgagcgaataacttagcgcctgcattatcactgctgaaacctcagagaacaatgtaggacatgcgggtgcaggtagagcaaaactagtgaaaagagtttatgaggaattcataccgcctcgcctacttgggacaactccttcattcagttgtcctccctagggggctgttatgcttatttgtgtcagacccttctttcccctggaatcttatcatcacagaatattaaacatttgaaaaaattttaaagattaaacttgttcgaggaaaaaatggtaaacactgttagggattgcctggcgtgcacaaattaaggaaagaaagaaactgaaaatttcagcgcggctttgggaatttttagctttgcgatttaaaacccacagcgccatctcctggtaatgaggagaatatagcgatggatgacaatactgaaatgctgactatgaaatactcaaatatgagaaacgcctcaaaaattatttcagtgataggttgattatgattacaaaatatgatctgacatggacatttattatcattaaaagttatcagacacaatcctggaagctaattatttgtaaatagaagtttgtatatttatacatacatgtattttatagattcagacgcttatgctgtgaatttacaagatatgattctataatttatcataaatacataattttacaaaacagttccctgttttactttttgtgaatgattttaccatatatggtagaaaaagaataataggatgtggtgatctatggagacataaaatcttctagatcctcattgtattttactagtcaacattaataaatactttagccccattgtctcaataacttctcactttatctatgtcttctcatcatgcaatcttacagaatgtcttactgtcttaatgttaagacatcatgacaaaaatgtgttaacattattcagacattctgatcctgaaatatcatctgaagttaaattattttccaaaagtttaatgcacataatagaatcataaatacttaatacttttctattaaaatgtttctgaagtattctttcaagcttttctcccttttataaataagattgaaacacactaaaatttagagatgatatccctattaaaaacatttctcctctatgattgtatacacaggccagctgcttgaaataaaaataaaagtagatatgctttttgtagtgtacaaaatattatgaatatccttcaaaattgtagatcaaacagacaaatgtaaacttcagttgaaagattcattttatttgattaattaaagtgaagatctattaagccaaatatttggactcatttattttgtcaatgtaagagttcctgtttgaaagaaagttgattatatataggaggaactagataaacagatggttatctagagagcttttcacagttacattttgaaatttaacatggatacgtttgatatcttctcaaacatctttgatgaggtcatttgatctcttctagcaatgcggtattgttgcacatcatcattttaacttatgtttaagaaagatttaacttgctttttatttcatttggctgaaaactgtactgattgaattgtccacgagggaaatacacacacgcgcgcacacacaagcatgtatatatatatgtatacctatatatacgtgtgctatatttacacagtaataagtaagtcttgtgaaaaggaaatcaacagctgcaaggaatcatgacaagagtgtcttaacatacaaataacatttctctaatgaaatgtttcatccagttacctgaaggcaggcatcattggcttccaatggtgttggcagacaaaccaagctgcctgtctattgcagtacggtgcccacatggagaatggacattatcacttgggtggcatggaggcattaaagttaatcttaaaagtaatttaagagccttttgggctttaggtacttgtgagaaaaaaaaatctcccactccctccatgggtgaaaagttgagattttcccagaaagattgttttgcaatacatgtacttaaacattcttactcgcttgagttgcttcccatgttttcaagaagaatgctcatgggggaaaagggcaggggaaggaataaaggaaggatgaaaggaaggcaggcagaggaaaagtaagtatgtcgacttgaggccaaataatgtatttcatgtgtttactgaatgtggaaattatttgtctaataaagatactgtttgcttttcttttataaaaaagtttttgaggtacaatttttacatatttccaaacctgattgcacttctctgtgaattgctttaaatggttggagtaggtatagtagaaataaaagatccccagcagagtatgtaatcttgggcaatttctttggttctacttagcctcgggaggagaatgaatctattaatcacacttttcctgactacttcagggtacctgagggtattaatcaaataagactatgggaaagcactgtgtaaacactaaaatgatatgtgaatttagcatcaacactttattatgcttttttttgtatttcatctaaaccagttcagtcacctttcattatcattgttggtttgtaatttatttactttttctatcacaactttcaggtagtggcagattttagagcatcttcccttgcttgggccatgtctgagggtcatgggagtaggagccatagctgttttgacttttatttccacatccacagtgccctcacccaccactgcctcacctttctctggctaggagtatccctattgctcttcctgcagagtcttaaactgaatgcatttgtctctagtctgttacacagtggtcaccataagtgcgaattgactgaactaattttatgtgtatagagaaatgatcatggggttggctccaagtcagttattatttggatatcctactagggttctatccttcacagcaatcttctattataatgcgttcaggtgtgtagagtgcactttttcttttagtgacatttcttaaatgaataattacttcatttatctttattctttccagattattaatataaaagctttgtgaatccagatctatcattgatcttagtgtgatatttgtttcttcttccctatggctagatgcatcaatgctattattattttcgttgtttatgatctatcaggcagttttcaattcagatgacagtgttcaccttgaagaagccaatttgaattaatttttctatgaaagattgatggagacactgtatgtcaaaggtctaaatttattacacatcttgctctccctccactaatttagttttttttttttatcaagaaaggtaatcaggtttgtctgaattattttttctttttaaatctcagctatttattgacccaggtttcattattctgcaagtgcttgaagataatttctacttaaattttgttctcttactaaaatcaaagttaaatcagttctgtgtggattgagatatacgttttaagtaatgaatccatacattactatttttatagagacggtttttatagacttagagtggaaaggctttctaagcaagacaaaacccaaggagtcacacaggaaaaggatgtcacatttaagtacacacagaacaattacaatttctgttctttgaagaaaaataccacaaagaaagttgaaggacaaatgaccaactgggggaaaagaaacacatcaaacatacaaagagcttctaccaaacaacaagaaactcttcacaaaaatagaaaaataatttaatctggcaattagcagaaaaaaaataattgtccaaacaatggataaaaagatgttcaagatcattaataaaaagaaaatatgaattaaggtagttttaaaaataggccaaattttaaaaatatatgtggaattataatgaaaatggttgtggtaaaaattagtacaaaaactgagggatggtgatttggagtccaacatctaaaaatccaccctacagaaagaatggcatgagtacatatagatatatgtatgaagattttcttaaatggcagaaaatatgaacacctaaatgttccttagtaagcaaatgattaaataagttatgatgcctccattccataaaaagctattataaaaagaaaatgtggtatatctatatatacactgacctgggaaaccatttctgatacataattaagtttaaaagcaagatgtaaaatataacatggtcataattggtattttttacaaagaagtgtgtgtccctttctgatgttcaggatgttgaaaataggacatggtgggtcttctggtgcaaagttcctgatttcctgggtcatttggtgggaggcgtgatcaactrtgcagactgcatgggatccagaaatctgtatctcatcactgtgacgtgggcatcgacaggcggctgagccgacctcccggcactgctggcgggggaaccacgccgatggccagggtcagggaaggcaaaccagagcgcagagagaaggtgcctccagcagccgaaatcccaccgcgaaagtataccagagaagaaatggcacgtttcttattttgaagatcacgtggagatcatagcaaacaataaaggccagatgaatggttctgctatcccaagaccagccgtaacacagattaaaaaaaaccaaaaccgttaaaattatttgccaccgctcctccctatcttattttttgtgggtggatacatgcagaaaaaaaagttactgaacaattatttataactttaattactgctgggaactgagatttgagggtcaagagtgaggtttttcataaattactgtaaatacttccccaaagaagtagagggattgtgggcaacagatatttactgtctgttttgtatatatagtttttttttttttttttaacaattaaagaagcttaaagtaaaatattaaataagtaaaagtgttaatatttcgcctgggtcatttgcttcgtgattcattctcttctctatttaaaaatattgaaagcagttttcctaattttaaatacttgcactccgtaattttatccctcctcctccaaattccattgcctataaccatttcctttcatgttatttgggttaagaatttgttttaaattaatcatgacatttatgagcaatttgttttgttttgacttaaccactgatatcaacctttctttactagtcatttaagttttgaagaaaattgataacattaaaaggcaaggtgatcatattgcaaaattagtaactttattgaattccagtagagtaactcagttttaccttgtaaattaagtcattttatgttaatattttagcatgatcacagaactgttttttaaatagcagagaaaatatagatttttgtagagcaagaattcacactttgagctttgagaaaatgattttggcattttattttaccctttttatctctttatgtgtgtatgtgttttaattcgctcagtctacgtcctggttcaaaagtgaaagaacaatggtttttgctttcgaggttactaaaattcacactttaatctttcagggactgctattttccagtcacactcagatgtctgattgtcagctttatatctcagaaagcattccccgcaattcaggtacagtaaagtatctagctccagctagcctctgtgtactatataacttttatagtcattataaaaaataatttattgaaaaaacttaaaccttttccaactcaggtgacttttgatttaaatgtctgtgatcttggttatggtaatcagttatggtggattttttttttctgaattaagtttgctgtttatattacaaagtttagaaaatatgaaagtaacagcaactcaaagatagctggttagaaaaaatgaagactctgtagctcacattttaccattacttgcttcagattcacatttaatacaaggcctggagaaatttcctattctttgtgtcatatttttcctcttctatatatttttactttatttggactgctacatagtaaagtctaaaatatagtaagcctcactctgctatgattatttattagaaacactttgttaggtgaaattatgagatgcaacttaagctattaacagtaacattagacattcagaataacaattaattattaaaagatttttagagggttacttaaaagtgatggcatgggtaacaaatctctgaatgcttaactgcttaacctctgaagacataaactctcgatatattgtgatctgaatytgaaggagctgtgctgacaatgttatttcctatgcacacgaatgtagctgacaagatcaatgtgtcccctgcaacccttagatgctccagccaggaattgcatttcttgcttgcaaggtgtgtttcactacctatgggttgctttgttacctagactttgggcattaaaatgaaatcacttcttgctcaaatgcaaatgcaaatagcaccaagctatttttatatttgccaactgagctattctgactcggactgtggtcaaagcaattaagtcatctttcatctgtgggtagtttgatgtgccaagacccagaaatatcattcgtgttgatcatgctaccatttaaaaaaaaagcaatttgcatactacttaagctcagaacaactcttcattgttttttgagttgttctttggtttttgtattatcaaacaacctatattttctagttaaaaatgctgattcagcttttttcttttaaatgcatggtcttactttttaatttttgaaagatataatgatacagaataaacttgttgaaaacaatctcagactaaagtgaagagggaagcttttctcccttgtttagtgaatacaggcactttttgtggaatctgatgctaattaagatatgataacatgattgttatatattgcagttttaaaatcaatctcttctgtctgcttctaagaataataaaaaacaagagagcaaaacctcttcaaggagacactggaagagatctgaaagttgctaacttgtttaataggatatcttagataactgtgtggaaaaaatgaatccctcacattaaaagaagcctcaaaagaggaaatgtatcacagaggctaacagatgacaatgtatcttagaaactattgattattagtgagtgtgactcataacagaggtgacagttttgtaccatggataggtttgcaaagkaaaagaaaaagcagagtgctccagcaagaattccttcagtttatttttgaagcataacagtcctgcaaggtgaaactgcttcagrcctcattgtcaggagaaaatgtgatgcatgatttttataagagtgagcgcgagttgaaaactcagctgaaggagaagaatcaggaaaaatcgtgcccctatgaagcatgtcagagtaattttgtaacctaaattaaggtaggtagtgacaaaatctatttaaatatttctaccatgcatctatctgtgctaacttgattctgttcagggcagtacaattcaactcaatttgatgaagagcgatgcagtaaatattcaagtcatctatctacagggctatcttcctttaaaccttgagtctaatattatttcattgggaaacagatatctaattaatgttttatttgtgaattcagttgtttttaaataacaaaaaaatttttttgagggtgatgtatttatcactggaaagctccagatgctacggagaggagcaattgtgttaatccagctgaagctattgaaggtccatactaccctaggtagtgccactgccacctagtggtaaatacctgaatttgtagacgtggttctagccataggcacactgagtatgtagttaataccatatgatttcactagcaacagccattatattagatataaaaaaatttctgctagtgattgaatgcagcaacatttacttttttccgtacttaaggaaagacacttccttttatcacaatctcccgttcttcttcgctctatgtgcattccattgcccttataattgcatatagagtttactttagaaaagagatagaaaataatcatagactgctaagcttgtacatttatttggaggttacaaagacacttattgcaaaatgggctattaaatagacaaacaggtattcttaaaatctcattttataatataaaaatagattttatggattttccatttgctcaaatgcataacgtaatttcaacacttcacatccttgtaattatttaagatttttatggttttctggtgaatgcctttatatatcttagctttctctctttcactgattgttatctttgttttttaacacatctgtaatcacatttgaaatttcatactcatattcagatttcattttattttcattgagattttattttaatttgcgactgtgaataattacacactttgtcttatgccttaaagacagaaaacatacttgcagtcgtgttctgtggaccctacacaggaacatggattgctccattacttgcccattcacattccagagcactaggtgaaataagggaaacagaatcaaatgtgatgttcctgggaaaaataggaaatcaagtgcattgctggctaagcctagcattttcttgcattcctataggaactttaagaattcatggaacctgcattctggttttatttttctcaattaaattgcatgaaccttagacaagtcttttaacctctctgagcctgtttctttttaattttttaatttttattttattttacttcaaattctgggatacatgtgcagaacatgcaggtttgttacataggtatacatgtgccattgtggtctgcaacctatcaactcatcatttagttgttaagccccacatgcgttggttatttgccataatgctctgcttccccttgcacacccaccacaattggcaccagagtgtgttgctcccctccctgtgtccatgtgttctcattgtccaactcccacttatgagtgagaacatgcagtgtttggttttcagttcctgtgttagtttgctgagaatgatggtttccagcttcatccatgttcctgcaaagggaatgaactcatccttttttatggctgcataggattccatggtgtatatgtgccacatttttttatccggtctatcattgatggacatttgggttggttccaagtctttgctattgtgaatagtgctgcaataaacatatgtgtgcatgtgtctttatagtagaataatttatctcctttgggtatatacccagtaatgggattgctgggtcaaatggtatttctagttctagatccttgaggaatcctcacactgtcttccacaatggttgaactaattaacactcccatcaacagtgtaaaagcatgcctatttctccacatcctctccagcatctgttgtttcctgactttttaatgatcaccattctaactggcatgagatggcatcgcattgtggttttgatttgcatttatctaatgaccagtgatgatgagctttttttcatgtttgttggtcacataaatgtcttttttgagaagtgtctttttatatccttcaccccactttttgatgggattgtttgtttttttcttgtaaatttgtttaagttccttgtagattctggatattaaccctttgtcagatggatagattgcaaaaattttctcccattctgtaggttgcctgttcactctgatgatagattcttttgctgtgcagaagctctttagtttaatttgatcacatttgtctatttcatcttttgttgccattgcttttggtgttttagtcatagaagtctttgcccatgcctatgtcctgaatggtattgcctaggttttcttctagggtttttatggttttaggtctcacatttaaatctttactccatcttgagttaatttttgtataatgtgtaaggaaggggtcaagtttcagttttctgcatatggctagccagttttcccaacaccatttattaaatagggaatcctttccccattgcttgtttttataatgttcatcaaagatcagatrgttgtaggtgtgtggcattatttctgaggcctctgttctgttccattggtctacatatctattttggtaccagtaccatgctgttttggttactgtagccttgtcgtatagtttgaagtcaggcagtgtgatgcctccagctttgttctttttgcttagtattgtcttggagaatttccccaaccttgcaagacaggtcaacattcaaattcaggaaatacagagaacaccccaaagatactcctcaagaagagcaaccccaagacatataatcatcggattcaccaaggttgaaatgaaggaaaaaatgttgagggcagccagagagaaaggtcaggttacccacaaagggaagcccatcagactcacagtggatctctctgcagaaaccctacaagccaggagaaagtgggggccaatattcaacatgcttaaagaaaagaattttcagcccagaatttcatatccagccaaactaagcttcataagtgaaggagaaataaaatcctttgcagacaagcaaatgctgagagattttgtcaccaccaggcctgccttacaagagctcctgaaagaagcactagatatggaaaggaaaaatcagtaccagccactgccaaaatataccaaattgtaaagaccatagatgctatgaagaaactgcatcaactaacgggcaaaataaccagctagcatcataatgacaggattaaattcaaacatamcaatattaaccttaaatgtaaatgggctaaatgcctcaattaaaagacacagactggcaaattggataaagactcaagacccatcaatgtgctgtattcaggagacctatctcacgtgcaaagacacacataggctcaaaataaagggatggaggaagatttatcaagcaagtggaaagcaaaaaaaagcaggtgtcgcaatcctagtctctgataaaacagactttaagccaacaaagatcaaaagagacaaagaagggcattacataatggtaaagggatcaatgcaacaagaagagctaactatcctaaatatatatgyacccaatacaggagcactcagattcataaagcaagttcttagtgacttacaaagagacttagactctcacacaacaatagtgggagactttaacaccccactgtcaatattagvtcgataagacagaaaattaacaaagatatccaggacttgaactcagctatggaccaagcagacctaatagacatmtacagaactctccatcccaaatctacagaatatactttcttctcagcaccacatcgcacttattctaaaattgaccacataattggaagtaaaacactcatcagcaaatgcaaaacaatggaagtcataacaaactgtctctcagaccacagtgcattcaaattagaactcaggattaagaaactcactcaaaacaacacaactacatggaaactgaaaaacttgctcctgaatgactactgggtaaataatgaaatgaaggcacaaataaagatgttctttgaaaccaatgagaacaaagacacaatgtaccagaatctctggggcacatttaaagcagtgcttagagggaaatttatagcactaaaggcccacaagagaaagcaggaaagatctaaaattgacactctaacatcacaattaaaacaactagagaagcaatagcaaacaaattcaaaagttagcagaagacaagaaatacctaaaatcagagcagaactgaaggagataagagacacaaaaaacacttcaaaatatcaataaatccaggagctggttttttgaaaagactaacaaaatggatagttcgctagccagaataataaagaagacaagagagaagaatcaaatacacatgataaaaaaatgattaaggggctatcacccccgatcccacagaaatacaaactaacatcagagaatactatacacatcactatgcaaataaactagaaaatctagaagaaatggataaattcctggatacatacaccctcccaacactaaaccagaaagaagtcgaatcgctgaatagaccaataacaagttctgaaattgaggcaataattaatagcctaccaacaaaaaaagcccaggaccaggcatattcacagccaaatcctactagaggtacaaagaggagctggtaccattccttctgaaactattccaaacaataggaaaagagggactcatccctaactcattttatgaggccagcatcatcctgataccaaaacctggcaaagacataacaaaaaaagaaaatttcaggccaatatccctgatgaacatctatgtgaaaatcctcaataaaatactggcaaaccaaatccagcagcacatcaaaaagcttatccaccatgatcaagtcagcttcatccctgggattcaaggctggttcaacctacacaaatcaataaatgtaatccatcacataaacagaaccaatgacaaaaaccacatgattatctcaacagatgcagaaaaggtcttcgataaaattcaacacctcttaatgctaaaaaaactgtcaataaactaggtattaatggaacatgtctcaaaataataaaagctatttatgtcgaacccaaatccaatatcatatggaatgggcaaaagctggaagcattccctttgaaagccggcacaagacaagtatgccctctttcaccactcctactcaatgtagtattggaagttayggccagggtaatcaggcaagagaaaggaataaagggtattcaaatagaaagagaggaagtcaaattgactctgcagatgacatgattgtatatttagaaaacctcatcctctcagccgaaaatctccttaagctgataagcaacttcagtaaagtcttagtatacaaaatcaataagcaaaaatcacaaacatccctatacaccaataatagacaaacagagagccaagtcatgagtgacccattcacaattgccacaaagagaataaaatacctgggaatacaacttacaagggatgtgaaggacctcttcaggsagaactataaatcactgcttgaggaaataagagaggacacaaacaaatggaaaaacattccatgttcacggataggaagaatcaatatcgtgaaaacggccatactgcccaaaataatttatagattcagtgctgtcctcatcaaactaccattgactttcttcacagaattagaaaaaaactgctttaaatttcatatggaactaaaaaagagctcatatagccaagacaattctaagtaaaaagaataaagatggaggcatcacgctacctgacttctatctatgctacaaggctacagtagtaaccaaaacagtttcttaaactataaaataagcagagtgttttcttacctgtaaaattaatattatcaacctgaggggaataacagaatcattttgagtagtgttattaatggttgttatttctccatagggtatatcagaacttctgaatgaatgggtattggagcgtgtgttttatgaaaactccccccaaatatttcacctctcctcaaacttccacctccagcctaaacagtgtttaatattttttttaacattccatatttccaattttttcccctatgggctaacataattttgaatggaacatgttttacttagaatagttttcaaacacacgtttttgtagaagctaacaaaagacatttctcagcccagcgggccctctttggaacccatggaaacattcgaatacccagctctcaaatctaagaacaaactcggtaccaaaacgacttatgatgtgaaaagctatgggtcctttaccaagagaaatgatcatatggaatatggaaataataagtctgtgtgaggtttttatctttcataaacagaatagccattttgattctttaagtctctaggtgggttaaggtgatattgttttatgccttacagcaatatttgactcttaaatatcttttactcccattgtgatatgattttttcaatatcattctttttgttgctctttacttcaagatccaactcaccaatttcagtttattttaggccacctgcttctttgaaaaagaaaataatcttaaaattatctataaatatcagcttttcagaaactccaagatatcctcataatcctaggtgagctgtttgcaaaattgaaaaaaatagtttttaaaagttattttttctttaagtgatatgaaacatgacagtaatatcagcatttaaaaatcttcattttgaatactttttgtctaggctgctgggaaggaaagcactggatataggacacacaagatttaaatacgtaattagttaaagtatttattagtaccattcaaaccataataagagtacatcagattagatgcttgggagagtggcggttttttgttttgtttttaatacttctgggttcatggtacctaatcataatttacttaaaaaggatatttgaggcagggatagtttcaaaagcagaaattatttttgtttaaaaatcacagtattttttttgtgtgtggtaactgctttgtgtccattacttgtatcccgacttctcttgctggaatgcccagaatgtctttcttaaagtcccaaatgacaccactgcaaaattaaaaacatcagaagcaccaagtaatggaaacacggctgaaaatcaaattagtgattaaaagaaaaatttaaattcaaaggaaaaaggcataaatgttacacagaaaaattcatacaaggagaaaagatatggtctaatatgaaaaataaatgtgtttctgaatttgagaatgcaacaaataaaacagagaaataattgaaagatgcccattttttaaaaacccaatttctttttttttttttaacatgttagtggtagatcttctttttttttaattttattattattatactttaagttttagggtacatgtgcacaatgtgcaggttagttacgtatgtatacatgtgccatgctggtgtgctgcacccattaactcatcatttagcattaggtatatctcctaatgctatccctcccccctccccccaccccacaacagtacccagagtgtgatgtcccccttcctgtgtccatgtgttctcattgttcaattcccacctatgagtgagaacatgtggtgtttggttttttgtccttgcaatagtttactgagaatgatgatttccaatttcatccatgtccctacaaaggacatgaactcatcatttttcatggctgcatagtattccatggtgtatatgtgccacattttcttaatccagtctatcgttgttggacatttgggttggttccaagtctttgctattgtgaatagtgccacaataaacatacgtgtgcatgtgtttttatagcagcatgatttatagtcctttgggtatatacccagtaatgggatggctgggtcaaatggtatttcaagttctagatccctgaggaatcgccacactgacttccacaatggttgaactagtaaaaacccaagttcttgaaataaacacaaaattgaatctgtggagtgaaagaacccaccatgttccagagacggttaatgtagagcaagaaatcacaattcacgccttttaagttatcaaactttgcagataaaaaaatgagtcaggcttttaagttgaaatgggatgtcatctataagttggaaaatcatgctggctttcgatttcttcatagcaatgttcaatgcccaaagacaataccgtaaaataagcttaatactgagaccatgtgatcaaagaatattacactcatccaaactgtccattaagtgtgaaagcaggaggccatcattcccaaacatgaacaaaattagcattgttgagtccttcctggaaaaactagttcatgctgacattcagccagccatgtaatgagttaaaatagagaaaccaggaatggagaaaatctggtaaaagcaattgaggtatgtgccacttcatttcaacataaagcgaagattaattgtctgtgggaattattgcaataggacagaaaataaatgtggtaaatggtgacagcccccaaataatagttaattaacacaaaataaaatgaaaggcagaagaaagtgtatgataattttcttatctttagatattattatcagtagtatttaaaagtgaaatacggtttttaagatggccatcatactagcaatcactaaatgtttttctttgtgattttctttgtgatcattttatcaaagcaataaattaatttttgaataaatgaataaaatctaatattttaacttcagctcacaccattcccttttcctataagttttggctttggagctttgttgattataaatttaaagtgaagcatcttaaatgttttgttatttgggggtagtgaaaaagatggtactacttgacatgctgagtgcataatacaaagatagtattcaaatgaaatattatagcagatgtacccatactgtacatgtagtttgcaaatgttgcttgttgtgcattatgcatattatgatttcctttgatacctaaaactgtgaacttttgttagartatgctttattttagtttcaaactcttaactctatgttgttaaaattctstatgttaatatctgatttttgaaaggaaggctctttgagcttcccaactgaagtctgaaaaggggttaaaatcaatgtaagtaaaaatcatttgcaatatgaacatggaaatgaaattttaaaattaaatataggttttgaggaaaaagtatttttggaatattggatagtgattaattgacaataatacattgttttgactttttgagtgcacccaaaaataatttaaaaatattagggtctagtagagagcaggaatgtgctattcttgtccacccatagtggcataaattccattgttaccatcatgtttaaatcactcaaattacccttgcaattattataacactttaagtaatctatactgcctattacttttccatcttagttatttcttgattaagttttactttaaatttttttatctttcatttgtctttctttgtaatattttaattttatcctgctgtgaatattgaaatagtcataaagaaattaawtttaatgctacattcacttattgggcagcttcaataatttaagcactgcgctgtgcataagtgatacaaaggtgaacaagaccttgttcccagaatgttgacaatataagaagtaagatgtgggaatcatatagaaattctgatttgtttgtctccaaaatgaatgttctttcatcgactaaggcaatggtaattttgaagtacaatgagaatatgagtttttaagtcagacagatgtaagtttgaatcttttttacttaataactgtcaactgaacttcagtttactcaagttaaaaaaaatggaaatgatacctcatggaattgtgattagaatagatggagaaaatttgtaaaaccagcccactatctggcatgttgtattcccttgataataattagttttcttcttcttcacttaactaagaatatctgcacaatgagtctcaaatatattgccagtatctatgaaaaagctatctattttaccctatgtattttatttactacatttcacacatctgtattctatatgaatctatctgtakatctatattcttatagttttatcattatcttgtttttatatatttttaactcatttaattgtatgcacattatctcaatattactgccatttcttttcctttttgattgaagaattctttcctatgttttccaaattctttgcaattctcatagtaggactcccacagttcacagccccaccttttctggccttgtgtttgaggggaagaagtgcctttctgcctttaaggcaaggctctcaacaaatactttgtaccagcctctctcattttctcagggaactcttctgcatctcacatgatacccattctgctgtagcttttccactagcatttaagtatccaccagtcactcccaatcttaaaataaaatataacaaaacaagactgtccttcatccttacagcttcctctagctaccctcctatatctttcttcccttttaatgccaagtttcttgaaaaagtattttacatttcatttctctacttcagttccctttcagtcctcaatccactgcagtgtgacttattctaccaatacttaatgaaaattgctttcactaaaggaaattatgacatgctggttcctaaattcaaagcactgaaaggaaccttatctgacctttctgctatatttaaaaatagaccattgtctatctcttcactccagacatcctgaccacctgatcatattttctcacttctccactttacatatttattcttccaactagaactttttctttttcccccatcccttcattcttttcttttcatagtctataatacttgttcattctcataactgcatgtttagttcaaaaatctgacttccaaaataaaaatatattactaggaatggtaggtaatgaacaaccctgaaataccagtggtttagcaaataaaactttatttatcactaatgcttggtccaacgtggatgttgctagctgggcagctctcatgggtttctttgttcaagtagakgttctgggattcaggatccttctttttctttatgctattatcttcagcatgtctgttccagggttactgtgggaaggaaaatgattatagtaaatgcataactgctaattatccacctgagtctggaaatagcacacattatatttcatcagccagactagccactggccccttttggatgcaaggcttctggaaaatgtagttcttggctggacaggtgcgtccctgcagcaacttagactctaggaggggagcacagatcttcattgctagcagccacaacttattgcatttttcaacttttatatgactttaacaattctcagtaatgatggcatttactctcccaaagggtaattaagtgctcttttgtgtctcagcagtgatcgccattaacattcatgttatttgagatgctgatgcatttaatgttttaattaggtgccaagagaatgtagcagattgtctaaggagaaaccttgtctatatcttttctcaagtagaacagcttcctagtgtctctctgcctcattgactcaccatcttttttcaaatctcatctgaaaatatgcccttctctttggactatgcctcttaatttatttattcctctgctttctattacttaactttgtattgtttaaataaattaggttacattattgtgtatggaagatgctaatcaaagaaagctattacacaatatttagaatttgtattttacttgatgttttaaaagaactttacagtatcaattagtaaattatcacagcattctagacaggtaaattgattatatctttgttgttgttatttttgataaatagcccatctcagagaaggacaaaaggaggcatgctttgcttcacagacacatgtgtgctaaactccttcctcttggtccaatactaatagaagttcataatgatagaaatactagcaattattccgtgaggtcctacaatgacaccatggtaaacgatttacacaggttaaaacttcaatctctccaatattccagttgggtgctatgagggactatgccttagatcgctcactttgcaacctgagttgcttcattcacattgttcaaagagagtctagtacagcactagatcagtaacttgcaattcgtttattcttagtaagtgatgaatgaatacatgaagaagtattctttttccttcttctgcctcttgccatctgtttttaatcttttcactaccagcatgtcaagttagccaatttgaccctgatgaagcactttcacagggacatggcatggtgggggtactgagaaagcataaggaggagaagaaaaaattgtgattggaaattaaaccattataaatgtttagtctttgctgagttctgggcctgtactatcaacatttgttataactcatcattagttaccaaaaactttcttgtcaggatgttctgtggaaaagacctctttgatactaacggtggcctcaatagaatttaatccaaacttcattttctatttccaagaataattgaataggtttaaaatttggcaagctggcagtttagattaaaaatggaatcataggatgcttgctctgggtctggaattaaggaatttttggtgagaatctctaactaatgaagccaaacccaagcaagattttgaagtgtctttttgatatcagctttttttgcatattattctcttctatgctctttccctgataatggccccaccctatttagagagttcccattctgatcttgtttactgtttcttgtcttgttggctaggtagtgatggtgtaagcaacttcaggccagtacaatgcttcacaattgtaccagtctcctctgagctgcctcaggaggcttgctacagtcacaaacccattcaaaaaggattctcccttgtmcctttatttactttgtcccttgtgactctgcctttttagctagtactagctaactttagtactccccatattagagaaccaaaagacagtgaattactatagaggtgactaaagatattatatagaggtgttggtataaatgtaaggacttcaataaatatacacactttcctaaacactaaaggaaaataaataggaaggaaaagagaccacatagtatgtggcaaatgtaacatacaacaatatgataatactgaaagcaaacatatcaataatattcataaaagtaacagcttatcttgattactaaaataaattttcatattgaccaacaaagctaaccctacactatgctgtattcaagagacacaattgaaataagcaaattcaaaaagttaaaatttagatactatttagcgcagggcctggtggctaggctttttctttccttttgagtcagaggcctctgccacaaacatgctccgctagattctcagtcaggccaagaagcatctgagcttgatccccctctttgtatttattggagctggaggtactggagcagcacaatttgtcttgcatctggcatcattcaatccagatgttagctgggacagaaagaacccagagccctggaacaaatggggtcccaatgatcaatacaaattttactcaatgaatgtagattacagcaaactgaagaaagaaggtccagatatttaaatgaaatatttcactataaagctgctttagaatgaaagtcttccagaagccatctgcacaattttctacgtaaccaggaaatagttctcctctagatgtatgaaatcatgttgatgaatgtgttggagattacactgattaatacataactgaaacttgaaacaaataaaaggttaaaattaaaaggatgggtgaatatacaacaggtaaatgcaaataaaaatgaagcaggagttacacttttgatatctgaaaatgtaaaattcaggccagaaaacattaactaagacaaagaagtacacttcttgaagctaaagtctgcaattcataacaaatgacacaatagcaacggttacagaggagatactacaggaaatggaagggaaaatagagacactctaatatcaggagactttaccacatctttttatgaaataggtaaataagtggacaaaaaatgataaaaatatagaaaacacaaacaaaaaattaataagcaactggatagcaatatattattttcctctaaattaaagaatattccttgttcagtgcacttgtatatttataaaaactaactggactagaccacaagtaaagcctcaacaaattccagaaagtaaaataattcaagtaagattttccaatcaaaatttaataaaactagaaatctgtaagaaaatacaaattttttagaagataacaaccctgtaaaaattttaagttttctggctggacgcagtggctctagcctgtaatcccagcactttgggaggccgaggtgggtggatcacaaggtcaggagatcaagaccatcctggctaacacggtgaaaaccaatctctactaaaaatacaaaaaaattagccaggcgtggtggcaggcacttgtagtcccagctactggttaggctgaggcagaatggcgtgaacccgggaggcggagcttgcagtgagctgagatcacgccactgcactccagcctgggtgacagagcgagactccgtctcaaaaaaaaaaaaaaaaaaaaaagtttttaaactttctgtgaaacaactcttggatcaaagaggaaacataaaacaaagctgcaaaatttataggaagtaatagcaaacacataaagtaaatctatggaaaactgttaaagtagtaaattttctgaggaaaatttatatcctttaataactatatcaaagatgataaaataaataaattaaaattttaaccccaaagctaaaagtgctcaacaaagtaaaccaaaagacaaaaggaaaaattaacaaagataaaattagaagtaaattagaaaagagaaaaacaatagaaagagaatcagagaaatgaataaattgattatttgaaaaaataaaacctagacaactaaatttagtaaaggaaaggcaccaattaaataagcataataaaggagaaattatccaatgaaacagagaaaaacttttaaaaatcactattgtgcaactatataataatactaaaaacttagataaaattaaaactgtttaggaacatataatgacccaacctaaccccagtggtaaaggaagtctaaacaaatcagttattgcagacaaaacagaatcttgagggttttcctcaatgaaaagacagggactactagatgatttcatagggaattctaccaagcttttaaagtttagataccaacttttcttaaagtgctccagatagaaaaagaagggaaacttccagatttctagttctataaacatgatattcatatcaacctctgataatgattgtaaaaaaataaaccaatatatcatacttactaatgttgatcaaaaaatctcaaaagcaataataaatagaatctatcagcatattaaaaaagtacataatatccaagtgtagttcactgaaaaatataaagatggttaatataatcatctccatgaatatggaaaatacattagacaatattaaacacctatttctcattttaaaaaattcaataaaataagaattaatagtttatcagtccattcttgcattgctataaatacctgagactggataatttataaataaaataggttttattggctcactgttctgtaggctgtacaggaagcatgaagctggcttggctcctggggaggcttcaggaaatacatcatggaggaagcaggagagggagcaggcactacttacatggcaggagtaggcgtaagagagagagagggaggaggaaggtgttacacacttttaaacaaatctcatgagaactcactatcataagaacagcaccgagggggtggtgttaaaccattcaggaaagatctacccccatgatccaatcacctcccaccaggccccacctccaacattggggattacactgtcacatgagatttgggcagggacacagatccaaaccgtatcaaattggttcttttaaaatatgaaatatggcagtgcatggtgctcatgcctgtaatccctgcactttgggaggccaaggtgggtggattgcttgatgccaggagttcaagaccagcctggccaatatggcgaaaccctgtttctactgaaaatacagaaatgttagctgggagtaatgatttgtgcctgtagtcccagctgctcaggaggctgctgtgggacaatcacctgagcccgaggtggtcaaggccgcagtgagctgtgatcatgccatcgctctccagcctggatgacagcagagcaagaccctgtctcaaaaaaaaaaaaaaaaggaaaagaaaaaagaaagaaatatgtatttcttagcacgaaagacagtttcttactaaatgaagcactaagtcctgctaacatcaggtattgttgtggcattaaagaacaagaaggaaacatggatgaatagctttataatctttaagtagaaaaaaaactgtctcaaaattcagaagtcatggagaaaatatcaatatataatatgatatgttaaaaattctatgcatggcaaaaacaaaaggaaaacagcacaagggaaatacatgtatgcattttttaccaaaaaaaatctaatatttaaaaattcccaagatggaaaaagagatcgacaatcctacagcaaaatgggcaaaatatatgagcaaatatttcacagaagacatgaaaatgactcttaaacacacaaaaatgtactcaaatatacttaatataacagcaatgcaaactaaaattctccaggatatgcttcttacattgcagactgacaaaattcaaagttcactgccttctcaattgataagactgtgaggaaacagacactctgttatatattgttattgagaatgcaaataaaacaacttctatggagaggaattcggtaacaggtagcaaaattacatatacatttatcctttacttagcaatttcatttctaagaatctaccttaacatacatttaggtataatatggtaaaaatatgaaataatttgttcacatgaaatgaaatgatttaaagttattcactctgttattatttgtagtagcaaaatataagaaattaatgtctgccaagagaggactggttgaataaattattattcatctgtacagttgaacactatgcagatgtcaaaggcaaatttatagagacagaaaatcgattagtgggactggggatggcaaaatggattaactgtaaaagggaattagagatcttattgggtgatgaaaatgtcctaaaactggattaagaatgtgcaacttagtaatttactaaaaatcatccaattgtatatttaaagtgggtcaagtttatggtttataaattgtaactcaatataacatccataggctaagatagaatgatctcttgcatatattaagtgaaaaaagcaagaagaagaatgggatgtagagcatatagatttccatcgcttttagatatttttaatgaacagggcaaggaaatatgtacttttgaaaaatgaaaactatcatgaattcatattgacacttccagtgtaaatttaacattaaagaatttgtactttcactttacggtttttaaattagagcatgagatctaccctcttagcaacttttaaaagtgaacagtacagtatcgtttagtataagcccattattgcacagcagatctctagaacttttttgtcttccatgagtgaaactttatactcattgaacagcaactcaccacttcccctttcccccagcccctggcaaccaccattctactttctgcttcaacgagttttactacttcagatgcctcatataaatgtattcatgtaatatttgtccttctttgatcatcttatttcaccttgatgggctaaatttagcatttcttataaggtaggtctagtgatgatgacctcccttgcttttgcttttctgggaaagtcttcttctccttcatttttggaggaaggttttgccagatacagtattcatggttggcagcttttttctttcagcactttgaatatatcatctcattctcttctggcctggaggtttctgcttaaaaaaaatccactgaccatcttatgaagttcccttgtatgtgatgaaccttttttttttttttttttttttttttttttttttttttttttgctgctttcaaaattctgtctttagacttttgacaatttgattataatgtgtctcattgtagatttcttaacatttaactcattttgtacttgttgggcttcttgaatctggacggctatttccttccccagatttgtgatgtttctggtcgttatttttttaaataaattttctgccactttctctgtcttttcttctaggcatcccatcatatgaatattgatcctcttgagagtatcccctaagttcctcaggcttttttcactctttttcaatgtaatatgcttcctctttagggtcagcttttggagatttattttgttccttttattgggccatttcctcatttcttcatgttttttgtaactttgttttggcatccacacattttcagagactctgtctctgaaaaaaaaaaaaaaattaaaattaattttattttatttaattaatttatttatttatttttactggtaatttggaggttttacttattggaaagagttctttcaagagaactttttttgcaagaccaagaaaattatgtattttcctttggtaaattacaatttacattggcacaataaacacctggtaactaatctattttattctacgactattaggaaaaacgttttttattctcacaaattcaattgagcctttgttttacttctaaaactttaaggaaggtttagtctaccagttataaaaatgaaaaccagttaaaattgtaacataaacattatttatattagtttataaaaatacatttgagtttaggaaaagttaatgttgaacaactagtaatttttacttcagtttattaggcataatgattccttgatttttcaaagctgactctgtctccttgattaacaatgtcaatttaggccttacaggaagaaatttaaggatcatttcattgatctgtttccaactaggtaagttactttctaaaataaattaatctttatatgtaccattgatagctttaaaaagtaccgttctaacttttttgaagattcttttgtgacaattatattactatagtacattaatttgctctatatgatattttggttcctttaagaatttgtatattaaaactgtcattggtctggagacatacctgcaggtggatcaggccataactgaagtagcaaataaagttagttgatctgacatatttggaactaactgataaactcatgtaaaagctaaaaatccaacataatcatcaaagccactaaatgacatatattaggaaaataatttaaaacctttatttctaaaaagggcattttaaaaataattatacatatatattttgtaaatggctttggaaacatatgtgttgcataatcataaaatta

SEQ ID NO: 96924 - DNA, 18038 bp, Homo sapiens
ccatacccagccgttaataactttttttttttttttttttgagacggaggcttgctctgtcgcccaggctggagtgcaatggcgtgatctcggcttactgcaagctccgcctccggggttcaagtgattctactacttcagcctcccgagtagctgggattacaggcacgcgccaccaggcccgggtaatttttgtatttttagtagagacggggttttaccatgttggccaggatggtcttgaactcctgacctcaggtgatccgcccatcttggcctcccaaagtgctggaattacaggcatgagccactgtacccggcctaattctactttaattacttttaaacactatttgattattgaaaaactttttagcatacttggaacaagttgggagtgtgaatccacttttcaagatgtgaattttacaaaatctacatcaaagatcaaataggccaggcacggtggctcatgcctgtaatcccagcactttgggaagcggaagtgggcagatcacctgaggtcaagagttcatgaccagcctggccaacatggtgaaaacctgtctctactaaaaatacaaaaattagccgggcgtgagggtgggcgctgtaatcccagctactcgggaggctgaggcaggagaatcacttgaacccaggaggcagaggttgcagcaagccgagaccgcgccattgcactccagcctgggcgacaagagcaaaactctgtctaaaaaaaaaaaaaaggatcatataattccatgaaaatggagcttccttgaaactgagatgtgctgtaagtgtaaaatatacactagatttcaaagaccggtgtttagaattggtgattatacttagagattatgtcactgatgatggtgctgatggtgatggtggtgataatggtggtcacggtgatgataatgaaggtggtcatgatggtgatggttgtgagaatggtgagatggcacaattgtgatgatggtgatggtgatggtgaggatggtgatgatgatgatggtggtgatggtgaggatggtggtgatgatggtgaaggtggtggtgatgataatggtgatggtaatgatggtggtgatggtgatgatggtggtgatgacggtgatgatggtgatggtgagggtggtaatggtggtcctggtgatgatgatgttgaaggtggtgatggtgatacgggtgatcatgaggaagatggcagtgataattacgatggtgatgagaaaaatagtgtgaaatatctcattaatgaattttggctgggcatggtgactcacacctgtaatcccagcactttgggaggccgcggcgggtggatcacctgaggtcaggagtttgagacgaggctggccaacatggcaaaaccctgtctctactaaaaatacaaaaattagccgggcgtggtggcaggtgcctataatcccagctactcgggaggctgaggcgggagaatcgcttgaaccccgcagaggccaggctcttggcaggcactcatgaataccagctgatcaaatggatggaggcacagaccctggtctccaggtttctccagggtaaatatccacagacaggggttctggcaccttggccatgatggctctctctcctgaaggcacttgagcaggctaagtcctcttagcaccccatacccataagccaacatggcctgtctgggggagcctggatggaacagagcagaaaagggccttcacctcccttacactagactctatatttctactaatgcagcctcatatagatcaacccttgtgaccatgctttaattacagcatcttgggttagaagagctagaaacccactcagaggcacttcaggcaaaagaggcaaatatatgggcaggaataggctacttcattaaaatctagggcagcctggagggctggcaggcctctcaagagaccacactggaaactcttcaaagccatctgggctagcagctgtgtctggctgcctctgtcttcacaccacaatgaaaggcagccaatagcttactcctactggaggctccagtcccaggacaggatctgattggctcagctgtgcacctctagcccaatcagttgtgactgggaggcagggctatacagcacaaatgtgcagctgaatgaactccatcactgcaggtgaacaaggcaattttccaaggacccctccaaggcagaagtcatcctgaatggcctactctccaggggtgacattgaaaatactgagcagttgccatggctggatcctgagccaccataattgacatgggccattgcactcaggccgggcatggcccccaaggcactgggtgcccccttccaacctgttggttgtgagttgtgaacaccggccccaccctcagcctcccagctcccaacacttctgaagcctggccccttgccccacacagagccagacccaagctacattcatgcctgcactcttaccagcccctgtgcactgtacttctgggtccaagctcattccagagcctgcttctgcccccggctggagccccagggctggccacgatgacagcaactgccatggccccttccctcccaggaggctcgggagccacctcttgaggtgagtggtgacaggtgctgctgtgctgaagtcaggaaggaagcccccatcctgaggtggtctctgggagcatctcatgaccatgggcctaaccttggcccctggcatggctccaggagtccagcgcagtaccctgtggttccggctggtgcgtgggcaggtggcaggagagaagaaatgctggagtcgccttggcattttgaaggccttggagacgcttctggcagcatcctgtccatcagcttatctatggaaggcagggaccgggccaaacggttgcaccagcagccagatgtggagcagttgcttgtggttaagtgccgctaacgctgcctctctgagaccagctgtttccttattctcaatgggagacagagtggggagccgccacgtcaccaggggaggtgacagctccctcctacctgacaaacggttacgatgtcaaggatttgcaaggtccccttactgcagatggtcctaaggagaggatgcgtctgtaattcatgctcccattacagctctaacattttacattttccctctttcatacgtagccgacttctatttggtttgtgttccactatgactcccagatcactttctgccccctttgagaaaagccaggatccccatcttgattagaacagaatggaatattacagctgaagagactcccaagcaagggtcgccacgcagagctgtgccagctaaggcctgcacaagggttcctggccaagggagcagcgggggctgagatccccgtggctccacttgtcaagccgtttttcacaaaggtgccttatgagctaactgccctgctggaggttgtctggtcccaggggccttcaaactcttttgtccaaaacccacagtgcgaaatacgccttttcaagacgttctattttcaaaaaattcaaacatccagagaagttgaatctcatttacccctcagactctatcttaatgttctacactgttctttttgttgttgttgttgagatggagtctcgctgtcaccaggctgcagtgcagtggcaggatctcagttcattacaacctccacctcccgggttcaagcgattctcctgcctcagcctcccgactagctgggattacagatgcccgccaccacacccagctaatttttgtatttttggtagagatggggttttaccatgttggccaggctggtctcgaactcctgacctcagatgatccacccgcctcggcctcgcaaagtgctgggattacaggtgtgagtcactgcgcccagcctgtccatcttatttgatgcattttaaagtgtcagacatctgttattcctaaacacttctgcatgcatgtcattgactagagttcgatatttgctgataatttggcttttaaataaatttacataccataaaatacacaaatcttaagctaccctcagattttgataaattcatacacttatgtgacccaaacctgtcatgatctagaccatttctatcaccctagaaaattgcctcgtgctccttccaagtcagttcctgccccaacctgcaactagttttgactgaagaaatacattgtttgtttaatgtgtggtgtggccaggtgtggtggctcacgcctgtagccccagctacttgggaggccgaggcagggagatcgcttcagtccaggagttcgagaccagcctgggtaacatggtgagatgccgtctctacaaaaaaacaaaaacaaaaaacaaacatttagccacgcgtggtggctcacgcctgtagccccagctacttgggaggccaaggcagggggattcctttagcccaggagtggaggctaagctacttcactccagcctgggtgatcaaaaaaaaaaaaaaaaaaagcacgtgtaccaaaacaaaacttttcaacaaaacgtagctttaaaaaatgtgggtctcagtcttccatatttatttcttgacccactaaaaatttgctaccagctgcttgcaaaacacaggtctaggtgctgatcccttatatacagatggaaaacaaatgcctcaccacgccctccccatccccccacttatgaacgtcctcacttttgaggtgttttgttttggagatggagtctcgctctgttgcccaggctgctggagtgtagtggcgggatcctgagtagcagagattacaggtgcctgccatcacgtccggctaatttttgtatttattgtagagacggggttttgccatgttggccaggctggtcttgaactcctgacctcaagtgatccgcccgcctcgacttcccaaagtgctgggattacaggcgtgagccaccgtgcaggccacctttgaggtattttgcaagcaccagttgcatcatcaaaccggtttctattcctttaacttaaaaaaaaataggcacaattcacgctttttacagaaaacttggaaaatgggaaaacagaagccctcctctgagccctggccgcctccacccgcgtccccttccctcgcaggcctccaggccccggcggcccgcattgctttgcgggggacttccgcagcgctgcgcctggccctgcttattggcgtctctggaaggagtggctgtggctcgggctctccagataaaccgcgctctaggccgtttcccagataggagcgctataggttttaagaactaaaactttaaaatctcagccctcagccatgctaaaggcagtttcttttctttccttttttttttttttttttttttttgagacggagtttctcgctctttcgctcaggctgaagtgcagtggcgccatttcgcctcccgggttcaagcgattctgctgcctcagccccccaagcagttggaattacaggcgcccgccaccacgcctggctaatttttgtatttttagtagagagggggttttaccatgttggtcaggctggtctcgaactcctgacctcaggtgatccgcccgcctcggcctttcaaagtgctgggattacaggcgtgaaccatcgcgcccggccccttttcttcgtttccatgtaatagcttgattgagaaataattcacatatcaaatccacccttttaaaaagcgagcaacgcggatcgcggaggccacgcctgtgatcgcagcgctttgggagggggcagttccaagagagcggatcactgaaccggggagttcgagaccacccggcaacgtaatctccgcctcgatagaaatagttttttttttttttttgagacggagtctcgctgtcgcccaggctggagtgcagtggcgcgatctcggctcactgcaggctccgccccacggggttcacgccattctcaggcctcagccttttgagtagctgggaccacaggtgcccaccaccacgcccggctaattttttgtatttttagtagagacggggtttcaccgtgttagccaggatggtctcgatctcctgacctcatgatccgcccgcctcggcctcccaaagtactgggattacaggcgtgagccaccgcgcccagccagaaatagttttaaaaaaagaaataaggagcgygcggcccgcgggggaagcgcctttaccagctcgagcctgcagccccccaggccgcgccgtcctcggctcccccgggcagcgccggggttttgtcaggcgcgcgctgctgtttgcctggattgcgctcattctgaccctgaagccagcggccccactgacacgccctgaaaagtgggagccacacgcgggatccggagaccgcgctaaagtcccacgcacgacggcgcccgccggcgagtccacgcccgcasgtcggcgcatgcgcgcggccaagccggtgcccgcgcccaccagcgcgcatgcgcgccccgtcccytccctccccccgtgctctgccccgatggttcggtccgcgccgggggcggggccagggcgcccgcgggaaatttggcgggaaccgcgcccgcctcttcctcccttccttctttccttgctttcgccgcgcactccgccgccatggagcagcgccgcgtcaccgacttcttcgcgcgccgccgccccgggcccccccgcatcgcgccgcccaagctggcctgccgcacccccagccccgccaggcccgcactccgcgccccggcctccgctaccagtggcagccgcaagcgcgcccgcccgcccgccgcccccggacgcgaccaggccaggccaccggcccgcaggagactgcggctgtcggtggacgaggtgaggggcgtggggagactgaggccggggagttgggggcggggagactgaggcccggggggcagggctcggggaaactgaggcggagggacgggggcggggaaacaggcgggggggacggggcgcagggaactctgggacaggccgggggatcctgggggcgccctgccaccactggggacttggctggctcctgagatgagcaggaggcactggggggcttgcaccgggatccgatgatggggctggaagtccagcttctctgcgaggccagggcaggggtccgacctggaaacggccccggaagacgagagcaaggctgtgtccccggccttagcacagaccaccatctacgggaagtcctaagccccccagccatgcccgtcccagttaactcagagcggcttctgatccttcggggtcctctgcagagccaggagcaccaggtcttgtcatgagttcacccttggggtccctcccaccaggtttccagccccagyacccccgaggccccagacatcccagcctgcccttctccgggccagaagataaagaaatccaccccggcagcaggtcagccgccccacctgacatccgcgcaggaccaggtgaggggcggggcctggggcagatgcgggagggctgagtggtgccsgcctgcctgcctgcctgacggcaccgtgtcccctgatccccctgaaggacaccatctctgagcttgcgtcatgcctgcaacgggcccgggagctgggggyaagagtccgggcgctgaaggccagtgcccargatgctggggagtcctgcaccccagaggccgagggccgccctgaggagccatggtgagtgctgggtgggcggccacgaggccccggcaaaggccgggttggtggcaggcgtggcccagcgagcctgtcagaggcccaggtctgctccttccagggagggtggtggtgaggtcaccagggcgcggacccagacccctgagaaaaaggtcccgggcactgctggcgctgtgccctcagtccctcctgcggggggcagctcctgcctcggggactctggcaggtttcaaatgctcctgatgcattggtgtgttgtctgcctctgcccctgagagctgacgaaactgcgctggggagagggcagagcttccctgggggagctgcgtggacacagcagagctggggtgtggagccgggctttcccgtcaccactgctacccctaacggtgccagtgctggtgggtgtgcaagggccgcgaaagccatcgtgtgtggcatggcaggccccatcggagggtctccctggccgaggggcctgctgtggcgttggaggggtaggggcctactgcttctcatgaggctcctccctccctgacagtggcgagaaggcgcccgcctaccagygcttccatgccctggcccagcccggcctgccgggrctcgtgctgccctacaagtaccaggtgctggcggagatgttccgcagcatggacaccatcgtgggcatgctccacaaccgctccgagacgcccacctttgccaaggtccagcggggcgtccaggacatgatgcgtaggtgagtggccgggggtgggctgtggctgtcctggagttgggggtgggcccgggcctgcctcctgagccgcccccatcctcccataggcgttttgaggagygcaatgttggccagatcaaaaccgtgtacccggcctcctaccgcttccgccaggagcgcagtgtccccaccttcaaggatggcrccaggaggtcagattaccagctcaccatcgagccactgctggagcagggtgagtgctgggtgcgggacctcggtttccccatctgtgagccgcacagtttccagggtgggtgtgaggtgctgggcatctggcccaggactggtcacgggtgggtggctgggtggcctggtggggacttaggcctggactcgtcccacagaggctgacggagcagccccccagctcacggcctcgcgcctcctgcagcgacggcagatcttcagccagaagctggtggagcaygtcaaggagcaccacaaggtgagcggccccyggccccgctgtgtgaagatggtggcaccagcactgcctcagcacctaaccctgtgcttggagcatccctgccactcacagcttctcccgggatggaactgggctgggttcaccctgagctgagggctggtgtgctcagggtgcagccgcaggcactgaggaggtccccaaggcgttcagcgagcgcggaccatgggaggccttgtgctctccctccaagctgagcactgggcagaggctgagtgacttgcccgaggcggcccggctgggacgtaagcacaggcctacctcacaygcagtctgcccttgtctcagatgtgcccagggtcacccatctactccttctccccaggccttcctggcctccctgagccccgccatggtggtgccggaggaccagctgacccgctggcacccgcgcttcaacgtggatgaagtacccgacatcgagccggccgcgctgccccagccacccgccacggagaagctcaccactgctcaggaggtgctggcccgggcccgcaacctgatttcacccagggtgagactgcgaggcttgggcagcccatttctcccgggtgggtgggccagcctgaccccaggcttaagaggtggaagccttggtgatgagcttgacgcctcatctggcttcctccttggctggcggatccagagagttggtggcatttgccctctgtcyccagctgcagcctctaagcctggctctgccactagccccatgtggggagttggcctgggcaggcgatgctgcacactgggacactgcattgaccggcacagaccacccagtgtgctgggtgaacttgtgccttgagagataccggggactcctgggcagacagccaggggcacgttgcatcttgtgacctctccagtccaacctgtccctcccgcagatggagaaggccttgagtcaattggccctgcgctctgctgcgcccagcagccccgggtctcccaggccagcactgccggctaccccaccagccaccccgcctgcagcctctcccagtgctctgaagggggtgtcccaggatctgctggagcgggtgagtcgtccccagtgatggcgggtrggcgcctggtgacctgctgcccactaacyaggtcccggtacctgctgcagatccgagccaaggaggcacagaagcagctggcacagatgacgcggtgcccggagcaggagcagcggctgcagcgcttagaacggctgcctgmgctggcccgygtgctgcggagcgtctttgtgtccgaacgcaagcctgcgctcagcatggaggtggcctgtgccaggatggtgggcagctgttgtactatcatgagccctggtacgtgcagggcggggtgaaggggcgtgcagggtggaattgcctggtgctgcagctgcctccccagctttctgagcagaggtgtctgtcactgatctgttctgttcagatgtgcagtgggcgctggcctcttgcactggtgtgtcctgggcgctctgccctccttggagccacccctgagcctccgcccggcccctccacacctgcagcctctggaggcagcttccccctcacagctctgrccctttccctgaccacctgcagtccttggtcagaaggggccccacatgcaccctccactgcctcccaggcctctggtgaccaggccctgagcacataggggtcctgacgctacagggcacctcctgcctcagggctttcatgggctggcggcctccatgctcggtgcctcctcacagggcctcaactgtaggcctggctctctccggtcactgttcacaccacccagacctgggcctctgatcagaaccacctctgccctaagtcctggtgatggggccctgagggcgaccaggcaggcacagaggttgggtggtcaggctggtttcaagtgctgcccgtgcagggctggggcccagcaccagcctcagtgtcctcctctcctcccccaggggaaatggagaagcacctgctkctcctctccgagctgctgccggactggctcagcctccaccgcatccgcaccgacacctacgtcaagctggacaaggccgcggacctsgcccacatcactgcacgcctggyccaccagacacgtgctgaggaggggctgtgagcctgsgggccactgtggacagacgtgggcttcagaagctcgstggcctgggcccaccagcattttcttttatgaacatgatacactttggycttcctttccccagcgcccctgagggccagaggcagatgtgggctgcaggctgcacagcccgagggtctctggctgcgggcggtgggccccttcatggggctcacctgrtggattcacattaaaccggtttctgtgggcacctctgtccttgctgctggtggggaagggaagccagatccagcaccccctggggggccatcgggagtgtggctgggggtgaagggggctctgtggcaatatggggttgggtagtgtgggtggcaggccatcccctctaatcttggaacctctgaatatgggacctcccacagcaaagggtgacttttgtcattaagaaagactggggtgggtgtggtggctcacgcctgtaaccccagcactttgggaggccaaggtgggcagatcacgaggtcaagagatcgagaccatcctggcgaacatggtgaaaccccatctctactaaaaatacaaaaaattagccgggtgtggtggtgggcacctgtcgtcccagctactagggaggctgaggcaggagaatggtgtgaacccaggaggcacagcttgcagtgagcgaagatcgcaccactgcaygcactccagcctgggtgacagagcgagactccgtctcaaaaaaaaaaatttcaagactggagaggtgatcctgaattgtccagctacgccccatgtcatcacagggccttcatgacagggccagagccagccagctttgaagacgcggccctgccccgacacaggcagcctggagaagctgggcaggacaagtaggacatccctggagcctccagaagggactggcctctgcccacaccttgacytcagtatttctgacctcctaaactctaataaagtcatgcttacagccactagatctgcagaagagccctcgcttgctcccctagaagatgggcccacatggcctcttcctgcagtgcctggagggttctagctcctgaggtgagaaccaggacaggttctgctgggcatcacgccaagcagcacatgcccacagtacagctgaagtctggtgttgtcctggggctccctgccctggggaacaggaggacaggagacggctcttgtgggaaagctgtttactgcgttctcccgctgtgtgtaattgggttcagtgtggctgaaacacagctttgccccaggctttggcacttccagccccaggagaggcgctgaaccccagcaaaggaatgtgttccctgtgggcagccggtgcccctggtcactgcagttgcccaaggctgatatttccctgggatccagctggagatgttgggctgggaggccctgtggtcactcatactgcaggagagagaagaagggtacaggtgccagcttctccctgcccttaagcgaggtcagctccaccaggctcacgcactccaggacctcagcctgcaggcggcccagcagctcacaggcagcgttcatggttcctggggatgggagggtgaggtccccagttggcctgggctgcagagagcaggtgctccaggccagcccctgggttggggaggggaaggcatggggagaggaaggtgtcggcctggccaccaggcaccctctggacaacagtaagctgcatcccatgtcacacagcgaggtcctgtcccactcccaccaggcccttggagccacagcagttggctgcggggagacccttaccaccagtggccagcagatcatccacgacgaccaccctctgtcctggctccagggcgtctttctgaatctccagctcagcctggagtgggaagtggtgtgtggtcctcagcctcccgcagaaaacagctttgttgcacagcttggcagctgccaccctagaccctgactccaaccccaccttgctgttacctggctgtgtgagcccagcctatgtctcaacctctctgagctcccaaggccactgtaaccacagcagctccacttgacacgcctgggaaggccttttagaactgggggagagtggccacggtggcctggccctgcccttcctctggccaccccagccctcttaccttcccgtactccagggaataggaggcccacagagtggggcctggcagcttcccccgctttcggatgagcacgcagcccagtccaagctcctgggccagggaggggccaaagaggaagcctcgggagtctaggcctgtcagggtaagtgacaggagtgactcggcagcatgggaatccccaggggccagggttggccggtggcaaggggtacctggttggctcccagctgaaaggccagtgacatgcaccatttaaggaatgttacccatcacctacccggagctgcttccaggtcagagtgcagacctgggtctgtcttttaagggaccacttcttagctgtgtgttcctaggggagtcaccacccctctctctgagctgagcagcccatctgtaactgggctggtagaaacctgacaggcctcagcttactctcaaaggcagctctgcaccagggcttctgtctaaaaagggagtctctcgaggtggcctgagctgtgatggttgggggacgctcagggaaaccctgccccggcctggcaggaggtcagggagggcttcctgcaggaggtgagaagggagctctggcagtgttgtggctccagcaagagctggcgctttcctcagggcagtgtccagggagtgggctgtcacaccctaggagaggcaagacggccaggaacactctgttctccctgggccacctcttgggctctcccggaggcctccaggcctcccttccctgggtgggcattccgtgatcttcaccagggaaggcctggctcgtggcaggcgctcaataccagctcgcagaaggaacaagaagcaaggcagctgggccctgtggattcagcttgggcactccagggagaccaactgacccggcaactcggtcacgcctgtcctgggctggggacccggaacctgcgggaaggacgcctgcacagcgcggcggcctcgggggctcaatctcacaacccttcccgggcgacccaagcacggcgcccgtcccggcgccccctgaagcaccccaaaggccctcccccaagcagacgcgcagagcccacgtgctgccctcggcgcgcgcagaggcggaagcgccctagatgcggccactgggcactcgcctgcgatgtagtcgatgcggcccccgtgggtcgccttcaggtgtcgcgccaggaggccgatggcggcgcggaaggaggcggggtccttcaggacgggcgagatgtccctggacccaaggacaggcctggtgacgccggggccgaaggagggcagggccccgggggcgaaagacgagggttcccgccccgcccgcccggaggtcgcgggccacgcgctcccatccgtaggcccgcaggtcggggcgccacgagggcggcctgtgcgtgcacctgaataccacgcctggggtggggaagtcggggaagctgcggatccgctgctcaaccagctgcagctcggagtcggccatggccgcgtgcgaagagccagcggcagcccgagcgcgcctgcgcggggacgggcgggaccgccacgaggggtggggcatccccggagggcggagcgtgggtgaggggcggggcatccgtcgccggaagcctgtaccgtatttcatggactcctaggcgccatcgattttaagacgcgctcgcattccacgcaccactgagcagaacgttcgaaccggacaaaagtgcgagtcaaggcgcccttccttgtctcgggctacgcttctgactgcagccaggcagctgtgggccggggccttggcggctggaggaggggcgtgagctggtctcgcccacgcacctggcgcgcgtacgggccgcgccctttctcctttattggccgagatccccacgctgcgcgcgggaggctggcgcgcggggtggagaagggcgtgaggaagcggtccaagtagcaggagggcggtgcagggcccggagggagcagcccagggcggaggcggcgggcctgggctggaccggccgggggcgctggcctctcgcggatgggccctgccgttgaggcggctcttccccgcccggacccgggggagggaggccggaaggtgtggccaggccagggcgcgcatccgcgagggcagaagcccttctgtccgcctgcagaggccaggtgaccccttagccttggggtggggagctgtgaaccccctggccgcccgaggactggtacccagggggttgtgtgaggcataactccccccaaacacaatttcctttcaagaaaatccccagagctaaaatgccttgtgctctattccaagacttttcttcatttcgcaacttttttttgagaaggactctcgctctgtcgcccaggatggagcacagtggcgccatctgggctcactgcaagctccacctcctgggttccggccattctcccgcctcagcctcccgagtagctgggactacaggagcccgccaccacgccctgctaattttttgtatttttagtagagacgcagtttcactgtgttagccaggatggtctcgatctcctgaccccgtgatctgcccgcttcggcctcccaaagtgccgggattacaggcgtgagccaccgcgcccggcccatcatttcgcaacttttacaattcagctttggcctggcagttactgcagaagggaaaacccactcagtggaaggcagcccccaggagccttcggagggggaggccggaggctgcatgcggctgctggggccccggttccagggcgggtgggggacccatcgtctgatgccaaggggcgtggtaggggcggctgcctcgcagtgtgcggtggtcagggctggcaaggcctggggcctgggctccagacccctagggaaggtggaaatggaggaccctgacatcctcacgtccccggggaagctgccacatgagccggccccaccggtccaagtgtgtgagctacacttcagccgtccacgtccagcccaggaggcctccgccttccccttccttgttcctgattctgtctcccagatggcccgaggggggcctgggaaggcgtggggtgggggggtactggaggaggggcctggggagggttcaacacagaattggccctgtggcttccttcaacccgggctgttgggctggcgtgggaacagcaaggagccccgagtcctgcccttcaacaaccaatgtggcgctggcctctggaggaggccggccgggaggcagcgggagctgggcacctgattcttggcagctgctgagaaggtgtgaaaggaaaataaatctccggaccccaaaatcactcagccaagagaaaaatcaagctgggaattaggcaaacctgcctcccgttttatttctaaataacatagttacaatgataagaagctacacgcctccctcataattagcgtccagggaaattccttgtggacaaaggacagacggaactggaagtcatccctctggggctcccctgagacaaacgcttatatgattgccccgttcccttactgtttacataaaaatgcggattcactgggccagactcaatcgtgtattcagtggaaggctgactgaaccaatgtacgccatacacatactgatcttgtgtctccctaagatgtataaaggcaaactgtatccccagccacctcaggcacctgttgtcaggacctcctgaggctgtcacaggtgcatccttaaccttggcaaaataaactgagactggtctcagatatttggggttcacaaaggcgtgagacggcagggtcctgaggtctgaggcgccgtgggcgaggaggagggtcctgaaatctgaggcgccgtgggcgaggaggagggccaagcacacgccagggtcaggtcctgggcaggtggaattgtgcagtccccctgcgtctgcaggtgctgtctgtctggcttgggcagggttgggggaggaccgaggccagagccatccttcctccaggcacttgcagggccaaccggagattctaggcctggcctgagtctgcgcaggtgctagtgggaccagaggcacttcttgggaatggattctggaggtgtcagacacttccctaacttttcacagcccggaggtgcccagttctgggaaatgaaaattgagaaaaagaacatgcagttattcaagctcttctggacccagcagcagcgggcattttgttgttgctgttctgagacagtctcactctgtcacccaggctggagttcagtggcgcgatcttggctcactgcaacctctgccttccgggttcaagagattctcctgcctcagcctcctgagtgagtagctgctgggattacaggcacgcgccaccacgcctggctaatttttgtatttttagtagagacggagtttcaccatcttgaccaggctggtcttgaactcctgacctcgtgatccacctgccttggcctcccaaggtgctgggattacaggtgtgagccaccacgcccaaccatttttgtatttttggtagagacaagggttccccaagttggccaggctggtctcaaacttctgacctcaggtgatccacctgccttggcctcccaaagtgctgggattataggcgtgagccaccgcgcttggcctcgagcagttttgatgtgtcccctgcccaggtcaaccccggactcccaaccaattggcctcagtgtggggaccacctcggtccaggtgggcagctacacagacgctccccaggaatcatgggaacttgggagatggcaccctcttgactcggcctctcagctctgaaggctgccattggagaaatgagaacttggtggggaggtcccgggtatgggggatgcagct

SEQ ID NO: 96925 - DNA, 14638 bp, Homo sapiens
ttctgtatcgctctctctgtcacactctgtctctctatctctctctgtctctctttgtctctctctctccatctctccatctatctgtcttctctgtctctcttgtcagactctccatctctgtcttctctctgtctctctccatcgctcttcatctgtctctccgtcttctctttctctatctctcctgtctctccatctgtctctatctctccatctgtctttgtctccgtctgtctgtctgctctctctcctgtccgtctctctctctctctgtcatggcgtctgaaggacaagggtgaggacagtgagctgacccgcttgctcctgcttcatctgcccacatgtcccacggcgcctgcctctcctatgcagtctctctgccttcgtgggcagccctgtgaggcctcctgcctggggcacgttctgctgcttttcctctcagccccgctcctcccctcccagctccctggataaacccctccctcccaggacaagctggtcttttgggccacccaggggcgtgtttgctctgcactctcccatgaacctgcaggcgtgggaacgtttcttttccctcgtggctgttgaggtgtggttcactaactggaaacgcacacgtgtggctcagtgagtcttcacacgcatcacaggcccgcacctccagcagagtcgtgggtggggtattttttctttttgtgagagggaggggtggcgtggagggtgcactgcaggaactgaaggctccactgccatccagtttccagtgggatgtgtgtgtctgtggctgccgcgcgctcctcccagtccccaggaagtgcacagggaagcggcacctttgttcctggagagaattccgggttgtccaaggcacatgtctgaaccgcttcgctctctttgccgttcccttgccccttttctgtgaggccaccggagcccatggttttgctgctgctactgctgggataccctggggctgggcaggccccaagctgagcagggtgagcacaacgttttaccaaatctaaggaaccaagggcaagaacgaggtcagtgaaggagaggatcaggtgatttctggggtgacagaggcaatgagacctcggccatctggatctcccagcgggggtcctgtcagtggtgcctcctcgtaaagcaggggcagcagcagggaccactccgctcagaccgcaaacaaaagcgccttccctactgcccgtgaggctgcgggaaatgctgtgtgagagcgcggggactcggagttctcagggcccgtgttctcctgccaagcctgagctgaccctgtgggccaagatggctgcagttctgcgggtggttctgagccccttgggtgtgcccggccccaccccttgggtgccgcggccattcacccatgtccgcgttctgctgcagagcctgcaagctgagccggctgtagtccccggatgtgcctggccgcagcctgcagcgccgtggctgttcacccgtgatcagctccgtggtcggcagctgcacggtcactgctgttcttgagcgtggttgtgaacagcgcaggaactttgcaggggacaccgcggaccctaagcacattgtttaccctcattagctgttggacctgcttccttctaaaatacacccaacagatcgttttcaaaaaacaaagtcacgccgtagcgcagactgcagcgttggtcccgggtgtcgcacagtggtgctgtacccacggcctggggctcctgcactcgtgaaggagctgccacttttgcaagcaagggccgcgtcctgaggggctaaacctgccacctttgcacgcgagagccacgtcccaaggggctaaacctgcctttggttgtgccgcgtaggctgatggtctcaggctcagctgccctgcccctcccagtgctggagaagtggaagaacatcacgggccacaccctgctggagcggtatggcatgaccgagatcggcatggctctgtccgggcccctgaccactgccgtgcgcctgccaggtacgagcacttcccacagctgcgttcctcttccactgttctctgagccccccaaggtgggccagtctcgaaccacccacattcggactgaagggcggcatggaggatgctcccccgtgggacaggccactcggccaggagagcactcaggatgcactgcgacctgtcccctctgggtagatcagccttctcccaagtctcagtcgggtggatgggggaggtgtctgtgctggcccctggctggatgactggggagacaatgggaagaacagcaatgcctggaatgcaggcgtcagtgcatgtctcagaggaaggcggggggccatgctgttggctccagaccacatcagcagtggtggcagcctccgtctgtctggagtccgggtgccacacagcgccagcagcagtgccaggagaggtgggtgtggtgggcagggtgggatgagtcaagcacctgtcttccttctctagatgtgggctcctgataccgggcccctcttgtccagccttccctaacacatcccattctgactttcatctgacccaaccatttgagccctgggtcctccgctgggacttctgggaacagagcccacagctggggggccaccctgctgctttctgcgcagcccttccagtctgtctagagtagaagagagatctcagtgcagacttaaagtgagaccatcccgcacatctgtctgtgcagctgcttacctgcagacccagtaaaaattcacccctctggcgtgcagctctgtgtgtcttaagaaacatcatcacagtcaaaatagagaagggttcctcgcctcagaaactcccttcctagtgctcagcacctcctccacccccgaggcctggccccttgttcctgtttctcttcttgtggttttgctttttctgggaggccacgtggctaaatccttgcaggacgtggcctctgagcctgtctgcttccgcccggcttccgcccacagtcaactgcctgtgctgtgcgcgtcagagcccgcgcctttccctgctgagtggcatccgtggtgtgggtgcggcaccgcttgtgaccctgttttaagcaatgacacgtgagatgttatcaacatttgtgtgcaggtttctgtgcgaacgtggttttttatttcacctgggcagatacctaggagagagattgctgtgttgtctgaagctttcaagctgttctccagagcggctacaccatccccttccccctgcaatgggtgggaggtcacgagcacctgctgctccagcgggcggtggtggtgtctcgttgagttcatgattctctcatgatgggtggcgttgagcacctcttcctgttcgtgtcattccgttttcaactggggcctttgttttcttgagttttgagagcttttaaaattcgggacccaagtgtcagctgtgcgattttaaatatcatctcccagcttgtggtttgtcttcccattcacctaacagcgtctttaaaatcaggagttttaggttttggcccggtttatcaatttgttttgtgaattgtctgatgtcatatctaataaatccttgcgtagcccaaagtcacagagaatagtttcagctcttacgtttgggaccatgatccattttgagttaatgtttgtacatagtgcgagatacggaccacagttcttttttagtgtgtgaatgtctaactttttagcactgttcgttgaaaagactcccttctccatcgaacagccctttggatctttgttgaaagtccgtcgactcctgaggggtcggctcctgggctctgctctgtcccattgctttccgtgtgccctttggctcattccatgcctgcttggttcctgggactctagggtaagcgtggacatgggggttcaggcccaggcagggaccagctggtgccaggcagcgatacggtgctggggcctgcaaggtgagtgtgagggctggctggctgctgggctgggaggaggagagactgtaggctcacgcccctttgctgggcctggggagccatgggggctgttaggtgtattctgagtgtaaagtctcggtttggctggggcatcctgagcagaatgacagggccatggcagcgagatcctcagctgccgtgcagagctgccagtggggtggccgcacagagtgcagtgcctgctgcaacagtgcccagggcagtgggcgggtgggggcatgttgtgaaaagaagtcagtgtgagtgatgagaaatacatcctagtctcagaccccaggaaaccgccgtcagtgctggtggcccctgccctgggccggctcccgcattagtctcagaccccaggagacctccacctccgtcagtgctagcggcccctgctctgggctgactcgcgcatctccacgatggctgcggcaccagctgtttcttcggtggctaaagctctctggtggaaataagatggggaccttgaaatcaaatgtgactggtctgttgagtctctgtccttatcgttgtccttcttagtaggatgtgctggttttgtccagtgccaccggccacagtcaccacgtaatatggacggaatgagcaaagcccggctcgctgaggctgcaggctgcaggcaagtgaggactgaaagggtaacgggctctgggctttgtcctctctttgttccggacatgtgagcaggacaagttctgtgtattcagaatctgtctgcacagtttgtagttcatgatgactgttcatccacagcattgctttgtgggcgtcctctcttttgatcttctcgaaacagcccctgcgatggggtcatattttgcactcacatacaagaacccatgagcctgcccacggtcacgcggctggtgagtgatgcacttcccaggagcacggtggcctcttcgatggccctcactagagaagatggacagtgcccccctagccttttttactggaacagatacaaggctgagaagctgaaatcaggagcagcccagggaccactgtctacaccgagggagtcatgagcagcccagggaccactgtctacacccagggagtcaggagcagcccggggactgctgtctacaccgagggtgtcaggagcagcccagggaccactgtctacactgagagcgtcaggagcagcccagggaccgccgtccacaccaagagcgccaaggagcagcccagggaccgccgtccacaccgagggcgccaaggagcagatagtagcccagagacccaggggaggctcagcttccccacgctggaatcagaactcctaggcgaacaggaaggagccccagacagatggcacagggagaggagtccccggctgaggagggggatccagagaccctgaagcttcagggttattgggcaagaaacctgagtgcaccaatccccgagtcttcagctaccgacggcaggttccctcgggtgccggggatgctccctcttctctaaggcagagcccacagtaggttccctcaggcgccaaggacattccctcttctctaaggcagagcccacagcaggttccctcaggcgccagggacgttccctcttctctaaggcagagcccacggcaggttccctcgggcgccggggacgctctctcttctctaaggcagagcccacggcagattccctcgggcgccggggacgctctctcttctctaaggcagagcctgacggcaggttccctcgggcgccagggatgttccctcttctctaaggcagagcatacggcagtttccctggggcgccggggacgctccctcttctctaaggcagaatcaaatatctgtgattttatccttgcctttaaatcaccagcagtgtgagttctttggtttggaaaaaagtaagtaaagtcacctcagcattaaatccaatatgccccacaaaaactccaaaatgcagcctcctgagccatgtttctagagggcacggtggaggagagctttcctcactctcaggctctaacccccaccctggtggccatggccttgacccttgggtcggctcyagccacaggctctgagctcatgcttggcctcgctgctcagtgcactgtccgtgctcggaagagagagagagaagctgggtggagggtgagctctgtcgtgtgttatggttacrggcctgctccgtgcggttcctgtggagggagatgaataattcatggccgaccactgctgggcctcgtcacactctaattggaggttgagctcagaggtgctcacggctcctgggccactctgtggcattgacagggagctccagggcctcattggcggtttccgttccctgggtcccagtccccagtcagagttatcagggaggggctggctgacagcgattttagaggtgggctgtggcaggaaggcagtgccccccacctgcctgcagctgcgctcccatctacattggcctttgcggggccagcctctgtccactctcttgagctctcatgtccacactgtcacatgcccggggcacagcgagcggcacctggagtgtggggacccctccctcgagctctcacgggtggcacctggagtgtgggggcccctscctcaagctttcatgggtggcacctggagtgtgggggcccctccctsaagctctcacgggcggcacctggagtgtgggggccactccttgagctctcatggacaataccactgcttggctgctgcagaatccagacaccatcccagagcctcttcagcctctgcagatggtgtgggacggccacacggcctccccacctgcggcccccgcccctaccccagccgtgccgtgtccttgcgctgcgtccccgccccagtagaggcatcaccaggaagaggcgaaaggccgcctgtgatggtcctcttcttatgaaacgcccagaacagaaaaaccacggacgcggacagcagacctggtgccaggtctggggagggagggtgtggcggtcgtgggctgtgcgggagttctgactaggggaagtggggggctgtgcaatgtgtgtgcggaacaccgccgtgccgcgcactgaaatgggaagtcatgtgttatgcgggtttcacccccatttaaaaatcttcagaagcaaaacataaaggaggagaaaggatggaagaaagggggctgaagctggccccgccacaccccccatagtggtgacacgggtttctgaccagagtggaggttcggggcgtctgcatacctggaaccacagagaactcccgaggtgacactccgcacaccacrctagcccggcttcgcctgcaggaccccaggtgtggacaggcccagcaggatcagcaagaccgagccgggcaccgacagcccctcaccaagcgtctggaggccgggacgccccatggattgcagagttcactgcactgaccctcgatgctgacccttgaagtgccggaaatctcagcgtggactcagacatgataagcgttcaggcactcccctgacgcaggccagggcaaaggcctcacgccccgggatagacaggaagtcccacgtctgctctgcccctaggtcatgcccgtgctgacgccacatcgccagggccgcactccatgagcagcctctgccgtcccaccagcaacctaaaccacaggcagagcgaggctgcggcagccctgcrtgtgccggcgggacacgtctcgccacctgggctctgcccccaccccggccagtgtaagatatgattttagccacgttgagactgtgcaggtgggatggatacactgagcaaatcatgggtgtctaataaatgagccagtacaaagtgtggtccacctgccatgcagagttcaggacagcccctcctggggacatagggcagatcctgccttagcccgtcgtgtgccgggcacacacaggtcccctcatcgtggacagccccggggccatcagggcaaggcgccagccctccctggccagcaagtgtgtaaaagtgggaatgacaccagaatctgtgggcagctgtgaggctttgggaagtaactgggaaagtgatgtatgaggggcccagggcaggccaggcccagcgtgccacgtgagtgcctgctgtgccacatggccatcactgtggcatcggctgggcctgagcacaccgtgcttgccagccacgtatcgtgtggcttttcacctgctggtgcctacaccatcttctctctgggtcacagggcacgtcgctccctccacacagactcccgcacgtggcacacgggagctcagcgggatccgagctcagtgtgtgcttctctcctccaggttcctctcactccagcctccccttcagtgtttctcctctcctgtaggttccgtggggaccccactgcctggagtacaggtgcgcattgtctcagaaaacccacagagggaagcctgctcctacaccatccacgcagagggagacgagagggggaccaaggtaagccactctgctcttggcaggtgggcggccgtgtgtccagtctaggccccccasggtggttacactggtgcatctttyccctggaggcagactcccctccacgcaggggaccagccccctggacactgcaggtgctggctggtgttgcaagggcactggctggtgttctgggccytgcctgctgygtgtccgtctgtgcgttcacagagcagtgggcagagggagcccagggcggaacgccaaagggactcacacccgggcacacagctcctcccaggggccctgtccacggggacaggctgacgtgggccatgatggccttggctaagcggaagagataaagagcagaggccgttgttgttgatgggaatctggttagaaatatgaactggcctgaccctggcacccgtcctgaggggacgctgaccacaggcccccatagtaggtgtggggagattcacggggccctgcacgcggaggtgggcgcctgtgcagtgctctgtggctgcctccttgtcttgtgcgttattctaaagctgacaagggtgaacaagaacaaaggacattgtctcatttctgtgaggattttaacatgagagtctgctcatcacacgtgaactcatcacagagaaaggtttagggattatggggaaatggaatcttgatttaaaaggaaattattttctctgaagccagtatccacacctgataccacacatgattgactgtgttgccctgaggttttcaaagatcgagggatcctgagtctcatctctgtgcatttccttctctgtgacaccatcttggccctcacgggcacaactgagctccctgtgcagaggctgaggggccgtgggccttgctctcgtgagtgaacagccacacgccctccttgtaccttggtttccacacatgaccacgtgagggttggagcgatggtcgtggttggacgttttagctccagcaaccaagtaggatgtgggtggctttcagtgtcattaaatgacactgaaaggtgcagtggccgcaccttgtgtggagggccacacggcgtgtcccgcctggcctgggccccccgcagtgggctgttatcccccgtggccctgaagtgggtattctgtttccccatggaaacctctcacctggggccacctgcagtggccgcaccttgtgtggagggccgcacagtgtgtcccgcctggcctgggccacccgcagtgggctgttatccctgtggcccccacagagccatggggcaacttgctgaaacccacctgggtggctgccccttgctatacccacctcccctgccctctgtagggccccagcccatgctgttgtcctgacatgcctctcctgggattcctgcctctgccctgctggtactaggctgctggccacaccccacatctcaggttcctgaatacaccggcccttcctggctctcaagtctgtgccctgcagtgcccctgcccccaactcgaggacctcccagctcagccagttccaaccctgtctgcagggacggggctcagcctgtgcctgggttggggacaccatctagtcagaaatgtccccagcagagagcagaacgtgagtggcgtgtggaggagtgagacgccccgtggctgtgcagccctctccaggtgtcagtcagctgacactcctgcctctgagcacctgctctgccggaaatggcagaaatgttgccagagaaaggggcggagcgggggtggggagcatttctgtcttaaattaaaacaaaacttaactgcttcacacctgcattggctgccgcgccacctgattgctcctgcctgagtttctttaattatttgtgtctgctggtttcttccctgaagcagtcttgaaatagaagcagcagcctcagctacctgggcaccctgacagtcagagacaccgcacaggggcctctgcgacaggcatgcaggcagaccctgcaaggtgaagccgcacagatgctctggggctgcttaaatctcagcgtacggggggtttgcatctgctgacagcaggcccgggaacatttccagttcagccaaggagtcggtgcagcaggtggagtacagctgccctgcggggcctggctccaccaggggccaagacccttcgtggggaggagcacagcctgagggcctcagggtttgtgccctccgacacctgagattcagggctcccagaggggtgggtgggcgccccaggacaaccaggtgatgatgggcgctgtgaactctgaaaagccccagcatcagagacctgctgctctctcatgtgaagggactccccaccccacgctcacactcgcagacgcacttggtactttcatctgagtctcacgcagtagcccttctctccacagcatcccagaacccgagggtgcccctcactaccacggtcccggatccacgtggctcaagtgaggctgtggctgacagctgggctgtccgatccactcttgtctgtgccgaggcgtgggtcccggccagcgtccctccccagaaggtctccctcaggactagtcatgagaatggccatccctaggcctgtggagtgactcatgactgttcctgggcagatgatcaaccaggccttcagagctgaattaagaggcttggtgtcatatttgtcaggaaacagaaagtacctgcagaaaggaatgtgccctgtggggatgggaggacaccttcccaggatcatccccggggccagagtatctggaccctcaccaggtggcagctggcctgccaggcccagggctcagcctcctccatcacctcgctgaggggctggctcctaccactccctcacatcctgtgacatatcacaggtatcacacacacatgcagtgcgcgcacgggtatcacagatacacgcagtgtgcacacggatagcacacgtagtacgcatgggtatcacatgcagtgcacacacaggtatcacacgcacgagtgtgcacactggtatcacacacatgcagtgcatgaacgggtatcacacacatgcctagtgtgcgcatgggtatcacacacatgcctagtgtccacacaagtatcacacacacatacacattgtgtgtgcacagctgttacacacataaatacagaaaaaaagacctgatggaaaccccagaagtcaatatggctgagctccaggccggactccctgacgatgtcataggacgagggggcgcgtgtgcacactgcatatatgtgtgtgtgagacccgtttgcacactacatgtatgtgtgtgatacccctgtgcacactgcatgtgtgtgatacctgtgtgtgcactgctcatgtgtgttacccgtgcgtgcactgtgcgtatgtgtgtgatacccgtgcgtactctgcgcatgtgtgatacccgtgcacacactgagtgtatgtgtgttacctgtgcacatgctgcatgtatgtgtgtgtgttacccatctgctcactgtgtgtatgtgtgtgatacccatgcgcacactgtgtgtgtgatacccatgcatgcactgcgtgtatgtgtgtgatacctgtgcacataccatgtgtatgtgataactgtgcacgcactgcgtgtgtcacatgcgcacactgcatgtgtgtgtgtgatacccatgtgcgcactgcatatatgtgtgtgttacctgtgtgcaacactgcatgtgtatgtgacacctgtgcgcacactgcgtgtgtgtgatatttgttgaaaagactaccctttctgcattgcattgccattgccactttgccaaaaattaattggacatatttgagagggtctacatataggttatctgttctgttcccttgatctatgtttccattcctctaccgacaccacattgtcttgactgttgtggttttatagtaggtcttaacaattgtagtgtgatttcaccagctttattctttctcagagttgttttggtgcacatattaattttagaattagcttgtctagccaggcctggtggctcacacctgtaatcccaacactttgggaggccaaggtgggcagatcacctgaggtcaggagttcaagaccagcctgaccaagatgatgaaacccgtctctactaaaaatacaaaaattagccaggcatggtagtgggtgcctgtaatcccagctacttgggaggctgaggcaagagaatcacttgaaaccagaaggcggagtttgcactgagccgagatcatgccactgcactccagcctgggcaacaagagcaaaactctgtctcaaataaaaaaaaaaaaaaaagaattagcttgtctatatctacaaaaagttcttttgaggtcttgaatggaaagccaggtgtagtggctcatgcctgtattcccagcattttgggaggccaaggcaggctaatcaacttgagaccaggagctcaagaccagcctggccaacatggtaaaaccctgtctctactgaaaatacagttagccaggtgtggtggcacacgcctgtaatcccagctactcgggaggctgagtcacaagaattgtttgagcctgggaggtggaggttgaagtgagccaagactgcaccactgcactccagcctgggcaacagagtgagactgcctcaaaaaaaaaaagagagagagagagagagagatgttgattggaatttagccattctgatcggggagatcacttgggggagaattaacaattactatgctgagtcttccaatccatgaacatggtatgtctctccatttacttagatccgtgaacacggtgtgtctctccatttacttagatccgtgaacacagtgtgtctctccgtttacttagatccgtgaacctggtgtgtctctccatttacgtagatccgtgaacacggtatgtctctccatttacttagatccgcaaacacggtatatctctccatttacttagatccgtgaacacggtatgtctctccatttacatagatccgtgaacacggtatgtttctccatttacatagatctgtgaacacggtctgtctctccatttacttagatccgtgaacatggtgtgtctctccatttagatatactttggtttcttctgtgttgtattcagcatatagatgctgtacttgtgttaaatttataagtaaatgtttcttcttttctttattcctcctatttcttctcctccttttcctctcctttttaaactattgtaagtatggcaggtgggtatggggggagagttgtttgtttttttgagacagaatcttgtccttttgcccaggctggagtgtagtggtacgatctcagctcactgcaacctctacttcctgggtctaagtgattctcatgcctcagcctccccagtagctgggattacagatgtgtgccaccacacctggctgattgttgtatttttaatagaggcagggtttcaccatgttggccaggctggtctcaaactcctgacctcaagtgatctgcccgcctcggcctcccaagatgctgagattacaggcatgagcctctgcacacagtcacgtttttgttgctgttgttagttttcaactgttcattgctagtaggtagaaatagaattgatttttgtgtgttggcctcaaatactttagttgttaccttgctaaattaacttactagttttaggagattttaatagacttcttgggaatttctacaaatacaatcatgttttctgcaaatacaaacagttttatttcttcctttccaacctgtatgaccaaagccctgactaggacttccaatacgatactgaacagaagcagtccgagtggaccttcttatttctgatcttagggaaaggattcagtctttcagcaagtgtgttagttactggctttttgcagattccattctatctataatgtgcttagactttttatcactaaatgtatgttgaatattttcaaaaagtttttcggtattgatggactttattaggctgttaatatggtagattacattgaaccaagctttcattcccaggacaaaccccacttggtcctggtgggtcatttttttatatatagtactggatttgatttgctagcatattgctgagtatttttgcatctgtattcataagaaattttggtctgtagtttcccatttttgtactttctttgggttgtgtttgagggtgatgctggcctcattaaatgagttgggaa

SEQ ID NO: 96926 - DNA, 67900 bp, Homo sapiens
  misc_feature (1)...(67900): n = A,T,C or G
tggatatatttatgacttttatagtggtgatggtttcatgggtgtatgcgtgtccctagacttatcgagatgatgtcaatcatacctcaataaagtggtttttaaaaagttttgcctgtgtgtgtgtttacatatatatatatataatatatatatgcctgtgtgtgtatttatataacatgtatttatttacatacacacacacacacacacacacacacacacacacatatattttttgagacggagtcttgccctgttgcccaggctgcagtgatctctgctcactgcaacctccacctcccgggttcaagagattctccctgcctcagcttcccaagtagctgggattacaggcacctgccaccatgcccagctaatttttgtatttttagtagagacgtggtttcaccatgttggccaggctggtcttgaactcctgacctcaggtgatctgtccaccttggcctcccaaagtgctgggattacagacgtgagctactgtgcctggcccttattttttttttatatttttattttttttgagacagagtctcactctgtcactcaggctgacctatgttgatatttttaaatttctattttgaacatttttcttccatttacatattctaaccagctattgtttgtagctagaataaccattcctttttgtatgctgatttaataattggttatattactgaattttcttgttaataatgtttattttggggggggcacaggtggggacagggtcttgctctgtcatccaggatggagtgcagtggcatgaacacggctcactgcaaccttgacctcctggactcaagcgacgcccctgccacagcctcctgagcccagctaatttttttctttttaaattttttgtagacaaggtctcgctgttgcctaggctggtcttgaactcctgggctcaagcaatcctcccacctcagccttccaaagtgttgggattacaggtgtgagtcaccacacctggccttattagtaatttttaaatgctcttactgtatttttgctttgtacaatcatatcctctaaaataagaataattttgtctttttcaattattatatttatttcattcccttacctggggaagagagagattgttttcatagaaagctccttggaggatacataacttgggtaaatgttgcaggtatagtagcgtagacacctcaacctgaactgtcctactccccactaatggagtaaattaataaatgattggtggcccttagaattctctactttttacatcatagaaaaactcaacgtaatagtgatttggaacatgttcacagtaagaactagagagttttgttttctcaattaacrtcagaagcattagaaccagaacgacttccttctgaatggaggaaggtaaaacgaggccgagacccgctgggctgcattcccacgaggttaggcattcttagtcacagaatgagattggaggtcaccggactggtattacaagacataggttataaagaccctgctgatgaaacaggatgcagtaaagaatctggcccaaacccaccaaaaccaaaatggcaaggaaaacgacctctggtcgtcctctctgctcattatacacttactataacgcattagcatgttaaaagacacttccaccagctccatgacagttgtaaactgctatggccaggtagggaatctaccctatatggtcaaaagaggaaccctcggttccaggaaatccctgtccctttaccagaaaactcatgaataatccaccccttgtttaacatataaacaagcaataactattagtatactcagtggagcagcccctagccctgctctgcctacggagtagccattcttttgtttttttttgttttgttttgttttgtttttgcttctctaataaaattgctttcacttatggccccaaattctttcttgccagagatccaagaatcttctcttgggactgggatccctttccagtaacactgatatcacaactaaaggacttaaaagcctgataaatgtacacaagtacatgaaatgtgaatcccactattatcattttcagtaaattgtcatcaatttaaaacttttggagaatccacaaaattctcattgtccaaatccaatccacaagaatgattaaaaacagtgtgaataagacctcaaatccttcagaacgctgatattacaggaaaggggtcccaatccagaccccaagagagggttcttggatctcacgcaagagagaattcagggcaagtccatacagtaaagtgaaagcaagtttattaagaaagtaaagaaataaaagaatggctactccatagctggttgcccatttttatggttatttcttgatgttatgctaaacaaggggtggattattcatgcctcccctctttagaccatatagggtaacttcctgacattgccacagcactcgtaaactgtcatggcgttgatggtgtgtccagcattggtgggttcttggtctcaccgacttcaagaatgaagctgcggaccctcgcggtgagtgttacagttcttaaagatggtatgtctggagtttattctttctggtgggttcctggtctcactggcttcaggagtgaagctgcagaccttcgcagtgagtgttatagctcttaaaggcactgcggacccaaagagtgagcagcagcaagatttattgcaaagagcaaaagaacaaagcttccacagtgtgtaacgggacccgagtgggttgccactgctggctcaggcagcctgcttttattcccttatctggccccatccacatcctgctgattggtccattttacagagagctgactggtccattttgacagggtgctgactggtgcatttacaatccctgagctagacacaaaagttctccaagtccccactagattagctagacacagagcgctgattggtgcatttacaaaccttgagctagacacagggtgctgattggtgtgtttaacaaaccttgagctagacacagagtgctgattggtgttatttacaatcccttagctagacataaatattctccacgtccccaccagattagctagatacagagtgctgattggtgcatttacaaaccttgagctagacacagagtgctgattggtgtatttacaatcctttagctagacataaaggttcttcaagtccccaccagattagctagayacagagygctgattggtgcatttacaaaccttgagctagacacagggtgctgattggtgtgtgtacaatcctctagctagacataaaagttcttcaagtccccactagactcaggagcccagctggcttcacctagtggatcctgcactggggccgcaggcagagctacttgccagtcccacgccgtgggcctgcactcctcagcccttgggcggtcgatgggaccaggtgccgcggagcaaagggaggtgctggtcagggaggcttgggccacgcaggagcccacggcgggggcgggggaggctcaggtatggcgggctgcaggtcctgagccctgccccgcggggaggcggctgaggcccggggagaattccagcgcagtgagggcgggcccacagtgccgggggacctggtgccccctccgcagctgctggcccaggtgctaagcccgccgagcccacgcccacccggaacttgctctggccccggttcccacggacacctctccctccacacctttctgcaagcagagggagctggctctggcctgcgccagcacagagtggctcccacagtgcagcggcgggccgaagggctcctcaagtgtggccagagcagacaccgaggccgaggaggtgctgagaatgagcgaggactgctagcgcgttgttatctctcaatgagagtgcagtagtgaggatgaccagagttcactctcattgccatcttagttttggtgggttttggccggcttctttactgcatcctgttttatcagcaagatctttataagctatattttgcgctgacgttctatctcatcctgtgacttagaatgccttaaccgtctgggaatgcagcccaataggtttcagccttactttactcagcccctatttaagatggagttgctctggttcacacgcctctgacactggttaccgtgtgaaagaaatggagtgttgttttttttacagctttcttccgaaccttactctctaaggatggtatccagtatgtcctttttttttttcagatggagtcctgctctgttgcccaggctggagtgcagtggtactatcttggctcactgcaagctccgcctcctgggttcatgccattctcctgccttagcctcccgagtagctgggactacaggcaaccaccaccacacccagctaatttttttttttttttgtattgttagtagagacgggttttcaccgtgtgagccaggatggtctcaatctcctgacctcgtgatccgcccacctcggcctcccaaagtgctgggattacaggtttgagccactgcgcccggcctccagtatgtccttcactgaattgtaaacttttgaaggtcagggcattttggctttaagtgtttctatcttgtgctctcttccagatcttaccatgtagttgatatgcaacacatttgttgagtaactacattttaggccataaaggcacctgtgcagaaaagggcagtctagtctcatgcttatgtgtccagagttggttccttccggtgggttcatggtctcgctgacttcaagaataaagcttgtcaccttcgtggtgagtgttacagtttttttttttttttttttttttttttgagacaaggtctctctctgtctcccaggctggagtgcagtgacgcgatctcaggtcactacaagctctgcctctcaggttcacgccattcccctgcctcagcctcccaagtagcttggactacacgaccggccaattttttttttttgtatttttagtagagacgaggtctcaccgtgttaggcaggatggtctcgatcacctgacctcctgatccacccgcctcggcctcccaaagtgctgggagtgttacagctcttaaaggtcccacagacccaaagagtgagcagcagcagcaagatttattgtgaagagtgaaagaacaaactttccacagtgtggaaggggacccagggctgccactgccagctaggggatggggggcgtggccagcttttatttccttatttgtcccggcccaagtcctgcggattggtccactttacagaacactgattagcccgttttacagggtactgattggtgcattttacaaacctctagctagccacaaagtgctgattggtgcattttacaatcctagctacagagtgctgttggtacattttacaatcctcttgtaagacagaaaagttctccaagtccccaaccgacccagaagaccagctggctttacctctcacttaaacctgtactgtgtcaatatccgtacatcagtaagtgttgtcgatcaagttagggaagtagtggatttctggtgacaaatgttaccctttccaactaaagtttaaagaaggtaagttgaacccaaatctacatactgctgtagccccaaacggaaatactgcaaaagctccatcaacgtctcccagtccatccagacttttacaaatggatagaccccggccgcaggaaaccaaggagcacctggggttgggttgggtgaattggctctggggctcattcttttcactacagcgccagaaaagcaaaaacctaaaccaagacccaagagaccagccctcagcctgcacctgagagcacattttccctagccagcactgagcatgcgcaggctgcgtggtgtggcgaaagcgcagccaggtccgcgctgccgccgcagccaatcggagggagggagccgcccggacattgtgaggtgccgagggaggggcggcgggcgaggggcagggcagggcggaccctggacgcgcgggcgcgcgcggaaggtagcgcggggccgcgttggcgcgcacgcgcctgagcgtgcgcccggtggggccggccgggactcgccgctcgcacgcccttgggccgcggccgggcgcccgctcttccttccgcttgcgctgtgagctgaggcggtgtatgtgcggcaataacatgtcaaccccgctgcccgccatcgtgcccgccgcccggaaggccaccgctgcggtgagtggcgtaggcgtgggctcggaggggtccactgggccggccaccggtggttgcccctcgcgcggggtgggcgttgcgggcgcgtggcggcctgcggacgaggacgctcctcccggcccgggtggggtgcgaatggtccgcgcggccgggtccgcggggggcgggggcagccggggggtcacagccggcgcgagggccagtccccagctcctccctgcattgcggaggaagtgtggccccgggacccccgcgggccggcctagggcacggcgtcagcctctgcagcgtgtttctgcctggtgtgtgggtgagggaaacctaagtccgccaggaaatcgccttattgtcacctcgcactcttatcytcaatgaaagaagtttgaagattgagtgtcctacaaggtcagacgtactgttttttagaaaactcgtgtatgaaaagtcaaacttatttttgcctccggaagcttgcttttgcagtggaaaaattctacaggatatgtgagatgttcctgatttcacttgaaagagataaactgtttttcttagaatgtgatcatttgcactcaatgtctaactgggacctctcagtgctaccccccccccattcattatctcaggaaataaagggagaagttgatcagaatttttgccatttaaaagaggtcgataaagattaagtcgccgaagatagtgttgtgtaattctctcgtaggtttcgttccgttttccaccttaagcaaagctagtgtgtaacaatcctgtgtgggcttatttaggcattgcttattaattttcctcttctcttataggtgattttcctgcatggattgggagatactgggtaggtaccattattattaatagtaacagtaatgaaactgggtcatgcaacttttgtttacgcgttcaaaggtttaatgtttaagggcgctaaaatggtattttaagattgccagttaatgtatcttacagtgcggtgattttatgttttgaaaaccctcagaattttccccttatcatcgtgagttyattgattttttaactctggtttctggaacatattaaaatttcaaattcctcattagttgctttgggtattggataccagagatccgtggaatgttagtagggacggtgtgcaattgagagctttccagagcagttaaaatttcagagcagattgaagagaagaactagttgattttgataagagaactagtggcaacataaggcatgcagcattctgaatagagggattagatgttcactctaatgagttgaaaggcaggggaggcaactcaaagatttatttggaggcttatcaaacaatttgttgtactaactacttatttttattttattttttgtttgtttgcttttttcttttgttattatttttagagacaagggctctctctgtcgcccaggctggagtgcagttgcaggatcttagctcactgcagctttgaactcctgggctcaagtgatccttcagcctcagcctctcaaagcacagagattagaggtgggagctgcctgagcctggccttttgtactaactttagatacatgatttatcttttactcaagctttttctatattgagatgtttttgtttttatatttaaattggtgataatctgtgaaacttaagcaaaatatgaatgttgttgaaaaattgcagaaatagaggaaaactgaagataaataaattttgataaagtagccccagaacgactaaattttctttaaaatgaaccattggggccgggcgcggtggctcacacctgtaatcccagcactttgggaggccgaggtgggtagttcacttgatgtcaagagttcgacaccagcttggccaatatggtgaaaccccatctctactaaaaatataaaaattacccgggtgtggtggtgcatgcctgtaatcccagctgctagggaggctgagagaagagaatcacttgaacctgggaggcagaggcttcagtgagccaagattgcacgactgcactccagcctgggccacagagtgagactcaaaaaaaaaaaaaatgccattaggctagatttttgtttgtttgtttggagacagggtctgctgtgttgccctggctggagggcagtggcgtgatcttgactcactgcaacctccaccttctgggttcctgggtctcccgagtagctgggactacagttgcttgccaccatgccagctaatttttgtatttttagtagagacagagttttgccatgttggttacgctggtctcgaactcctgacctcaaatgatccacccacctgagcctcccaaagtgctgggattacaggcgtgagccaccacttaaaagtgattcctattttttgcctaataagtcgagttatgtaatacaaactttgtatggagttacagaaaaggttgcagcactctttctggcaatccagtggtcctgtgaaaatgatgaacttattttaccaaatgaaactcgaatagcagaatctctattttatggccaaacctttcttgatgttgcaagtcagggagaaggttgctatcctctaactttgccaataatgagcacttctatgcctgaatgattagttcaagcaaaaaaaaaaaaacttcagtctaggcagattccacagactgaagctaaaagtaaaaatggtgaagactattaggatcaaaaataccaagaacatccattacatcttgaccaaaagttaagtttatattaaaaaagtatccttctttttaacctgttgtgataaaagaaaaaacaaaggtctccagttctgaaattatttggtgggataatgctaaggaaaggctgactctagattggttccatgagtgcatgatgaaacttcgaacctgtcagcctgacaagtggcaatttaatacttaagatattgtagtctccccttacctgcagttttgcttcccatrgtttcagttacccgtggttaactgtggtttgaaaatactaaatgaaaaattccagaaatactttataagtttaaaattgtacaccattcttttttatttattttattattattttttgagatggagtctcactctgtcacccargctggagtgcagtggcacgatctcggctcccttcaacctctgccactcgggttcaagtgattcttgtgcctcggcctccggcgtagctgagattacaggcgcgtgctaccacgtccagctaatttttttgtatttttagtagagatggggttttgccatgttggccagggtggtcttgaactcctgacctctagtgatccacccacctcggcctcccgcagtgctgggattacaggcatgagccaccatgcctggcctgaattgtacaccattctgagtattgtgatgaaatctcattccgtctcacccaggacacgaatcattcctttacctagcgtatccatgctatatccattcaccatctgttagtcacttggtagccatctgggttatcaggtcaactgttttggtattgttttgcttttttttttgagacagagtcttgctctgtcacccaggctggaatgcagtgacacaatcatggctcactgcaacctccactctccaggttcaagcaactctcctgcctcagcctcctgagtagctgggactacaggcgtgcaccaccacacccggctaatttttgtatttttagtagagacggggtttcatcatgttggccaggccagtctggaactcttgacctcaagcgatctgcccgccttggcctcccaaagtgctgggaatacaggcatgagccacctcgcccagcctgtagtgcttttatccaaataagccttacattgcttaatgatggccccaaagtgcaagagaagtgatgttgtcatattgttataattgttttattattgttaatctcttcctatgtctaatttacacaataaactttatcacaagcattatgtataggaaaaaacatagtatatatagggtttggtgttatccatggattcaggcatccactaggggttttagagcatcccccactgtttatttctggaattttccatgtaatattttcgaaccacagttgactgtgggcagctgaaaccatggaaaacaaaactgtgggtgagaaggactagggtattttaaacattatataatcacagaaaagttatcccattaaatttaacatttagtattatctaatatattatgcattcaacctttgccagattgttccattaatatcctttatagctatctcctccctagtcatacattatatttagttatcacgtctctttagtctcttttgtctcttttaatctggaacaattccctagattttcttttgtctttcacgacattgacacttctgcagagaacaggctagtcctttaatttgggtttgtgtatttactcatgattagattcagtttatgcatttctggtataaataccatgtaaacaatatgtcctattcattgcgcgcatcagtagactaatgatgctgagtccttttattgttgtaacttcgatcttttgattaaggtggtatcttccaggtctcgactgcagttactttccttttgtaattaaaaagcaagttgcggggggatactttgtgactatgcaagttgttcatcaagctttcacccaatatttttatcatccattgataattgcttgagtcaatcatttctacagtgtgattttccaattctgtcattcctttttttttgtcattccattttgtttattaatctgctactccccatttagttagtatggactcagatttattttctatttatttatttatttgtttattttttgagacagaatctcgctctgtcacccagccaggctggagtgcagtggtgcaatctcggctcactgaacctccacctcccaggttcaagcagttctgctgcctcagcctcccaagtagctgggactataggtgcgtgccgccacacccggctaatttttttttttttttttgagaccttgtctcgccctgtcgtccaggctggagtgtagtggcgtgatcttggctcactgcaacctctgcctcctgagttcaagtgagtctcctgcctcagcctcatgagtagctgggattacaggcacgtgccaccacgcctggctaattttttttgtatttttagtagagacgggggggtttcaccatgttggtcaggctgatctcaaactcctgacctcgtaatctgccctcctcagcctcccaaagtgctgggattacaggcgtgagccatagtgtccagtcagatttttgtagttttagtagagacggggttttgccatgttggccaagctggtctcgaactcctgacctcaagtgatttgcccacttcggcctcccagtccctccctggaattacaggcatgaaccactgtgtcatgcctggactcagatttatttaataggttatgttctattctgttatgttttaaactttttaacttttcattttaaataacttgaaatttacataaaagttgcagaaataacatttatagctccttatacctttcacccaaattacccaattgttaatatttctgaactattaaagaataagttgcaggcgtgttgcctcattacagcttaattcttcagtgtacatttttaagtaccaggacactccagtataaccatcattaagaagttaacactgatggtatactacggtctaatccaccagctccattcacatttcattgatttgagccaataatgtcctttatcagtctaggatcacatattgcctctacttatcatttctctttagttttctttattctgaaacagtccttgtctttcatgaccttgacactttgtcaagaatacaggccgggtatggtaataccagtgctttgggaagctgagcatgagaatcgcttgagcccagctgtttgagaccagcctgggcaacagccagaccctgtgtctaccaaaaaaaaaaaaaaaaagtgtaagccagttactttgtagaatgtccctcagtttgggtttatctgatgttttgtgatttatacctttttgacagtaacactataggggtattgctgtgtccataacagtgcatcatattaggcagacctcatgatgattttgttgttactgatgtgttttatcacttggttaagatggtgtctgccaggtttctccacattaaaataataaatataacatatgaaatatttaaaatattgaatatgtaattaaaatattaaaaaatattttgtggggagataccttgatattataacatattcctgatccccaccatatgttcacccatggatttagcacccattaatgattattgccagaatctattgttgtggtagttgccgaatatcttatgatatttaaatatttaaagttaaaatatggtcttttaattaaatttcctttgttctggccgggtgcagtggctcatgcctgtaattccagcactttgggaggctgaggcaggaggatcatctgaggtcagtagttcagtaccagcctggccaacatgacgaaacctcgtctctactaaaaattaaaaaactagctggacaggatggtgcatgcctgttgtcccatctacttgggagctggaggttgcagtgagccaagatggtgccactgtactccagcctaggcgacagtgagactcagtctcaaaaaaaaaaaaaattcctttattctggatttattatttagcagtctactgtggggtagagctttcctttctcctttatttattacttatgtagatactcatttgtttcaaaattttaaatcagtacagactcttggattcctattgtattcagaggataacaatcaagttagttatttattttgatgctcaaattgtcctttagttggccacagtaaccctttcaagctggtacttggtgtcttttggacatatcctcattcttatttgatcacttcctcactttatggtacaagactttttctaggattgtcttatatgtttcctgctctagtcctggactcagccatttttccaagaaccctggttccttttagtagacagtgagatctggatgctatatgtgctcccagatctagacccttgcagtggacagagctaagaatatatggacatacatacatatgtacacacatatcagttttagtatttataagtattcaaaatcttgagtttataatgattcctccaattgcagcccagcaccacagggtttattatagccttctccctttccatatttgtaattccgtgaggaacctgacttctgttcttggggggttctggccaacagtgcaactgtggagtgtgcccctccagttgcaccagctcacagctatgcttcattcatgggacctctccccatctgctgaatatcacacctgaaagctcagttccaattaaggggaaacgaggaggaggaaaggcctggtggaaagcttggttctcttcatgtgtccccctccctgctactccccagccccgatgtattccaggaattacttatctgtattaccagtccctgtgacatttcctagaccaaggagattataaaagtatagagaagaatgtttgaaagataaaataagtggttgactggatcagattttactgagaggtcaaacaaggtgaggatttaaaataaattggcaacatggatatgttttgtgaccgtaataagtttgcaagtcttcctgtaatcaagaactattaataatagaattatagaatgtgatttggagatcatttaattacaaggaatagaaaactcttcaactagcttaaacaaaaattagaatttgtggaaggatagaagggcagcccactggcatataaagtccatgaaggcaaaggtttctttaataaactttcattaagataaaattcacataccataaaatatacctcagcacagggattttttgtgttttgtttaaattaatactgtattcccagtgctagaatagtataggacatgtaatagcactaagtatttgttggacaaataaatgaataaataaagaattaaagggtgagacatacgaggagcatcaatcaccacatgtattagtttcctaaggctgccattataaataaccacaaactagatggattaaaaacaacagaaattcattctcacagttaaacaggccaaaagtccaaaaccaagctgtcaacagggccacatacattctctttaacggaagatccgtccttgcctgttccgtttctgataactcccggctttccttggcctcaggcaccatacccccaacctctgcctctgtcttcatgtgacctttgctgtgtttctgttctctcctcctcttaggaggacaccagttattggatttagggctcaccctaatcaagtgtgatctcaactcttaactaaggaaatctgcaaagagcctatttttaaataaagtcacattccgaggtttcaggtggatgtgaatttggggggaacactgttcaactacaccattattctcactacctttccctggtcttatggtctctcacttgcttctttctgtagatttgcgtaattctcagtgtggacacactcgtgttatccacaagtgaacgatcctagctctgacttatatcaaccctacttctggtgttcagtcaagaatctgatctgtcttaggtcattttttttcttgtctagttagttggtaagactgattgggactgataggagagttcataagaataacgtgctacatgaatggggttggggatgagtggtgtttcttttacaaacccagacagaatctctgttctacacccatattactacaggataatgaacaaatggaaataatatgtgtgcgtgccaccacacaggtcctgattttgttttgttttgttttgtttttaagtagagacagggactcattatgttgcctaggctggtctcaaactcctgagctcaagcagtctgtccaccttggcttcccaaagtgctggcattacaggtgtgagccactacacccagccagaattcttaaatcttgagtttttcattgtcactgaaaattatcaaaagagttggctacagcttggccatcctttttatattaatatggttggagtcagagttttataacctgtatagaccttcgaatcatccagtacaactagctcctggttatggatgggaaaactgagaactagaaaggcatgattctcatactatagcatgcatcaaaatcacttgaaagacttgattcttgggccccactgccagtttctgattgagtgggtctggaatgagaccaaggaatttgtctgcatgcctcctcttcttctttcttctttcttcctcctcttccttctccttctcctcctcttcctccttctctctctgtctcctccttctcctcctcctccaccttatcttccccctccttctcttccttctttctccttctcctccttctccttctcttccttctttctccttctcctcctcctcctccttctcttccgtctttctcctcctcctcctccccctgacttcgacagggttctcctccgccgccgcctctgcctcttccatctcctctgccgccgctgcctccccctccccctcttccttctccttttcctcctcctcctccttgcttcgacagggtctctcactctgttgcccaggctggagtgcagtggcgtgaacacagctcactgcagccttgacctcctgggttcagcctcccaagtgactggaagtacagctgcatgccaccatgcctggctattttttaaagtttttgtagagatgagggtctcagtatgttgcccaggttagtctaactcctgggctcaaactgtcttcccatctgggcctcccaaagtgctgggattacaggcatgagccagtgtgcctggccagaatttgcatttctaacaagttctcattggatactgatagtacaggtctggggatcacacttctgagaaccaccagactgacggaactgtctgtgaccacacttttagatagtggctgagtggggactagaacccaagattcctatttctttttctcatataagggttcttagtatttctccttccttccttccttccttccttccttccttccttccttttctttctttctttccttccttcctttcttcttttcttttcttttcttttttcttttctttttctttcctttccttttcttttcttttctttttttgagacagttttgctcttgttgcccaggctagagtgcagtggcgtgatctcggctcactgcaacctctgcctcctgggttcaagcgattctctgcctcagtcttctgagtagctgggattacaggtgcccgccactgtgcccggctaatttttgtatttttagtagaaacagggtttcaccgtgttggccaggttggtcttgaactcctgacctcaggtgatccgcccacctcggcctcccaaagtgctgggattacaggcatgagccaccatgccctgcctggttcttagtatttcttatgtagaatggaggttggagccaggcatggtggctcacacctgtaatcctatcacttcgggaagctgaggtgggaggatggcttgagcctaggagtttgagatcagtctgggcaacatggcaaaaccctgtgtattagttctcttgctgctataaataattaccgaaactgggtaatttataaagaaaagaggtttaattcactcacagttctgcatggctggggaggcctcaggaaaggtggaaggcacctcttcacagggtggcaggagagagaaatgagagctgagcgaagggggaggccccttataaaactgtcagatcaaatgagaactcactgtcataagaacagcatgggggaaaccacccctgtgattcaattatctctacctggtcccacccttgacacatgggtattgtgggatctggccagcagcccgcaatgcaatggggctctctctttgttcccaggcggatcggcaggttgagaaataatagacacacacaagatagtgaaagctgggtccaggggggtcactgtcttctggtcccgcggtgccaacaatgcactggatataccagcatttattactaagtttagtgagggcgggggtaggttagtgagggatttagggtcatttgattatgaggtgagatggtcacatggggatgaaataattctttaacataacatttgtatgtagaagtatagtacatttgtatgtagaagtacagtatacagagataagaatttacaatatagtgtgtgcatcagtaatttctaatagagccttaaaacagaaacacagtctttccataacctatgattagcaagatattaatcagcagtaacagttgtagcaaaagctggttacaaacaatccatagaaacaggatgtgaagctagacaactggttagaccagaaattctcagaaggggagtatgtcttaaccctaaagaggcctagaagaaccgtggcaagatgagggcatttatagccctatcttatccatgtggacaggcgcccccaatgcgtccgtttataggctctccacaagggtcgcattctgttcccagagctatgaacatctgcttttctgggataggaatcttggtgatgtgaatcctccgtgattgcacatccattcataggctctttgcagggggaagcacatcacacgctgttggctcgttctggcagtccaacctggcattgtctttacacaatcctgcatgcaattttgtatttacaataatcaggagcatttcatcttttattccgtagcaatagtttcagggggtctccctacacatggggattattacaattcaaggtaagattttggcagggacacagccaaaccgtatcatccaccttctacaaagaatacaaaaaattggccagccatggtagagtgtgcctgtaatcccagctacttaggaggctgaggtgggaggatcgcctgagcctgggaggtcgaggctgcagtgagctgagatgatgccactgcacttccagcttgcgcaacagtgagaccctatctcaaaaaaaaaaaaaagaggttggcaaacaagggcccatggttcaattctggcctgccacttacttattattacagtgttagtatatacattctaatacatacatattagtgttagtattgtcacatatgttcaaagatcccgcccccccccagggatgtctgaaatcacagagagtaccaaaccctatgatactatgttttttcctatgcatgcatacctgtgataaagtttaatttataaattaggcaaagaggtgaacaacagcaatagaataattataacaacatactgtaataaaagttatgtgaatgtgatctctctctcaaaatatattcttgttctgtactcacctattttttgatggtggtaactgaatccacagaaagcaaaactgtggttgatggggaactactgtacttatagagatataattcacataccaaaaacttcactcttttaaagtatacagttcagtagttagtttatttacagagttgttcaactattaccactgtcttaattccagaatatgttcaacatccccaaaagaaacccaacattcatctgcagactacttattcccctccctggcaaccactatctttttctgtttctgtggatttgcttattctgcgtagaaatggaatcagataatatttggtcttttgcatctggcttctttcattttataacataatgtttttcaggctcatctattttgtaacatgtaccagtactgctttctttcattgccaagtaaataattagctgagcatggtgtcatgcacctgtagtctcagctacttgggaggctgagtcaggaggatcctttcaggccaggagttcaagtctagcctgggcaatatagtgagactctgtctcttaagaaaattcacataaaaataattcattcatcaattaatgaacatttggattgtttctacttttttactctaatgagtaatactactctgcacgtttgtgtacaagactttgtatggacatatgtttttagttctctggtgtatatacttgggagtcaaattgctaagtcaatggtagctctatgtttaacccttgaagaactccaggacagttttcatagtagctgcacttttttacacttctgccaagataaatggccagcagtgtgtgagtgctctgatttctcgccatcctcgttaacacttgttattgtctttttgattatagccatccatttctatgtgaagtggtgtcgcattgtgattttgatttgcatttcctaatggttaatgttgagcatcatctcatgtccttgaaaaaagtaaaatagaggtccctctttaaagattttcctctccatctaattaggaataaatagtaacttctcttaaaagcaaaatttattcgaagacaggtgctaacattcttaaatatctgctagccgtaataaagaaatcaatgtactttatgttcttagctccctcaatttagcctaaatatttgccctggcatgcttatactggtccaagcaagcattaggtcatagcctgttcctcttccttatttaaaagtgtttttatctttctcagcattccacaagttaacttcctccttcctttgttctcctctacctttgcctcttttaaaaagttctaagttgctagccagtcgggacaaataacagawtgtgaggtcccgttccagccaatggaaaccagacacagcagtagggtggacttgtcagattataaatgactctgtctcctttgttcggtgtactctcgtgacacagctactggcaagtgtaccctttctgcagaaagtaaaaatggccttactaaataaattaaatttatgttcaagtgctgtttctttacggcaccggagaacaagcatttcaaacatccttattggccatttgcatattttctttggagaaatatctgttcagatcctttgccgttttaaaaattgggttgcctttttgttgttgatttataagaattgtttatattgtctggacactagactcctatcagatacattatttgtaaatattgtctcccattgcgtggggtgtctttgcacccttttggtagtatgttttgcagcacaacagtttttcatcctgatgatttttatgtttgtttgtttgtttcagacagagtattgccctgtagcccaggctggaatatagtggcgtgatctcggctcagtgtagtctctgcctcccctgggttccagcgattcttctgcctcggcttcccgggtagctgggattacaggcatgccctgccatrccctgcccagttttcaagtccttcacttattttgttaaattattcctccaagtattttattctttgtatactatgacgaatggaattgttgactttattacatttttatattgttcattgctrgtgtatagaaatatacctttttgataagttttttatatcctgggatcttgctgacctcaatagctcttaggatgtttttgtagatttcataggattttctgtatataagatcataagatactcagctcacaagatcatgagagggaattttactgattcctttcctatctggatgccatttatcttgccagtttccctggctacaatctctggtaaaatggtgtattgtatttattaaatttttatgttgaaccatccttgcattctagggaagatctctcctggtcatggtgtataatcctaattatatgtcgatagatttggtttggtagtttttaggattttgtatttatattcctatgggatagtctgtgattttcattttgagacagggtctcgctctgtcacccaggctagagtgcagtggagtgaacacagctcactgcagcctcaaccttccaggctcaaaccatactcccaagtatctgggaccacaggtgcacaccaccatgcctggctaattttcttattttttgtggagatggggtcttactatgctgcacaggctggtcttgaactcctgggctcaagcaatccccccactttgggctcttaaagtgttggattacgagtgtgagccatcacacctggctgtctttttttttttttttttttttttggtaccctttggttttgatgtcagagtaataatggccttctaaatgagtaactgttcctttttttgggcgggggggatgaggagaaggattctttttttttttttttttttttttttaatttttttagtatttattgatcattcttgggtgtttctcggagagggggatttggcagggtcataggacaatagtggagggaaggtcagcagataaacatgtgaacaaaggtctytggttttcctaggcagagggccctgccgccttcctcagtgtacagtccctgggtacttgagattagggagtggtgatgactcttaacgagtatgctgccttcaagcatctgtttaacaaagcacatcttgcaccgcccttaatccatttaacccttagtggacacagcacatgtttcagagagcacggggttgggggtaaggttatagattaacagcatcccaaggtggaagaatttttcttaatacagaacaaaatggagtctcctatgtctacttctttctacacagacagtaacaatctgatctctcttttccccacatttccccgttttctattcgacaaaaccgccatcgtcatcatggcccgttctcaatgagctgttgggtacacctcccagacagggtggaggccgggcagaggggctcctcacttcccagacggggcggctgggcagaggcgccccccccacctcgcggacggggcggctggccggccgggggctgccccccccccaacctcgcggacggggcggctggccgggtgggggctgcccccccacctaactgacggggcggctggccgggcggaggggctcctcacttgtcagacagggcggctggtcagagatgctcctcacctcccggacggggtgacggcggggcagagacactcctcagttcccagacggggtcgcggccaggcagaggcgctcctcacatcccagacggggcggcagggcagaggcgctccccacatcccagacgatgggcggccgggcagagacgctcctcacttcctagacgggatgacggccgggaagaggtgctcctcacttcccagactgggcagaggggctcctcacatcccagacgatgggcggcggggcagagacacttctcacttcctagatggggtggcggccgtgcagaggctgcaatctcggcactttgggaggccaaggcaggcagctgggaggtggaggttatagtgagccgagatcacgccactgcactccagcctgggcaacattgagcactgagtgagcgagactccgtctgcaatcccggcacctcgggatgccgaggctggcagatcactcgcggtcaggagctggagaccagcccggccaacacggcgaaaccctgtctcaaccaaaaaatacaaaaaccagtcaggcgtggcagtgcgcgccttcggcaggctgaggcaggagaatcaggcagggaggttgcagtgagccgagatggcggcagtacagtccagcctcgtctcggcatcagagggagactgtgcaaagagggagagggagagggagaggaagaggagggagaggagggagagggagagggagaggaggattctttaaacattggattggtagacttcaccttgaagccatgtggtactgggcttttctctgtgagactttggattactgattcaattccttgttacaggcctgtatagattttgtttcttgaatccgtttttggtagtttgtgtcattctaggaatttgtctatttagtctaggttatctaatttattaccatgtaattgttcatactgttctcttataatcttttctatgtgtcaagttagtagtagtctgttctttgtttcctgattgtaataatttgagtcttctctgttttttttctttggttgatctagctaaaggtttgccatttttgttgatcttttcaaagaaccaacttttgctttagttgatagtctctctctttttttttgagatggactctcgttctttctcccaggctggagtgcagtggctcaatctcaactcactgctacctccgcctcccaggttcaagcaattctcttgtctcagcctcctgagtagctgggactacaggcacgtgccaccacacccagctagtttttgtattttgggtagagatggggtttcaccatgttagccaggctggtctctaactcctgacatcaagcgatccacccgcctcagcttcccaaagtgctgggaatacaggcgtgagccaccgcgccggcctctgttgcatttatttccactctagtttttattattttcttctttctgtttactgtggataaagttttttggttttggttttttttcaggtaaaagattaggttgttaatttgaggtctttattttatatatatatatatatatatatttatttattttttttttctttggtctcccaggctggagtgcagtggcgtgatctcaactcactgcaacctctgcttccgaggttcaagtgattcctctgcctcagcctcccaagtagctgggattacaggcattcactgccacaccgggctagtttttgtatttttagtagaaacagggtttcaccacattggccaggctagtcttgaactcctgacctcaggtgatctgcccacctcagcatcccaaagtgctgggattacaggcgtgagccaccgtgcccggcctgagatctttatttttaaacacagatgtctacagctatacatttccatttgagcattgcctttgctgcatcctatgcattttcgctgctgcgtgtttttactttttctaaatggttaggaaaaaacttaagacttagtgacacatgaaaagtatatgaaactcagattttattgtacataaataaggttttgttggaacagaaccacatccttttgtttacatgttgtctatagttaattttcatcctagagtggctgagttgagtagttgcaacagagaccttctggctggtaaagcctaaaatgttgactcttttggtcctttgcagaaaacaattattgacccctgttgtttaatatttcttgatatacagatgttttacatcatgataaattcatcataaaatcaaaaaatcataaatttagccattataagttgggaactgtttgtatattcatactatgaaaaattgagcttttcattgttatttttagcttgcatgagagttagagctgtatttgcttagagtaatattcctaagatgataatattcatcatttgatttttctgtgggttcttatgggctacctgttaacattcaaatatagagcacagcagtcatttcttcaccatgtggtcttaacctactttatctgaggtgtcttcaatttctgtctctgatttttaagtattcttctagactaatttaacagtatatgtgcaaaggcctaattttttaaaagatttttgtgacattaatgttttaaagaattttttctaaggaaaaaatgatgtctgcgaacattcattttataagactgtacaatgagaccgggtgcggtggctcatgtctgtgatcccagcactttgggaagccgaggcgggcggatcacgaggtcaggagatcgagaccatcctggctaacatggggaaaccccgtctctactaaaaatacaaaaaattagccaggcgtagtggcgggtacctgtagtcccagctacttgggaggctgaggcgggagaatggcgtgaacctgggaggcggggcttgcagtgagccgagatcgcgccactgcactctagcctgggcaagagagcgagactccgtctcagaaaaagaaagaaagactgtaccatgagaaatctgtgtgaaaaaaattgaaatgccaaaatgtttacaaagaagaatatttgataagttagaattccagcaatttaagtggaaaaagtgtatcctgggcaggtgcaatggctcacacctttaattcaaacactttggaaagccaaggcaggaggatcacttgaggccaggagtttgataccagcctgggcaacatagtgagatcctgtctctaccmaaaaaaaagtacattctaaaactgtagatacaatatagtctcataacaaataggagctaagctgttaatgattgtttctttttttaaaaaaaggattagttcttgatcgcaccagtccaaatgcttttcattttctacttttgtcttttctcccctaattgtaataaggaataaaacatactatggtgcgtatgtatgtgcgtgtgcgttgtggggaaaacctgtcctctgtcttactgctcctgctgtataaattctttttgattttcatagctgaaactaatcttttccttctcttccacattttgacattctttgtaacttgtttgtagggcttaacttttgatctgtgtggtggtatgtttatatcttgtttctcctacgggactgcagtttcgttgaggatacagtctgtatctcaatctttatctttcatgcatgtagaatgtttgttttttaaatttctctcctcagatgcggtggctcatgcctgtaatctcagcactttgggaggtggaggcgggcggatcacctgaggtcaggagttcaggaccagcctggccaacatggcgaaaccccatctctactaaaaatacaaaaattagccaggtgtggtggcacatgcctgtaatcgcagctacttgggaggctgaggcaggagaatcacttgaacctgggaggcggagattgcagtgagccaagatcgcaccattgcactccagcctgggcaacaagagcagaagagcagaactctgtctcaaaaaaaaaaaaaacgaaaagaaaggctgggcgcagtggtgcacgcctgtaatcccagcactttgggaggccaaggtgggcagatcacgaggtcaggagtttgagaccagcctgaccagcatggtgaaaccctgtcatggtggcgcgcttgtaatcccagctactcgggaggctgaggtaggagaatcgcttaaacccgggatgcgaaggttgcagtgaagagattacaggctgcactccatcctgggtgaccgagcaagactgtgtttcagaataaaataatcttccagttgttttttttttcttcaacatgtcttctgttatttaaaaaagacattttcttgagctctttcattggacgagagctgctggccaaaaactgtgtatatagtagggaaaacaagggtctatgtggttaagacataaacacagttaagagaagtagcacaaaatataaataaataatattaataattattgaattacaattttgagcacaaataggggcagagccacaaatagtcaaaatttactgtgaaatattgttgcattgtctgtatatttggggtgaataattgagaggcaactcttcaacagcctgttactccagacaggggtagaaactagtgagtacagcaaaaggcctttgaactataaagtccataccttaaagctgttgtacttttctgtgtgaactccagcatttttattctttggcaaatgtctaatacatacaaaagattgtaagtactcaaaaagccagtggtatagagttctttggtatggagaaaatagccaatgttttattgtattaataacaattctaaaattcatgttaaatttaaatttttggccaggcacagtggcttacgcctgtaatcccaacactttgggaggccaaggcaggcggatcacttgaggtcaggagtttgagaccagtctggccaacatggtgaaaccttgtctctactaaaaataaaaaaattagttgggtatggtggcacaggcctgtagtcccagctactcgagaggctgaggcaggagaatcacttttactcaggaggcggaggttgcagtgaaccgagatcaccccactgcactccagcctgggcaacagagagaggctccatctcaagaaaygtaataaataaataaatatatttacattttttattctgtttctatagtcaccatcaatttacatatttctcaatatacttcgtaagtgtaaacataaaggaatacggctgtcatctgccttggccagccatgatataggtcaagcttttattatatgtagtaatgttttgaggaacataattgaagctttattttattttggactctaataaataggtggaagattgttattactattttttgagacagagtcttgctttgttgcccaggctggagtgcagtggcatagtacgctcgtggctcagtacaactcccacctcagtctcccgagtagcttggactacaggtacgtgccaccacacttggctactttttgtagagacagggttttgccattgttgcccaggctggtcttgaactcctaaggtcaagtgatccacccacctcagccagaatccaccacagggcgagatatcagatctccgttnnnnnnnnnnnnnnnnnnnnatccacccacctcagcctcccaaagtggtgggattacaggtgtgagccacccccgcccagcctgaagattattttataagtgtgattttttttaagtggctgtgtagtcccaaaactataattagctgaaataatactgtaatgtttaaaacttatttagttatccctgaggtcatcagcacaaatcctgaaatagaaaatatagtaacgatatacttagaaattgaaatagaaatagaaaaagcttacagaaaatcagcattggcaataaccatggaaaacattttataatgtggttatactgttatcttttgcagagataacagacaggtttaaattttatttatttatttatttatttatttcagggggaaacgaggtctcagtctgttgcccaggctggagtgcagtggtgtgatctccgtttaccgcaccctccgcctcccaggctcaattgatcctcccacctcagtctcctgagtaactgagactgcaggagcgctcccagctaattttgtattctcagtagatatgggggattcgccacattgcccaggctggtctcaatctcctggactcaaatgatccgcccaactcagcctcccaaactgctggggtcaaaggcttgagccactgcacccagtctagttttttatcttatatgctgcttggatacctttgctggtcaaggctctgtgacaaagagtgccttaattgcttggtaatgtctactctgggcccacgatctaggaatggtagcccatatgccaggtatttattattgctgcaaaatattgcttattatacacattaaaatctatttgcaaagctaactatgcacgttaagtttattcctaattctactgaaattatcagacagaaaactggacgggcgtgatggcttaggtctgtaatcccagcacttttggaggctgatgtaggtggatcacttgaggtcaggagttcaagaccagcctcgccaacatggtgaatccccatctctgttgaaaatacaagaaaaattagccagccttggtggtgggcacctgtatcccaactactcaggaggctaaggcacgagaattgcttggactcaggagtcggaggttgcagtgagccatccctgcactccagcctggacgacagagcaaaactgtctcacaaaaaaagaagaaaacttagtggctgttaacactgaaaatacgtacattgaaatagtgtatcaaattcaagtgaatagcttgtaataaagtgttaaacataaaaagcaaaaaaaaaaggggggggttgttgaacatagacttgcatagacctgtaatatgtacttgaatcaattgatatagctcataacttacatttgtcttagcagatggtagaaggtgtttctatctacagaatctataatcttgtctcaaaatgatttcccaaatgttttcagacttacctcagggcaaacagctcatttccctcaacttcatctctctcttcctgcttatcccaaagtcacaagtctagatcagcagtaagcagcaggtagcccagaaaaggccacactcagccaaatctggtgacctttagctgaatatagatgcgccttgacttacaatggggttacatctggcagagctgaaaagttgagcagcgtacggatgtgttttgcttttgtgccattgtaaagttggaaaatcttgagtctaaccgttgtaaattggggaccatgtatactttagtagttgagtctggtgggtagagaatttatcagttgctttgctttgcaactattatgcagttctaaactcagattggtttggtgtaagaacttttttgagttggatttgctatttttgaaaattattttgaaaattgtattggattatgatatagtcaagtattcagatcttaaatgttcagccaggctgggtgcggtggctcacgcttgtaatcctggcactttgggaggctgaggagggcagatcacttgaggtcaggagttggagaccagcctggccaacacagcaaaaccnnnnnnnnnnnnnnnnnnnnaaattagcagggcgtggtggtgcacgcctgaaatcccagctactcaggaggctaaggcacgagaattgcttgaccctagaaggtaaaggttgcagtgagctgagattgtgtcactgcactccagcctgggtgacagagtaagactctgtctcaaaagaataaaaaataaatgtttagctggataaatttttacttacacccatgaaaccatcaacatgatgaagatagagaacatttccagctccccaggagtatttttcattctcctggagttagtaccctcccatcccagaggcgaccattattctgacttctattgctataccatacttttgcccgttctagaccgtcagataaatggtattatatgtatatcttctgtgtccagctctttttaaaagttggaacatacactttactatctcataaatctattccttttattttcagaagaataaactttttatttatttatttatttatttttagtagagacggggtttcgccatgttggccaggctggtctgtatctcctgacctcaagtgatccgtctgcctcagcctcccaaagtgctgggattacaggcgtgagccaccgtgcccggactacttttttattttttactttgtaacttgttatttagattcaggagtacatctgcaaggtaaactgcatgttctgagggtttgatgtacagataattttgtcacccaggtaataagcgtagtacctgataggtcttttttctgatcctttccctccttccaccctccaccatcaagtaggccccagtgtctgttgttcctctcctagtatccatgtgttcttgttatttagctcctacttacaagtgagaacatgtggtatttggttttcggttcctgtgatggtttgcttaggataatggcctccagttccatccatgttgctgcaaagtacatggtctcattctttttttaatggctgcataacaattcatggtgtatatgtacgatattttctttatcccgtttgccgctgatgggtatctagggtgatttaatgtctttgctgttgtgaatagcagtgcaatgaaagtaagtatgcatgtgtctttatgggagaactgccgagaccagctctgtcagggagaccctaacccagcggtgctagaggaattaaagacacacacacagaaatatagaggtgtgaagtgggaaatcaggggtctcacagccttcagagctgagagccccgaacagagatttgcccacatgtttattaacagcaagccagtcattagcattgtttctataggtattaaattaattaaaagtgtcccttatgggaaatgaagggatgggccaaattaaaggaattggttgggctagttaactgcagcaggagcatgtctttaaggcacagatcgctcatgctgttgtttgtggcttaagaatgcctttaagcggggccaggtgttccttgccctcattccggtaaacccacaaccttccagcgtgagcattagggccattatgaacatgttatagtgctgcagagattttgtttatagccagttttggggccagtttatagccagatttcgggggggcttgctcccaacatgtctcccttctttgatttgcaaagagatataaaagcaaaggcagctttgtcatggtgagctacttctcgcaggagtcaggatccgcatctgcagactatacaaagacaaataacatagattaaaagcacaatcatcattgaaatcacagagcttccaagtgtttttatccattttaatgggttactagctgctaatttgtctgcagctcctttaagcactccagttcctggcattaaggtcaggtgtgcctgggatgctttaaatatttgttcttttaattttgcaatatccaaagacaagtttgtagggtgtccttctagatgcttttttattctttcccaaattttgatcttattaagagcatttaatagtttccacaaatccttatgttaagctcctagagcaggccatatcatttgaggttgaggtgccactatactgctgtggttccagataataggagctcttgccatacttcttatcatttctaccatctgaccgttttgttcagatcacctgaacatagtgtgaccgtggcacacagactgagaggtgcagttcaagctaaacatccccttaggggaccaatcaataatgattccataggaatcattgtgccgcacctctgcctgttctgcagtgcaatcttcctaaacaaatatgttcattatttctggccaggtccagtccttcttagaaataggtttttgagggtagtatgcctcaataataggagcagatttattatggtaaatactgagatcagaaagcatatgtaactgtgtcagagtgattacatctaggcattattgccagccaagattgatgaatatgcctaataagtataattgttctctgtgtcagcccttattgaaggaatactcaaggcagtggtgataaccactatcatagctacctttaaattattcattgtgactggttgtcccgctttcctcaggttttcttctgccgtctgtgacagcttcttgatctgtccccaggtgggtggctctgttcgggtgttgctcatgacagttgggatcctcctcagcgtccgtctcgacatggctgcaatcagggggccctcgggatgctcccgggtctcttactcggcatctggctcatctgataaggtttcaggtgtcttgatggtatccaaatcggctgttgatttttgcctggagaaacacaagcataacctctaccccaaattattattttacctatttactaactttttgtaatcggatctctccaccaaatcagttgttctgcttctgtctttgcagctggtttctgtagatgctgttcagctgctgataacatctggcctttgggcaggctcaaaaaatttaaagttaataatgctaggttcagttgcatctgtggggttccatattctctgtctcctttctgcttttgcaactgctgttttagggagagattcattctttccactatggcttgtccttgagaattgtatgggataccagtaatgtgtttgatattccacatagagaaaaatgtagctagagcttggctagtatagcctggggcattacctaattgttttaatagaagttggaatgcccatcaccgcaaaacactgcacaagatgatgtttaacacaggcagaagactctcctgattggcatgtagcccagacaaagtgagaaaaggtgtccacacatacatgtacataagctagtctcccaaatgagggaatatgtgtgacatccatttgccaaagagagttaggttccaatccccgatgattaactcctcctgtaaaagatgaggactgtaccatttggtaagttgggcatcgctggataatagctttagcttctttccaggtaatgctgtatctgcgtttgagaccagaggcattaacatgggttaaatcatgaaagtgtctagcattaaataattgcattagcaactaggcgatcagccatttgattcctttcaaaggtcctggaaaaggtgtatgagccctaatgtgggtgatgtaaaaaggatgcattctattaactgctgtttgcagttgagtaaataaagtcatcagttgttcatctgcatgaaattgtaactgagcattttcaattaactgtgtggaatgaaccacgtatgaagaatgcttagcaggctgcaggttgtttactgcaggaattgtaaatgtaaaccgttcacagtcttgctcagctaaggggatggtaaagaaacagtctttttaatctatgactattaaaggctctgtcgcccaggctggagtgcagtggcacgatctcggctcactgcaagctctgcctcccgggttcccgccattctcctatctcagtctcccaagtagctgggactacaggctcccgccaccacacccagctaatttttgtatttttagtagagatggggtttcaccatgttagccaggatggtctcaatctcctgacctcgtgatccgcccacctcggcctccccaaagtgctgggattacaagcatgagtcaccacacctggctgctttctttccttttaaagagactattttaattgattttgatcacctctactcaaaactatcctaaggtccacattaggattagtctctaataatctgaagatataattcaattgtttaaaagaacatattaagaagactttggtagaattacatgtatcaagaaacactggacttgggcacaatggagatatggctgacttttgaaaaaagaagtagttttttgggggagggcagggcaaagaggtaggaagtagttggtactataaggaaatgttagagactattttggaaatgtattcattattttaaggcaactaacaaatggtcatctttctgttaggacattgtagcagcagcctttactggtcatgaaatttgcatgatatctaaaattatacttctgtaaataggtcagtgtcgattaatagtaactttgtatagaaaagcagatgccagctggcatagaagtggcagtgtagatgctggtagttctggagtcctggaagctatgagatgccatacatcacaaggccatcacagccaggtagataaatggctgaggaaagcagcggagctggccgtgccagcatttacaaatggaacacttcttgggcagccaggtgtcatggggcacagacccacagttctctttgcacacatcatgctcacagttccgtccatagaaggagagggggcaggcacagaaggaccccagcatgcaggttcccccattcagacagcaggttctgtttagttccttactgtcctgtatctccctgggcggcacaagttgggaagaccgaggatgaattgcaggctcctcctggggctgaatgctgtcatctctgaaggccaggtctccctgagatggacgcgcaagttcctgatggcccaacccttaacgaccttttttgactttttgatgatagccattctgcctgctgtgagatggtattttgttgtggttttgatttgcatttctctaatcattaatgatcttgagcatgttttcatatgcttgttggccacatgtatgtcttttttttttttttttttgattcagtcttgctctgtcgccaagctggagtgttcaagcaattctcctgcctcagcctcctgagtagctgggactacaggcacgcaccaccacgcctggctaattttttgtatttttagtagaggtagggtttcactatgttggctaggttggtctcgaactcctgacctcaagtgatccgcccgcctccgctacccaaagtgctgggattacaggcatgagccacgaccacgcccagcctgtcttttgaaaagtgtctgttcatgttttttgtctacttttcaatggggttgtttgatttttttttttttaacagtaaagtggaagcaagtttattaagaaagtaaaggaataaaagaatggctacaccacagaacagctaggtggtttgttttttacttgtaaatttaagttccttatagattctggatattagacctttgttgggtgcgcagtttgcatatattttcttccatctgcaggatgtttgtttactctgttgatagtttcttttgctgtgcaatagctccttagtttaattagatctcatttgtcaatttttgtttttgttgcagttgcttttggcgtcttcaccatgaaatcttagacaagtcctatgtctaaaatggtatttcctaggttgtctttcgagtttttatagttaggggttttacatttaagtcttgaatccatcttgagttgatttttgtatgtggtgttaggtgggggtccagtttctatcatctgcatatggtcacccagttatcctggcactttttattgactggggagtcctttttcccattgcttgtttttgtcagctttgttgagtatcaaatagttgtaggtgtgtgaccttacttctgtgctgtctattctgtttgattggtctatgtgtctgtttttgtaccagtaccatgctgttttggttattgtacccctgtagcatagtttgaagtccagtaacatgatgcctccagctttgttctttttgcttaggattgccttgtctgtttgggctctttttttggttccatgtgaattttaaaacattttttcctaattccgtgaagaatgtcattggtagtttgataggaatagcattgaatctgtagattgctttgggcagtatggccatttaacagtattgattcttcctatccatgagcatggaatgcatttccacttgtttgtgtcatctctgatttctttgagcagcgttttgtaattcttgttgtagagatctttcacctccctggttagctgtattcctaggtattttattctttttgtggcaattgtaactcacacttttaaaataaaatgtgtgctttttgtacaaaaaaatctcatatcgctgtcatggagcttccttggttcatcttttactgcgtgtgttccattgtgtgtgcactcagtcctgtgtgtgcttgtccacgcccccaccctgtatatatatgtacgtatatatagatgagtctttttttaactcttgagataaacctgcaaacatgatttcctatcacctctaaatactctcatgtgtatttcccatgcacaaggatacttgtacataaccaacatacaacactccaaattaggagatgagcattgattaaacactatatccagtccacagactccattgaagttttgccagctttctcagctgtgtccgtttcctttctggcctgagatcctttccaggagtatgtgttcatttgagctgtcatgtcttgagtctgaaactgtttatcagttcttctttcatttcctttgcagttttaaagcatatagccacagccttcagttctgcatattctgcagagtgactcttcaacttgagtctgtctaatggttcctcatgactgggtccagtcatgcattcttcgtctttatttttggtaccagttttattgacatataattcatataccacacaattcactcatttaaagtgtgtaatttgatggttttagatgtattcaccgtaagttttgcaaccatcaccacagtcaattttagaacattttcattgcctcaaaaagaaaccctatactctttcatttgtgttctattgtaactggcttctttcacttaacattgttttcaaggctcatccgtgctatagcatgtcagtacttccttctcattgttgaatcatactccgttgtatggctgtgcctcattttattttattttattctttatttgagatggagtctcgctctgccgcccaggctggagtacagtggtgtgatctcagctcactgcaacctcctcctcccgggtttgagtgattcttctacctcagtctccccagtcgctggtactacaggcatgcgccatcaagcctggctaatttttgtatttttagtagagacaggtttcaccatgttgaccaggctggtctcgaacccctgacctcaggtgatctgccagccttggcctccccaaagtgctgggattaccgtatgagccaccacgcctggcctcattttgtttattcatccatcatttgatggacatttgggttgtttgcaccttgaagttgcgtaatactgctaaaaaagaacatttgtgtacaagttttttgttgttgtgtttttgtttttgttttgagatggagtttcactcttgttgcccaggctggactgcagtggcacgatctcggctcaccgcaacttccgcctcccgggttccagcaattctcctgcctcagcctcccgagtagctgggtttacaggcatgagccaccacatctgtactggacatattttttcactattcttcggtatagacctaggaatagaattgctggatatggtaacttcatatttatccttttgagaacctaaaggttatctaaagtcgctgcaccatttacatttctaccaacagtgtatgagggttctgatttctcaccataccctttaacacttggctattatttgtcatttttacgataaccattccggtaggtatgaagtggtatctcacagtggttttggtttgcattttctaatgactaatgatgttgagcatcttttcatggtgtattaaccattcatttgtctgagaaatgtctattcaagtcttttgcctatttttttattgagatgtcttttttgtttaattcgaggtaaaattcacatgacataaaactaacccttttaatgtgaacaattcatgacatttagtatattccttttttttttttttaaacgagacagagtctcactctgtcgcccaggctggagtggagtggcacaatctcagctcattgcaatctctgcctcccaggttcaaatgattctccagcctcagcttctgagtagctgggactacaggtgcgcaccacgcccagctaattttcatagatttagtagagacggggtttcaccatgttggccaagcaggtcttgaactcctggactcaagggatctgcccgccttggcctcccaaagtgctgggattacaggcatgagccaccatgcctggccaaagttttttttaaagtattttttcttttccttttacttttagttgatacataattgttcatatttatgggatactgagtgatatattttgatacatgtatacaacatgtaagaatcaaatcagggtaattagcatatccatcacctcaaacatttatcgtttctttgcattgtgaacattcaacaccctttcttctagcattttgaaaatatacactgaattgtagttaaccatattcactcaacagtgctacagaacaccagaatttattcctttcatcattatattgatagccatcctagtgagtatgaagtgatgtatcattggggctttgatttatgtttccttaatgactaatgatgttcagcatcttttcctgtgctttttggccatttgtatatcttctttggacaaacatctcatcaagtcttttgcatattttttaattgggttgtctttttgtttgtgagttgcaagttttttttattatggatactagacactttaattagatgtgatttgcaaacatttttcccactatgtaagttgtcttttcattttcttcatagtgtcctttgaaacacaacagttaattttgatgatttctaatttatctatttttttcttgtcggttgtgcttttgatgttatatctaagaaattgccagatctgaggtcacaaagatgtatgtgtgttttcttctagttttatagttttatctcttacatttaggtatttggtcagtgtttacatatggtatgaggtagcagtccaacttctttgtattacatgtggatatccacttgtcccagctacttttgttaaaaagactattccttccctgttgatttgtttcagaaataagtttgacagtaaatgtgaggttttatttctggattttcggttgatttatatgtctgtctgtactctagtactagtctttctgaatgttacttggtaggaatttttgagattaagaagtgtgagtcctctaattttgttctttttcaagatttttgttgttgttgttattctgggtctcttgagtttccatacaaattttagatcgggttctaatatgtgcaaagtcaggtggtattctgttaaagattgcattgactccatagatcaatttgagagtactgccgtctttaaaatattatatctcccagtccatgaaagtgggatatccttccatttatatagattttcttgtatttcttaatatgttttatagttttcagaaaaaagtctttaacatagctatttacacatatacacatgtgcatatacacaaaactcctatataatatcctggttatagttaatgttatgtaagtattgcagttaatactgttgttactaatctttttatatgtctttaacactttgggggaagtgggttgaaatagaaaaatagttaatagaaaagtatttaacagggggctgggcatggtggctcacgcctgtaattccagcactttgggaggctgaggcagacggatcatgaggtcaggagatcaagaccatcctggctaacacagtaaaaccccgtctctactaaaaatacaaaaaaaaaatttagctggtgtggtggcgggcgcctactcgggaggctgaggcaggagaatggtgtgagcccgggaggtggggcttgcagtgagccgagatcgcgccactgcactccagcctgggcaacagagcaagactctgtctcaaaaaaaaaaaaaaaaaaaattaacattcatcaagactctttgatgtaagaaaggctgaaattactggtactttattctttagtagagataatatgtaaaaagcatcaagtatatggccaaatgtaaataagcaggaaactatatgtataacatgatccctgttttgtaaaatgtgcatctattccttaattgacatgcatgggaaaaatcagaaggaaatgcatcagaaaattaactgtttattcctggctagaaggatttgattatttataatttttcaattattccatgttctgctttgaacgtgtatgtatgtgaacatgtacgcatgaagaaatattaaagttgctggattaaaaaatttttttttcttaagttttctgtagagtgggtcttactatattgtttaggctggtcttaaactcctggtctcaagctgtcctcctacctcagcctctcaaagtgctgggattatagacatgagccaccatgctcagcgaaagttgctgtttttattttatttactcacttatttatttattttgagatggagtctcactctgttgcccaggctggggtgcagtggtctagtcttggctcactgcaacctctgcctcctggttcaagcgattctcctgcctcagcctcctgagtagctgggattacaggcaatgcacaaaaacgcccagctagtttttgtatttttagtagagacagggtttcaccatgttggccaggctggtctcgaactctggactcaagtgatccgcatgcttcagtctcccaaagtgcttgtaagcatgagccactgtgcccaggtgaaagttactgtttttaaatagtgtagtaagcatgtagagatgttagacaactgatttagtttatttatctgaggcttttttctttttcttttttttcttttctttttttttgagatggagtctcgctctgttgcccaggctggagtgcagtggcgtgatctcggctcactgcagcctccacctcctgggttcaagcaattctcctgcctcagcctcctgagtagctgggactacaggtgcacaccaccatgcctggctaatttttgtatttttagtagagatggggtttcactatgttgggcaggcttgtcttgaactcctgacctcaggtgatcttcctgcctcaccctcccaaagtgctaggattacaggcgtgagccactgcacccggccaaggctttttttctttgtgtaaaatgttaattatttctcttgcctactttataaacacattgtataaagacattttaaaaatatatctatagtttggaagttgtgaagccctgtggaaatatctgaaggggcacacactgctgttcagaaatctgagaaatcatccttatccctaggtaaaacttaacagctgctgggttctttttagattcatggtgttgttttaatagtattgagggcccacattttaaagatatttttaggccgggtgtgatggctcaygcctgtattcccagcactttgggaggccgaggcgagcggatcacgaggtcaggagatcaagaccatcctggctaacatggtgaaaccccgtctctactaaaaattagaaaaaattagccgggcgtggtggcgggcacctgtagtcccggctacttgggaggctgaggcaggagaatggcgtgaactcgggagaggtagcttgcagtgagccgagatcgcgccactgtactccagcctgggcgacagagcgagacgccatctcaaaaaacaaacaaacaaaaaaaaaccatatttttaggatttaacatttatcttcacaattttttaaagctactcttctgctacttacttactgggatttaaaacagtgtctaatagcattattcaatgatttttccaccaggcacggatgggcagaagcctttgcaggtatcagaagttcacatatcaaatatatctgcccgcatgcgtgagtatttctgatcttcaggcttgtgattcagagtctggagaggagcaattgtgattgctttacccttccagaaaagtatttgaatacagttaatttttactttttaaatrttgtttaaaaataaagattagtagaattccttaaaactaaaatggtttcttaggtaaattgatttttttytttttctctttcgttaagcaatttaaaatattgctgtcttggaggtcagctgaacttaagaccagaaaaattattttatttatttatttatttatttatttattwatttttgagacagagtctcactctgccacccaggctggagtgcagtggcgtgatctcggctcactgcaacctccacctcctgggttcaagcgattctcctgcctcagcctccagagtagctgggattacaggtacgtgccaccacgcccagctaatttttgtatgtttagtagaggcagggtttcaccatgttggccaggctattctcaaatgcctgacctcaagtgatcgacctgccttggcctcccagaaaaattatcttagatatacaaatatctataaagttctaggatatccctagggtatctctgaaggggatttacctgttagatttgtgagaactctttattacgttgaaaacactctttaattttatcgtttggggcaatgttgatgtactgtggaaagagcacagactttggaatatgataggtattgttttgaattctggctctgaaagttttgagcaaacttagaagatcaataagattggcacattaggtcaagcttgtccaacctgtggcccaggtcagtttgaatgcagcccaatgcaaattagtaaactttcttaaaacattatgagatttttttttttgcgatttttaaatattattttattttttacctcatcagctattgttagtgttaatgtatttttatgtgtggcccaagacaattcttcttccaatgtagcccagggaaaccaaatgattggacacccttgatttaggtcaaaaagttgctgagaagcaataaccatggagaagacaagaagggattggacatactcatgtcagttagtaattcatccccagaagtggtagtagcagtagagttgggacagatacataaacatgaaagagggaatgggaagaagaataacagctgagaagattggataagaaaacatttcttcctctttttatcctgaaatacagtctgtcttacctctaggctacagtgaatactgtggctagggttgctatgtcctctatcattctgctcaagcaagagacagaattctttttattctttttctttttttttgagatggagtctctctctgttgcccaagatggagtgcagtggcataatcctggtttactgcaacctctgcctcccgggttcatgcgtttctcctgcctcagcctcccaagtagctggaattacaggcgcctgccaccatgcctggctaattttttgtatttttaatagagacatggtttcaccatgttggccgggctggtctcaaactcctgatctcaggtgatccgcccgcctcggcctcccaaagtgctgggattacaggcgtgacccaccccgcccggcccagaattcttaattacgttggaatggatattgatatttgccccaagttgaactgctttaaaaggctgttgcccaacctaggaagtttgtattttcaaagaaattttgatacagtttgtaacctctaaggtggacttacttcatgaatcaggaggaaagtggtgagatgtagttagagtgtgcttatttttctttcctttggatggagctgaattcagattatctagcatatttttaatcacagacttgaattggctataatggacacttaggcaaattttggatttcccttatttatttagaggtctcttaagcaagtacatagctaagaactagaaaattaggaaaagtgtaatctgagcatatgagaattgatgctacagtatcagtgtaataaatcactcattgtccttagccctataccggaatctcgtgttttatacatttccaactgtcttggtttctggtttctcttctcgtgtctgagaagtcaaaagtagtaagtaagggtgttgagaagggaaaatgtatctgtcaagcttcgtcctttgttgctgttgctctgtcttcagaacacatttggaggggcgtggaaagcagagttgtacaggtgtggatgaaataaaacagttcatatgttaaaactgtagcatatagttttgtgtaggtctcaagcaattatctgtttttgattaatggaatttatcagtttttatgctttgttattctgattttgttgttttttcttttccatgtaggcctgttaggcctgttacattaaatatgaacgtggctatgccttcatggtaagtaagaatttacttattgaataagaacattatattacttatttaatgttatcagaaatgcttttgtgtacagcagtttttatttagctgttttttaaattgcaaagttgcatagttaacctctatttacattttcatactctggatttaggggtaaacttaaggagctgtacatacaggtagaggaaataggagagagtgtttgaataaaaatcatgtgggagaatatcttctgctgcttgataaacctttgttggttttagtaacccaacattcgaatgacccctattaaaccacagcctcttcatctttccaatttcttgcctgtctgggttgtttttaaggaaaccgcttcccttccagccctctgaagatatcctcacattccctctgcactttactgtcagaaagtagggtcagttttttgttcctatgtgctacttccagactatgatttttcctaactgttctctgagactcctaacatcaggtctgttaaaaaacgatgactttagccgggcatggtggctcacacctataatcccaacactttgggaggcagaggcaggctgatcaactgaggtcaggagttcaggaccagcctggccaacacagtgaaaccccatgtctactaaaaatacaaaaattagccgggtgtggtggcatgcacctgtagtaccagctactcaggaggctgacacaggagaatygcttgaacctgggagggggaggctgcagtgagcagagatcatgccactgcacttcagcctgagcaacagagtgagacttcgtctcaaaaaataaataaataaataaataaataaataaataaatagtgagacttcgtctcaaaaaataaattaattaaatagataaattaaataaaataaaacatatttctggttagccttttaatccaagctaccatgaatgtagtaaaatatacttactacaataatagatttttcttagaatcaaaagattttgccttattttacaggtttgatattattgggctttcaccagattcacaggaggatgaatctgggattaaacaggcagcagaaaatagtaagtacagaaaatgtttataaagccaaaagtgttcttaaatgtttttagtagatttagtaatcatatcgctactggttaaaaattacacatttgggccgggcacggtggctcacgcctgtaatcccagtactttgggaagtagaggcgggtgggtcacctgaaggtcaggagttcaagaccagcttggccagcatggtgaaaccccatctctactgaaaatacaaaaaattagctggatatggtggtgggcgcctgtaatcccagccacttgagaggatgaagcaggatagttgcttgaacctgggaggtggaggttgcagtgagctgagatcgccccactgcgctccagcctgggcaaccagagcaaaacttcatctcagaaaaacaaaaacaaaaacaaaccaaaaaaaaccacatttatctaatctcaggaggtactgctgtttccttccttttaccccctgccccccagagagggtcttgctgtgtcacctagcctggaatgcagtggcgtgatcaaagctcactgcagccttgacctcctgaactcaagcgacccttccacctcatcctcctgagtaggctgggaccatggaggcgcacaccaccatgccccgccaggttttaattttttctttttgtagacrcagggtctccctgtgttgcccaggcttgttttcctttctggtcactctgttacttgtttgccacagtgtccgcatggactcacttgagtataggcaatggagatgaggtggatggggacaaatggcatttatcaactttaaactctgtcagacgtataataatttttctttgatttacataggaaaatggagaaaacagcagaatgtttatatagttttggccggccgggcgtggtggctcacgcctttaatcccagcactttgggaagccgaggtgggcagatcatgtgaggtcaggagttcgagaccagcctggctaacctagtgaaaccccgtttctactaaaaattaaaaaattagctgggcgtggtcacgcacgcctgtaattccagctacttgggaggccgaggcaggagaatcgcttgaacccaggaggcagaggtttcagtgagccgagattgcgccattgcactcaggcttgggcaacaagaatgaaactctgtctcaaaaaaaaaaatagttttggccagttatcttcattaaagagacttggaataacagtgaaaataatgatataatgagtataatgataagaaacagtgaaaatgtggtcaagtgcggtggctcacgcctgtaaccccagcactttgagaggccgaggcaggcagatcacctgaggtcaggagtttgagaccagcctggccaacatggtgaaaccccgtctctactaaaaatacaaaaaaattagccaggcgtggtggcgggcacctgtaatcccagttactcaggaggctgaggcaggagaatcgcttgaacccagtaggtggaggttgcagtgagctgaggttgtgccattgcactccagcctgggtgacagagggagactgtgtctcaaaaaaaaaaaaaaaaaaaaaggaagaaaaaagttgttaatgttagtgcggtaataataacacgtgccactgattgagcacataactgtttacaagctaggtgtttcttacagggcacctcatttgacaccgctgtgaagtattagctctgctttacaaaacctcgaaagcctggtctctggttaggagtccatctcctttatgattatggtaattctagttgttcggagggagaaacagaatactaacttactgggacgtgtctatttttaacaaatgcacaggaggccgggcacggtggctcacacctgtaatcccagcactttgggaggctgaggcaggcggatcgcctgaggtcgagagttcgagatcaggctgaccaacatggagaaaccccgtctctattataaatacaaaattagccgggcatggtagcgcctgcycgtaatcccagctacttgggaggctgagccaggagaattgtttgaacctgggaggcagaggctacagtgagctgagatcccactgttgcactccagcctgggcaacaagagtgaaactcsgtctcaggaaaaaaagaaagaaagaaatgcacaggtgcacaggaatgtgcttttcttttacatatgtgtactgaaatattgacaagtataataatgtgaggactgggattgccttcaggaaaatctggttggtgactcttgagtgtgggtgggtgtaggtgggtgtgggcagcaatggcaaggcaggctggctgtgaattgttttgctttttggtaattttttatttacatagttacttagagactgtcgcccaggttagagtacagttggtgatcatatctcactgcagcctcaaattcctggtctccagcaactctcccgcctcagcttctgagtagctgggactacaggcatgtgccaccatgcctggctaatttttaaactgttttgtagagatgaattctcattatgttgtccaggctggtgggaaactcttgccctcaggtgatcctccccaaaagtactgggattacaggcatgagccactgagcgcagcccttttgttttaaaagaactctttaaggtctttaaaacagggaaaatggccgggcgcggtggctcacgcctgtaatcccagcactttgggaggccgaggcgggtggatcatgaggtcaggagatcgagaccatcctggctaacaaggtgaaaccccgtctctactaaaaatacaaaaaattagccgggcgcggtggcgggcgcctgtagtcccagctactcgggaggctgaggcaggagaatggcgtgaacccgggaagcggagcttgcagtgagccgagattgcgccactgcagtccgcagtccggcctgggcaacagagcgagactccgtctcaaaaaaaaaaaaaaaacagggaaaatacattcaaaagatgtgagatatttgggaatgtcaaaccaacaacactgacttatgggatcattaaaaagtagattagagttagaatcctagagttgggattttgtctgaaaataatagatgacaaaagtatgagggtaagtgttagatgctatggaaaacagggagggcctgggccctgtgaagaagatacgtgggcctcatgaggtccagaatgaaagattctgtcctaacaatagagttggcctatgaaatacttgttacttctttcctctctgaaaattcctctcagagaaaattagaatcagactcagccaggaaagaaaaaacaaaagagaatgtgctactgaacaaagaagacagtgctcaggttacatagttgggggtacatagtgcccttacccttaggtgaaaggtgattgaggccaagggatgttgctcatacctgtaatcctagcactttgagaggctgaggcaggaggatcacttgagcccaggggttcaaaaccagcctgggcaagagtcgctacaaaaaaaaaaacaaaattagctgggcgtggtggcgcatgtctgtggccccctcagctgcttgagagtctgaggtgggaggattgcttgagcctgagaggtcagcaacagagtgagaccctgttttgagagagagagagagagagacagagacagagacacagagagagagtgtgagcgagcaaaagagatttattctggtttttttttgtttgtttttgagatggagtcttgctctcttgctcaggctggagtgcagtggcgcaatctcagctcactgcaacctccacctcctgggttcaagttattctcctgtctcagcctcccaagtagctaggactacaggcctgtgccaccatgcccggctacgttttgtatttttagtacagacggtgtttcaccatgttggccaggctggtctcaaactcctggcctcaagttgatctgctggcctcagccttccaaagtgctgggattacaggcgtgagccactgtgcctggccaattctgtgattttttttaaaaaacaatagaatgaatggttttaaacactttttaaaccattaacttaactacgtacaacacttaactacgtacaattttaaacacttaactacgtacaattttaaaatgacaacttttaggtacaaatgcctatggttcattgaagagagaaacatggaatatatatgagcagaattaactattaattttttaaaaatccatctcttgatgagagaaagaactgttgttaacaaaatatttaatgggaaattattgaagttttaattaaaattttatttttttattttcaatttttgtgagtacataggtgtacatatttatatgtacgtgagatgttttgatacagggatgcaatgtgaaataagcacatcatggagaatggggtgtccatcccctcaagcgtttatcctttgagttacaaagaatccatttacactcttgtaagttattttaaaatgtacactaagttactattgactatagtcaccctattgtactgtcaaatggtaggtcttattctattttttttgtacccattaactagctacacctcacctccagcccccttctacccttccagcctctgataaccatacttctactactgtctgtgtctgttagttcagttagttttagatcccacaaaaaagtgagaacatgcaatgtttgtctttctgtgtctggcttatttcccttaacataatgatctccagttccacttgtgttgttgcaaatgactggatctcattctttttttatggctgaatagtacttcattgtgcatatgtaccacattttcttcatccagtcatctgttgatggacacataggttacttccaaatcttggctattgggaacagtgctacaacaaacatgggagtacagatatctcttcaatatactgatttcctttcttttgggtatatatcccaaaagatatatacccaaatatagttaaaagaaagatactttcttttgagtatatatccagtgggattgctggttcatatggtagctcaatttttagttatttgaggaacctccaaactgttccccatagtagttgtactaatttacattcccaccaacagtgtatgagggttctcttttctccacatccttgccagcatttgctattaactgtcttttgaataaaaaccattttaactggggtgagacgatatttcattgtagttttgatttgcattttgctggcgatcagtgatgttgggcaccttttcatatgcctgtttgccatttttatgtcatcttttcggaaatgtctattcagatctttggcccgttttttttgttcttgtttgttttgagacagagtcttgctctttcgccaggctggggtgcagtggtgcaatcttggctcactgcaacctccgtctcccgagttcaagtgattctcctgcctcagcctcccaagtagctgcgactacaggtgcgcaccaccatgcccagctaattttttaatctgtagtagatacggggtttcaccacgttgggcaggatggtcttgatcacttgacctcgtaacccaccctcctcggtctcccaaagtgctgggattgcaggcatgagccactgtgcccggcctggcccattttttgatcagattattagatttttttcctatagagttgttaaagctccttatatattctggttattaatcccttctcagatgggtagtttccaaatattttctcccattctgtgggttgtctcctcactttgttgattgtatcctttgctgtgcagaagctttttaacttgatgtgatcccatttgtccatttttgctttggttgatatgcttgtggggtatttctcaagaaatttttgcccagaccaatgtcctggagattttccccaattttttctcgtagtagtttcatagtttgagatcttagatttaagtgtttattgtgatttgatttttgtatacagcaagagatagggtctaattttattcttctgcatatggatatccagttttcccaggaccatttttattgaagagactgtcttttccccagtgtatgttcttgacacctttgtcaaaaatgaattcactgtaggtgtgtgtgtatagatttgtttctgggttctctattctgttcctttagtctgtgtgtctgtttttatgccagtaccatgcagttttggttactatagctctgtagtataatttgaagtaaagtaatgtgattcctctagttttattctttttgcttagggtagctttggctactctgagtctttcgtgattccatataaattttagggggctaggcacggtggctcacgcctgtaatcctagtactttgggaggccgaggcgggcggatctcgagttcaggagatcgaccatcctggctaacacggtgaaacctcgtctctactaaaaatacaaaaaattagccgggcatggtggtgggcacccgtagtcccagctacttgggaggctgaggcaggagaatggcatgaatccagtaggcggagcttgcagtgagccaagatcacgccactgcactccagcctgggtgacagagcgagactttgtctcaaaaaaaaaaaaaaaataattaggattgtttttctatttctgtgaagattgtcattggtattttcatagagattgcattgaatctgtagattgctttgggtgatttgggaaaaatattccatggtcatggattagaagaattcatgaacaataacaatcaatattgttattggttcttcttatccatgaccatggaatcttttttccattttttggtgtcctctttcatcagtgttttatagttttcattatagagaccgttcacttctttgtttaattcctaggtatttaattttatgtgtgactatcggaaatttgatttttttaaaatttccttttcacgttgttctccgttggcatatgaaaatacattctaattttgtattttaatgaagtgctttgaatttttcactcatttccaccttaaaagtaattgcgcttttctattactaattttttcctaatttaaattttatcagtgggcttaactctgaaagtattgctgactaactttcatgttgtttttagtaaaagctttgattgatcaagaagtgaagaatggcattccttctaacagaattattttgggagggttttctcaggtaagataaaatttgagtggaatgtcagtaccatcagtatacttatttagaagtctgtgcattaatcctttctatagagtagtcttttttgatgttatagaatcttgactgatacacttacctttgatgtttaattaagtttcagtgtactggaactaattaatttcttcttgaaagaactataatacacatgtacacatgtaattaaatttctaagttaacacagtttatccttttaattaattaaaactgataacacaggcatgagtcccctctataggaggagactactgataggaacagtaaagtggaagacaagagaatttcttccctttaccttcacgtattgacaggttttaggtatgaatatgtggtgtttatttttggcatttttctttgtctctgtactttttcccctgctttctgtactccctccacagacgtagcttcctcatacggacctttctttcatggctactgcggcatataagctgtttgccatggaaccagtccccagatgctctaacttatcatctgtaaatcttctaagttagcaacttagtgtttggattaccttaattagggagatgtttggattaccttaattagggagatgtcagaattctgaaattatttagaagatagaattcagtagaaagatttgttgatacaatatagtgaaaaggtgttactgatttggtgtttgttgaaattcacagataatgtatattgtaatacacattgtgacataaacatagggacagaaattaatgatccaggccaggcacggtggctcacgcctgtaatcccagcactttgggaggccaaggtgggtggatcacttgaggtcaggagttcgagaccagcccagccaacatggtgaaaccctgtctctactaaaaatacaaaaattagccgggcatagtggtgcacgcctctgtaactccagctactccggaggctgaagcaggaaaatcacttgaacccaggagccagaggttgcagtgagccaagatcgcaccactatnnnnnnnnnnnnnnnnnnnnnnnnnnnnnnnnnnnnnnnnnnnnnnnnnnnnnnnnnnnnnnnnnnnnnnnnnnnnnnnnnnnnnnnnnnnnnnnnnnnnnnnnnnnnnnnnnnnnnnnnnnnnnnnnnnnnnnnnnnnnnnnnnnnnnnnnnnnnnnnnnnnnnnnnnnnnnnnnnnnnnnnnnnnnnnnnnnnnnnnnnnnnnnnnnnnnnnnnnnnnnnnnnnnnnnnnnnnnnnnnnnnnnnnnnnnnnnnnnnnnnnnnnnnnnnnnnnnnnnnnnnnnnnnnnnnnnnnnnnnnnnnnnnnnnnnnnnnnnnnnnnnnnnnnnnnnnnnnnnnnnnnnnnnnnnnnnnnnnnnnnnnnnnnnnnnnnnnnnnnnnnnnnnnnnnnnnnnnnnnnnnnnnnnnnnnnnnnnnnnnnnnnnnnnnnnnnnnnnnnnnnnnnnnnnnnnnnnnnnnnnnnnnnnnnnnnnnnnnnnnnnnnnnnnnnnnnnnnnnnnnnnnnnnnnnnnnnnnnnnnnnnnnnnnnnnnnnnnnnnnnnnnnnnnnnnnnnnnnnnnnnnnnnnnnnnnnnnnnnnnnnnnnnnnnnnnnnnnnnnnnnnnnnnnnnnnnnnnnnnnnnnnnnnnnnnnnnnnnnnnnnnnnnnnnnnnnnnnnnnnnnnnnnnnnnnnnnnnnnnnnnnnnnnnnnnnnnnnnnnnnnnnnnnnnnnnnnnnnnnnnnnnnnnnnnnnnnnnnnnnnnnnnnnnnnnnnnnnnnnnnnnnnnnnnnnnnnnnttacctttggtggtcgaaaccctccccttggtgggaattctaataccatttaagggccaggcacggtggctcacacctgtaatcccaacactttgggaggctgaggcgcgtggatcacctgaggtcgggagtttgagaccagcctaaccaacatggagaaaccccgtctctaccaaaaatacaaaattagccgggtgtggtggtgcatgccaacaaacccagctacaagccacgctgaaccagaagaaaaccccgaactcaggaggcggaggttgtggtgagccaagattgcaccattactctccagcctgggcaacaagagtgaaactccatctcaaaaaaaaaaaaaaaagtaataccaatttaagagcagattggattttatgcctaaaattctgcaaaggagaaaatataaattcagaatattcgtaaggcatgttgtaagtgcagcagtttcccatggtacaaactatgtctcgtcggaaaggaagtctgtatgttctctggtgtagagaaccgcatcctttaggacacggtggggttgtgtttgtatttccgatatttgcctgatttgatttgacaccagccaccaagtttgatttttttatggatatcattagtaacaagatattccctaaattgctgtgggcaagcatgtgtgttccattgactttccctgcttgtcttttcagggaggagctttatctttatatactgcccttaccacacagcagaaactggcaggtgtcactgcactcagttgctggcttccacttcgggcttcctttccacaggtaacttggttgatgcactcaacatgagattactgagctaaaggtagctagtagatattgttggagataaagtcatcttatttttttttattaataaactttattttttggagaagttctaaattcacagcaaaactgagcagaaggtacagagttactatctacctcctgtccccacacatgcacagcctccccaccatcagcatccccacctccacagccatgtttttgctgcagtcagtaatgctgcactgacacatcaccatcaccaagtcctccacttacagcactcatccttttttaaaaataattttcttagacttttgtgatgtattactaggccttatttctgtacgctatactgtctgtattgtggagtacatagaatggaattagaaagaaaccttattgtcacaaatcttatattagaaggatttgatacattttaggatatatatgaaaattaggactttttttaacatatagaaatcatacttatttttagaccaggtgcggtggctcatgcctgtaatcccagcactttgggaggctgaggcgggtggattacctcaggtcaggagttcaagaccagcctggccaacatggtgaaaccccatggctactaaaaatacagaaattagctgggcgtcgtggtgcacacctataatcccagctactcaggaggctgaggcatgagaatcacttgaacccaggaggtggaagttgcagtgagccacgattgtgccacttcactccagcctgggtaacagagcaagactctgtctttgggggaaaaaaaaaaaaaaagatagctgaataaaacagcaactcaaaatactaaaacaaccaaccaaacaaacaaaaaaaagctgaaaatataaagatggattaaaatataatctgcttggctgggtgcagtggctcacgcctgtaatcccagcactttcggaggccaaggcaggtggatcacaaggtcaggagattgagaccatcctgggtaacacagtgaaaccctgtctctactaaaaaatacaaaaaaattagctgggcgtggtggcacgtgcctgtaatcccagctacttgggaggctgaggcaggagaattgcttgaacctgggaggcagaggttgcagtgagctgagatcacgccactgcactccagcctgggcaacagagcaagactccgtctcaaaaaaactaaacgaaacaaaaaaatgtatatataatctgcttcaaggaactcattcactgggaagatatatattataatatgaggcaaggtgatcatacatcctatagaagtcaaagggatgtggtgagtatatggatgaaggaattttatttttttggccaaatgtaacttctaatatgttatatatatgcatatttatgtacaattttaaatgcctggcatagtgtcctatacttttacaaaaataaaactatttcttcttttgctttttgcagggtcctatcggtggtgctaatagagatatttctattctccagtgccacggggattgtgaccctttggttcccctgatgtttggttctcttacggtggaaaaactaaaaacattggtgaatccagccaatgtgacctttaaaacctatgaaggtatgatgcacagttcgtgtcaacaggtaggtgtctagaagcagtgatcagcgccatatttgtaacttttttcatgtgatattttcaagaaaagtaacatttgaatgcttggggatttaaatgagttaattcatattgagtcataagttagcagtcattagatgagtgtgtattcaacttaattcaacaaatatttactgattggctattatacacagcattgtacataattcaaagatgaataataaacattccctttcattaaaatttaagataaaatttaatagaaagatgcatgtctaagtaactgtatggatagcagaatgtgatatacattgtattagaagctttaaaaagtgcccttggaaaataacaaaaggtgccctgaaaaactgagaagagattaattttatcttaggaggcactgagaccatgatgaaacagctagattttgaaaaacggtgggatttggatagcaaatgtgcagagaaagaactataggacaggaaaagcaagccattcagtcttaggaaaagctgggcatgataggacagaagacatagggaacagagactctttgtgctgagaagggacttactagacttactctctaggcagcaggaagctgtcagtgtttttggttgaagtgagatgtgatctgatctacattctagagacaggtgatccagcaggatttagagattaattatgtggggtgtagtaaccaaggaagtatcaaaagggcctgagatttctagttctgatgccatcataaaaagtaggtgcaagaaacagttttagagtaaaggaaggagataatactgagtttaatgtattgagatcaatgtgcccccacaatatcaaaataggatattggaaatacttgttctgaagttcaagcctggaaatggagatttgaaataattactaatataattgatcaacgaagaattatcttgagaaagcattataagaaaaaaagctcagggatagaactttgggggacacattacagtttagcctaatgagaaaaggagttaggtgttgagagtatgggtggagagaatttcagagtgggaaggagatgtgtaatgtgttccagagaaggattaaggagaaatagtttaggaagaaagtacccaatattaagccacctgtgaccttggatgtttgggtagataaagccaaaatgcaaaggattgtatgaagtggatagggaaatgaggaagcagaggcaacatgtatagaccttttaaaaaagttttggtaaasaggaagaagagtaggaaatctgttcttcagtgggatcagagaaagacctatgagtggaaggagggaggaagaagatgcagtaaagagaagataattgatagaggcattctcagagggatcatagaatagaattaagtcctgagatgtatagtgcttgccttaaaagaggagaaaaccattttcaatcaagatagaagaggacaggccgggtgaggtggcgggcacctgtggttccaattactctagaggctgaggcgagaggatcacttgatctccggaggttgctgctgcagtgagccatgttggcaccctgcactccagcctgagtgacagagtgagaccctaaaaaaaagaaagaaaggatggatgaatataaacaggagatggagagagaagagagtgcttgggagctcatattagatgtgcttatcttttcagtcaagtagaaggtgcgatcacttgatagaatgaaggaggccggaggcctggataggtctggaggcttgagaagacctagagtaaaaattgattcctagtgagatagtcatactgacagttttacaaccactcagcctgggttaaataatttagggacggagaaagaggtggtaatatgatttatccagaaagacaagggtgcctgggaacctgaacctagggtgttctcctactgatatagagtattacagtgttgaatccagaaaagagagggcaggggaagtcctggaacccttaatgtgtgcaagagggactgaaggtctctagagcagctgttttcttcatgggctttgtatcacaaataccttggagcttcataaaagctctatagatgagtctacaacaactctgggctgaatgaggaggagcagaaaatgaggagaagtaggatagtgggaggtgatctcacaggaaactctttgggacttcagagtattgtgaaatagaacactttcatgctggggctcttttctgagtgactaaattacaaggctgaaggttagctgcattgctactatttggcactgtgaggctaagtaaggccttgaaatataagagctgatagcaggaagtgagtttgagggaggtgagaaaactgagccaaatgcaagaggctaagaggagaaagtttcttctatgataaatctttggtatattaatgttcatatcttcccaggaacatcttaggtacatgctctctatcaaatggttagttgtatgtaattctttatgaaagacacagcatagttaatgctatggatttagcgcataattcagtttgaagaatggtagaagctctgctttgtcactcatacttagttgtcagtaattgttcacttactgagacttctcagtgtaggcaccatcgcttctaaacttccctgccccccagtgtcttatattgttccagtataggaagatgcagaactagatactggatgggagctgtcatttcagtgtacaataatcatgataggaaatgtcctgaaatttctgttggagcctcatttctcttttgtcttatttaattgtagtaaaaatgtgatttcgcctttatgcataccatagatttgattagtggcattttagtgggaatttaatttctgacttacataactacctacctattaaattactttattccaaacaggaaatgatggatgtcaagcaattcattgataaactcctacctccaattgattgacgtcactaagaggccttgtgtagaagtacaccagcatcattgtagtagagtgtaaaccttttcccatgcccagtcttcaaatttctaatgttttgcagtgttaaaatgttttgcaaatacatgccaataacacagatcaaataatatctcctcatgagaaatttatgatcttttaagtttctatacatgtattcttataagacgacccaggatctactatattagaatagatgaagcaggtagcttcttttttctcaaatgtaattcagcaaaataatacagtactgccaccagattttttattacatcatttgaaaattagcagtatgcttaatgaaaatttgttcaggtataaatgagcagttaagatataaacaatttatgcatgctgtgacttagtctatggatttattccaaaattgcttagtcaccatgcagtgtctgtatttttatatatgtgttcatatatacataatgattataatacataataagaatgaggtggtattacattattcctaataatagggataatgctgtttattgtcaagaaaaagtaaaatcgttctcttcaattaatggcccttttattttgggaccaggcttttattttccctgatattatttctatttaatactcttttctctcaagaaaaaaaaaaagtttgttttttctttattgtccttcatagcaggccaagtattgcctctctgcaatagacagctactgtcaatacatgctgtaatttgacattctgggtcacagatataaggtatttaaaatctatttatgctttatagagaaaccagacattaaaacttcatgcactacttatttcgaattactgtaccttatccaaatttacacctagctattaggatcttcaacccaggtaacaggaataattctgtggtttcatttttctgtaaacaactgaaagaataattagatcatattctagtatgttctgaaatatctttaagactgatcttaaaaactaacttctaagatgatttcatcttctcatagtatagagtttactttgtacacgtttgaaaccaactactgtagaagatgaggaatctattgtaattttttgctttattttcatctgccagtggacttatttgaaattttcactttagtcaaattattttttgtattagtttttgatgcagacataaaaatagcaatcattttaaattgtcaaaatttccagattactggtaaaaattatttgaaaacaaacttatgggtaataaaggctagtcagaaccctataccataaagtgtagttaccatacagattaatatgtagcaaaaatgtatgcttgatatttctcaactgtgttaatttttctgctgtattccagctgaccaaaacaatattaagaatgcatctttataaatgggtgctaattgataatggaaataatttagtaatggactatacaggatgttaataatgaagccatatgtttatgtctggatttaaaaattttaaacaatcatttactatgtcatttttctttaccttgaagaacataaactgttatttcacttctacaaatcagcaagatattatttatggcaagaaatattccattgaaatattgtgctgtaacatgggaaagtgtaaatgtttttcatggtttctatcaatgtgaaataaaatttaattctgacttttctgtgactttgagtattttaatatttggaatgttaacatttggaatgaatgtctataatgcaatggaggaaaataacaatgtacttaaaagaatatatattcagagagagaaattttgatgatggtgtggttgacttagaatggaaccaggcataagaaataatctcatgttattcagttttaattggctaaaaaaaaatttcccaaatttggttttcaatgtttctacctatttaagaagttttatttggtgtttatcttttgtctttttcttaactctttttaaattttattttattttattttatttttgagacagagtcccattctgtcacccaggctggggtgcagtggtgcgatctcggctcactgcaacctctgcctcccaggttcaagtgattctcctgcctcagcctcctaagtagctgggattacaggagcccaccaccatgcccagctaatttttgtatttttagtagagacagggttttgccacgttggccaagctggtctccaactcctgacctcaggtgatccactcgcttcagcctcccaaagtgctgggattataggcgtgagccactgtgcccggtctttttctttaatgtagtattcactgggttttttaaattagtgtcataagtcagttatccaagtagtttttctcctttatttcaacattgacttctgacttttccgaatataggaattccttctgtcctgttaagcagtccttcgctttctgcttttggatacttaagtgaccacctcacttttttgtgatgcagcttgttcaatttttggatagttctcgtggtaagaaaattctggaccaaatatgttgtctctaacttcagttcgttttataaaatgtttatctttcacatcagcactgtatttcatatgataatctttagttcatgatccttttaaaaataattttgttaactactaaatgtggtcagagcttggtactgactgttatgatctaattaccaatgggtaacaatagttgtatctatatgtaaatagttgggtaatttgcctactgttgcagccactcttactgctgcattttgaaagtataaatagttttaaatcctcttaacaagtaccattttattttgtagaaattcctaaaaaatgaaaatgtaattatttaatatatgctgggcactatactaagcattttatatcctttaagcatatagtcctctgatcaaccatcttgattttacagaagaggaaactctagagaaggaaactatttacttaggattccagagctattaatgtgcaagagccaggattcaaattcatgtgcctaacttcatggtctttataaccttgctctgtgccccagtggggtaatttaaatgctttgaaacacacaaatgatgtgtatttcatataatacaggacacatggaaatgctgagtagaactatgatacaaatcagctcaccataaagtacaatctccagtggccagagagaactaaaaggaaactaaaaacccgcatgacacagttaactttggggcttaagatgagataaggtatgtaagtaattcacccttattttttttattttaaaatgtttttgtagagatggggtcttgctatgttgcccaggatggtctcgaactccttggctcaagtgatctcaccgcagcttcccaaagtgctgggattacaaacagccaccatgcccagccaagccaggacccttttaagggcagtgcacataggtgaactagaaaaaaaaaaatctggccccttccaccccgtcaccccccagcatagggaagtggagggaaacttgcctgttttggtctgggctgtggactgggagagatgaaatcatccctcaaaactttttcaccaggagtttgtgttcatgtgcattttgattttcaaggtatataccatttatgtggtctgtcaacacacgaagttaaatattaacgtcaagaatctccctggactggctttactctcaggcacctggaagaagcaaacaaatactttatgaagactgacagcctcagaatttaaattctgaggttgcataaatttaaccttgtcaaaaatgagctcagagcccccacatttcaaatcataagagggaatgatttacctacagctgaataccaggtgacccgaaagataaaaggaaggctgggcacggtggctccctcacacctgtaataccggcactttgggaggctgaggcgagtggatcagttgaaggtaggagttaagagaccagcctggtcaacatggtaaaaccccatctctactaaaaatgcaaaaattagctgggcatggtggcgtgcacctgtaatcccagctacttgggatgctgaggcaagacaatcacttgaacctgggaggtggaggttgcagtgagccaagatcatgccactgcactccagcctgggtgacagcaagactgtctcaaaaaagcggaagaataagtgaaaaagagtaacagtataaaatgcagatttgaggccgggtgtggtggctcacacctgcaatcccagcactttgagaggccaaggagggtggatcccttgaggtcaggagttcgagaccagcctaaccaaggtggtgaaaccccgtctctaccaaaaatatgaaattagccgggagtgatagcacatgcctgtaatcccagctacttgggaggctgaggcaggtgaattgcttgaacccaggaggctgtagtgaaccgattttgcaccattgcactacagcctgggcaacaaaagtaaactttgcctaaaaaataaatagggtcaggtgcggtggttcatgcctgtttccccagcactttgggaggctgaggcaggtggatcatgagatcaggagttcaagaccagcctggccagtatggtgaaaccccgtctctactaaaaatacaaaaattagccaggtgtggtggtgcacgcctgtagtcccagctactcaggaggctgaggcaggagaatcatttgaatccgggaggcgggggttgcagtgagccgagatcacaccactgactccagcctgggcaacggagcgagactccgtctcaaaaataaaaaatgcagatttgaaaaaaggttcaaaaaatgaaaaacagccttttcaaatgaaaattttcatctaggagtgatggcgcttgccagtaatcccagctattccagaggtcgagctggaaggatcccttgagccgagtgcgaggctgcattgaactattaccacaccactgcactccagcctgggcaacagagtgagacctcatctctggacaagtgttatttgtgacagcacaatgtttgatacaacccaaatgttgaatgaaagtggaccagctaaataaaccatgaacatttactcaatggaatgttaggcagctattaaaaaataaggtgcactgaattcgttaggaaaggatttaggttatgttatcggatgaaaaaaatgtaaaaaactgaaaggggtggaggaaataagaccatatacttgacttggctagaatttgcatttaaaaaaacactgaaaggacatttgaagagtgtaataaaagtagttaatatctatggagcgtgaatagggaaggaatgaagtgaataaggataggagtgggagagaggaatcctgcctttgggatacattgtttattctaacacagatttaaaaatctgaatacataacaaaatttaccatcttaactacttttacctgtatgcttcagtagcattaagtacattcacattatgcaaccatcaccaccattcatctcaagaacttcatctttccaaactgaaaccctgtacccacgctttagattttaaattgtgttaacctgtgacctataaacacgattcaaaggccaggtgcggtggctcacgcctgtaatcccagcactttaggagaccgaggtgggcagatcatgaggtcaggagttcgagactatcttggccaatatggtgaaaccccatctctactaaaaatacaaaaattagctgggcgtggtggcatgcgctggtaatctcagctactcaggaggctgaggcaggagaatcacatgaatcctgggggcagaggttgcagtaagccaagattgtgccactgcactccagcctgggcaaccaaatgagactctgtaaaaaaaaggaaaaagaaaaaagattcaatggatgagttaaactatattagagacaacagattttaaaggtagttctgaggaatttactcaaggaagcgcagcaaacaagggagggtaggagactacaaaaataaagtaaaaaggtccaatacaggctttaaaaggtccaatacaggctttaatagaagttgcagaaggagagaacagaatggagagaactataaaatggctgatgtttgcagggtgtggtgggtcacgcctgtaattccagcactttgggaggccgaggtgggcagatcacgaggtcaggagttcgagactatcttagccaatatggtgaaaccccatctctactaaaaatacaaaaattagctgggcgtggtggcgcctgcctgtagtcccaaccactcgggaggctgaggcagaagaatcgcttgaccccaggaggcagaggctgcagtgagctgagatcgcgccactgcactccagcttgggcgacagagtgagactctgtctcaaaaaaaataaaataaaaataaaataaaatggctgatatttttccggacttcaagaaaggtaagaaaccccaaattcaggaagcaaaaaatgagttactaacaggataagtaagtgaaatctccactgagacacgtgatggtgaagagcaaaacagaataccatagaaaaagaatttgttttctttttttttttttgagacggagtctcgctctgtcgcccaggctggagtgcagtggcgcgatcttggctcactgcaagctccgcctcccgggttcacgccattcttcttctgcctcagcctcccgagtagctgggactacaggtgcccgccacaacgcccggctaattttttgtatttttagtagagacgggttcactgtgttagccaggatggtctcgatctcctgacctcatgcatccacctgccttggcctcccaaagnnnnnnnnnnnnnnnnnnnnnnnnnnnnnnnnnnnnnnnnnnnnnnnnnnnnnnnnnnnnnnnnnnnnnnnnnnnnnnnnnnnnnnnnnnnnnnnnnnnnnnnnnnnnnnnnnnnnnnnnnnnnnnnnnnnnnnnnnnnnnnnnnnnnnnnnnnnnnnnnnnnnnnnnnnnnnnnnnnnnnnnnnnnnnnnnnnnnnnnnnnnnnnnnnnnnnnnnnnnnnnnnnnnnnnnnnnnnnnnnnnnnnnnnnnnnnnnnnnnnnnnnnnnnnnnnnnnnnnnnnnnnnnnnnnnnnnnnnnnnnnnnnnnnnnnnnnnnnnnnnnnnnnnnnnnnnnnnnnnnnnnnnnnnnnnnnnnnnnnnnnnnnnnnnnnnnnnnnnnnnnnnnnnnnnnnnnnnnnnnnnnnnnnnnnnnnnnnnnnnnnnnnnnnnnnnnnnnnnnnnnnnnnnnnnnnnnnnnnnnnnnnnnnnnnnnnnnnnnnnnnnnnnnnnnnnnnnnnnnnnnnnnnnnnnnnnnnnnnnnnnnnnnnnnnnnnnncctcctaaaaccctgggattagaggcataatccaccactccaggccagaaaaagatcttaatggcaaccagagaaaaggaaactacttaagctgtcacattttttaaaaaaatggcaaaaacctcaattacttttgcaccaacctaatataaaagttgaggagatgtcaatgtggaattttctgactgaaggcaaaagaaaaccatttttaaatacatagtttataagaaaatgactactggcagaactttttaaaggtgtttgttctatgagaaaaagaaaagtgaatgagaggaaaagcgattcagagaactggaaacagtgataagcatttgggtaactaaacaagcact

SEQ ID NO: 96927 - DNA, 13549 bp, Homo sapiens
atgaggacagctgaaggtcagactgaccttgccctccatccctgagtgggggagaccttctttccccaaaggatccagcttctttgatgacttggtgaccagagcctggtctttgactatgttctttccaaactgttttgagcgctttctgttgtccatctccaaggccatgggcttggaagtgtttcagcccctcctctctctaggaagggacctttgacttgctccaaaacacacatgggagagcagtcacacagctgacaccccacaaaggcaagggctgtgacccctgcctgcctcacactggaggctctggaagacaggaccatgcctcctccatcagactgtgagctcccagcagccatggcttgtcttctgctcctatctccccaacagcaggcagcaccaagtttgtatcacagaaagctaaataaatacacattgactagctgacttcacgcccccagaggtgatggggacagccacactgcctgtgtttcttgttcgccatcctaccagtccctgttgaccctccagacctttgtccctccctggccatgaggcacagccaggggtggcctctgcctacagtcgacgctcctccaaccttgacgtaaacctaggcaggtccctgactcctcccactgctgcagccggggctctgggggaaagctgggagccctgtggatagaacaaagacacaggggagaatgtgtcctgggaggggcaggtctggcaggtgccaacgaagctgaagctgtgagaatcagaacctggggtgccggccccagctctgcttggctgtgtgacctcagacaagtaactgtccctctctgggcttcagttcgaacgtttgacctgcgagagactggaagagatgatcagaggtctctgctggtgggagatgggccggcccagccatgcctgtccactcacctctgccgctccctaggtgctgccacgcccacgactgctgctaccaggaactctttgaccaaggctgtcacccctatgtggaccactatgatcacaccatcgagaacaacactgagatagtctgcagtgagtccctcccctgtcacctgggcccccagagaagggagtggctggctctaccagcctgtgctgggatggtggacaggcttgccagattaaatacaggctgccagccgggtgcggtggctcatgcctgtaatcccagcactttgggaggccgaggcgggcggatcacttgaggtcaggagttcgagaccatcctggctaatgtggtgaaaacccgtcgctagtaaaaatacaaaaattagctgggcttggtggcatgtgccagtaatcccagctgctggagaggctgagatacgagaaccactttgaacttgggaggcagaagttgcagtgagccaagatcgcacgccactgcattccagcctgggagacagagtgagactctgtctcgaagaagaaatgaaaaagaaaaaaagaaatacaggctgcctagtgaaattcatttcttagctatacaatgaaaaatgttttaatattaaatatgtcctaaatattgcatgggacatattgatactcaaaactaaatgctagtataaaattaattaatatttatagataaggaaatgtttaggacatacttctactaaaacatgtattttttttttttttttgagacgcagtctctctctgtcgcaaggctggagtgcagtggcatgatctcggctcactacaacctctgcctcccaggttcaagtgattctcctgcttcagcctcccaagtagctgggactacaggtgcatgccaccatgcccagctactttttaaatttttaggagatacagggtttcaccatgttggctaggatggtcttgatctcttgacctcttgatccacccacctcggcctcccaaagtgctgggattacaggtgtgagccactgcatccagccaaacatgtactgtttacctgaaattttaattaattaattaattaattaattaagacagggccttgctctgttgcccaggctggagttcagcggtgccatcgtagctcactgcagccttaacctgggctaaagtgatcctcctgcctcagcctcccaattagctgggattacaggccagtgccaacatgcccagttgattcttgtattttttgtggagatgggggtctcactatgttgcccaggctggtcttgaactcctggcctccagcaatcctacttctgcttcccaaagtgctgggattatgggtatgagccaccagcccagcctgaaattgaaattcaaccaggaatcctgtgttttgattttggttttgcttttttgctaaatctgaatctgaccagcctagctgtggcttgagaacatctccctgaggtgctctgatgctccagtcctggaattggcatcccaattctcctgtcccccaaattctgggtgattctgattccgtgggtgttggtggggcccaggaacttggctttcagccggctccccagatggttctgagactgcagctctgcagggaggctctgagacatgctggcctgggagtcaggggacctgggtttgaactctggttctgtcaccatctccctgctccatgtagccctgggcagctccttccccatctggcctgtttcctcactcatgggtccactgaggggtttggatcagagcggactctttctcttctggttctgtcactcggaccccacctgcagaggtggctccatcctaggacgcccagtgtttccagggatccaaggtattagcacctggcctggcgggttccttcatttaccatgaacttgctgtggctatttcccaactgagacatgtaggtaagcgcaagtggcatccaagtagcagcgcccaggtgtccctgccctgccctactctgtgctcctctctgggagaggactccccctggcccagcctgtgggcaaccactgggccctctttgcccccatgtcttcacctggtggtaccagttgttgcttattaatagctcacaagcaacgctggctttgcaaagacactcaaatcttctgtcattgggaaggagtctagtggagactggggtgcacttgggaccccttgggggcccagatctctgtggtcctcatgttctgctgttcaaacatgaggtggaggggctggcctgagatagcagatgcccccctattaaagcagctggaggagagagattctcccccagccaccacccaccaggggtaacagacgaacttaaagcagtgattttcatgctgggttctgggaatccctggggccatcagagccagaggccctgagaggtgctggtcacagtccctgagaggttcagctggtactttagtgtattttatcattaagcagcttcttctggggccgtctgatgcatcagctttctttaaagagtttcgtttaagaaacaggattttgctggtagaaggtatgaaaagtttgcagaccgatcaagctagttggaggttctcaaagggtagcccctgaaccagcaacagcagcagctgcagcacccaggaacttgttagaaatgccaatcatcaagccccacccagacctactgaatctgatacttaggggtgaggtccagcagtctttgttggaacaagccctccagctgattctattgtgcacctaaggatgatttccgaaatctactaattataacaacagcatagggacaaacaacagtagcatttgccctggattaggcatgtgagaggctcttaggcactaagcttttgaacaattgtttttcccactcatttcttaccaataactccctcttcttttttttttttttaagatgaagtttcgctcttgttgcccaggctggagtgcagtggcataatctcggctcactgcaacctcctcctccagggttcaagcaattctcctgcctcagtctcccgagtagctgggattacaggcgtccaccaccacgcctggctaattttttgtatttttagtagagatggggtttcatcatgttggccaggctggtctcaaactcctgacctcaggtgatccacctgtcttggcctcccaaagtgctgggattacaggcgtaagccactgcgcccggcaataactccctcttcactgggcgttctttgattctgtgattgaagggaagaggtctgggatggcaggaagtaacaagcctgggaggcgtggggggtgctttagttctgtgggtgacttaggtaaacccatccccctttctggggctcagtttccccagctatgcaataactgtgttgggcttcagtggttccccaattttactatgcaccagagtcccctagagagcttgttacaacacagactgccgggccccagcccagagctgctgaccttgtaagcgtggggtggggcccgtgggtggtgctggtcctgccgcccaggtaacacattccaaggaccactgggctctccaagtctgtgtgctccccttccccagcagtagtcctgggggagctgctgcccctttcatccacagcctttgccaccccatccccctgtaggtgacctcaacaagacagagtgtgacaagcagacatgcatgtgtgacaagaacatggttctgtgcctcatgaaccagacgtaccgagaggagtaccgtggcttcctcaatgtctactgccagggccccacgcccaactgcagcatctatgaaccgccccctgaggaggtcacctgcagtcaccaatccccagcgccccccgcccctccctagagcctctgaggtttgagagagagagcgggaggagggtctggcttggggaccagacgaggtgcagggagggtaggagccaggccaggagcctgagggttgctggttgcctcctccctggagctctccagtgagggctcagctctcagaggactcaggaaggcctgggtcctgactcccccagcccagccccaggcatgggtgcctcctgctgctggttctggactgggtgggaggcacggagcttataggggtctctcctgagggtggccggggagacctgagagagaggaggaggggcctctgagtggggcctctgttgctggcgccagtttaactccccggagccttagaaagtctgagccttagaaagtctgggcctgagcatccaggcccagagctggatgcatcctcggcccaagatcacaggaaggcagattgctggtcacaaagcatgggttccgggagcccctcagctgatcccacaggatggcctggggtggtggctactttgggcttgaagctctctagagccccattcacagagcaggtgccccaccccagccctcactgaggtggccatgagtccaggttcagaccctaggggatgtgcagtgctgagtgtcccagccctgaagtctagcctcagagcaggctcctgggcactgacagagccacacacccaggtacaccccccaggctaatatggggacacacaaaaatatggccttcaacacctacaagtcttctctgtgtcccccatcgacccatgcacatcaccccaaccctgctctgccacaccacgtgggtctgaggagcactcctaccccccggctccgggtccctgacagacactgccctcctggcctgcacctggaatggcagccagaacactggagggggacccacaccctctctccctgggctgtggatgggtgttgcaagtcccatccctcctggcctgcacctggaacagcagccagaacaccggagggggacccacaccctctctccctgggctgtgggcaggcgtcacaagtcccattggtggggaagaggctgagggctgagacccacctcagtgaagagggaaacgtaagcagggagagcatcaaggcgggaggcagcctggaaacttctagaagagggtcaaggtaggaggctacatggaagcttctagaaggcagtaaggaacagggtggtgaaggagaggggagaagatgggagcatggagagacgaggtgagtgacagccaccagcagggacgggcctccaggcaacacagaggagctgggggccagggccttacggggctgggttcctgtgtggggcgtggagctggggctgaagtggaggggacggccctgcggcccccagcactgttgtttctccaggtgcaccttaccttcctccttacctgcccgagcctcaactcagggtcagcagcctccacggagccagccccacctgcccgaaaaccactgaagccaccctccgccyggactcaacagccgccagcaagctcgcctggcagtgcccctggagcaccattgtcgctggggagggagagccgggaagggtggagaaggaggcagaagggacatgtatgaaaaaaggacaggaaacctgaccagaggcggtttccagagccccagccttggagacaaggacactgccacccagcgccacagtcagtctgggaggggcccacgccccccaccccccatgccacactgccgcctcttgctggccatggttctccggcttgggggaacgcaggttcccagctgcgcccctcccccgcgcacacacaccctcccctgtccctcggaaagactaggccagggtctggggatgggattctgctgccaggggtcctgcctgcccccactcaccccagacgcttcggatgctgcagctcctggataatctccacaggactcggcttcctctcctcaaatgaataaaggcctcctacctcaactccccatggctggcccctccttggccaggtgtcgggggaggacacagtgactccccctgcttctccagctctggggaaggtgggttcccttgcccagtagctggcatggcccgtctccctcctgcccccagcctgggagtgagaagtggtgcccaaaccatggaccctaggccccgtggtccggcagtgggaccatgaccatggtatgatgataacaacggggctaagccttttcaggcacagatctctgccgtactctctccacccatttctgttgaataaccgagtcccagagagttcaagtcacacaggtcacaggtggtggggctgggctctgagtcctctgtgtcggacttttttttttttttttttttttttgagacagagtctcgccatgttgtccaggctggagtgcagcggtgtgatctcggctcactgcaacctccgcctcctggattcaagcaattctcctgcctcagcctcccgagtagctgggactacaggcggccgccaccacgcccagctaatttttgtatttttattagagatagggttccaccatgttggccaggctcgtctcgaactcctgaccttaggtgatccgcccacctcagcctcccaaagtgctggaattacaggtgtgagccaccactcctggctgcatctgacttttaatccctgctccttgcagctcctgaattatgatgtgggcacctggggcagtgggaggagagaccgaggtcctgatgccggcccatccagttctccttccagctctgccgctgacatctgttgagccttggtgggcccatctgtgaaatgggactacatttctgcagtgaagggtcccaggcttgttgtgacagccactgagacagtggggaggaaagggctttgtgagctgagtggggtggggaggggaaagcaggagattattacagtcgagatcgttagtatggaggctggatatttcttcagagtgaaagtgagtgaccgtggggccatgagggtcccgcagggcagctgggtcctggccccttcccgactcaggctccttcctgtatgggcatccgttgcctcccctgcagggaccagagcggctgtttcttttccttttcttttcttttttttttttttgagacggagtctcactctgtcacccaggctggagtgcagtggcgccatctcggctcactgcaagctccgcctcccgggtacacgccattctcctgcctcagcctcccgagtagctgggactataggcgcccgccaccacgcccggctaattttttgtatttttagtagagacggggtttcaccatgttagccaggatggtctcgatctcttgacctcgtgatccgcccgcctcggcctcccaaagtgctgggattacaggcgtgagccaccgcgcctggcccagagcggctgtttctcatgctccctaaagctgtgggcttccctggggacatcagccggtacccctgtgttatatggggaagctttcacaggcgaccctgcaagaagagggattcctcaactcaatattttaaaagtttgaaaatccctggacaagctcaccccacgggttcgttcacccagcagccctgcatgagagtcccctgtgtgccagctgtggtgctgggcttccagcctctgcccgcccccaccctcccgagaagcctgcagcccaggcgggaggcagacgctgagctcttaaccttgacacgcggtgccaagtggtgtggccgggagcacaggggtgaggacccaggtctgtgtggcagtcccaaaggtgccaaaaggggatggatgcagctggggtggtgcagctggggtctccctggcgtggagaggaggagcagggggtcacattttgtgaggagggggcccttctaccgcctggggatctcctcccctggggacccatgaagactccatccgggggactgaggtcttccacgctaaagcgtgaggacggcgctgttagtgctcctccctgtcctggggctgccatctctgcccagacctaggtccgcctaccccctcgggacacccatgcccctcccggctcctttccgggttcctcggacctgtggggcgtcgctgacagcttttccagaacgcgggcgacacctagtggacatcacgggtcacaaccggtgctccactgcacccctcccgcccctctgccctggacccagagtggaattctgttgagggcctgccccaggcccacagtgtccaggagagcacaggaagccgtcagtatggcctccaccatcctctcattgttgtcatcaccgcctctcgagaagcgctgcccttaaagcaaacagcacaggctgggtggcaccctggccctgtccctagcgggcagtgtagatgtggcaagtcgcttcacccctctcagcctcagtttcccccttctgtaaaatgtggttgataatgaagcacaccccatagggtttgaggatgacatgagctcagggatgagaatgcccctagcatagggcctggcgtggagaagggaaattttctagagtgggtgactggtgccctgggcaaaagaccttcaggtcggggtggcagacagcggcaggtagaagaaggtgttgctgatggaagtggactgcctgtgatattcttccccaaacagaaaactggcagaagcaaagctgttatttagcaagacaatctggctccctgcctgtgagtgtgagggggaaagggagcgggtgggaggaggaggagggagaggatgtagaaaggaagggtctgtggacccttgctgtccctaagccatagccaggcacccggggccttgactgaccctgcccccagctgggcctgagagccgccacttcctcggcccggccctgactatgaatgcagagaggcagcccttcctccagaggctgccgcagtaacactagctgttggcttccctagttgtggcttcctgacaagcagctgatgccacccactgtgacaacaaggaaagttctggagaaaaacaccaaggctcctagcaacaggagacaggggtgcacaattaaaaaaaaaaaaaaaaaagacatattgggccaggcgcggtggctcactgctgtaatcccagcactttgggaggctgaggcgggcggatcatgaggtcaggagatcaagaccaccctggctaatacggtgaatccctgtctctactaaacaaaatacaaaaaaaaaaaaaaattagccggacatggtgggggggcgcctgtagtcccagctactcgggaggctgaggcaggagaatggcatgaacctgggaggcggagcttgcagtgagccgagattgcgccactgcactccggcctgggtgacaaaacgagcctccgtctgagaaaaaaaaaaaaaaaaaaaaagacacattgccctgccaaagtcaacccccctaaaacacccatgctctgccaaggaagggggtctgtgatctcaggatgtcagggcccaagtaagaaaagcagagtgcatcgatcactgtgcccagagctctgtgtgtcctctcatttaaccctctcagcagccctaggaggtgggtgaggagagaggccatttctcttactgtctcctgtctctgaagagaaggaggaagtaaaagttgaaaaacaacaggaatgaagtcagtggcaagaccagccagtgccactgatgaccaggcctgaggttaaaagtttaaccacctccccccaaccccgccactctaaccacatgtgctctcaatctaccacgaccatttcacgtggaaccccttagaggtgtaagcccttaaaacggccaggaactctgtcttcggggagctctgttcttgagacgcgagtctgccgaaactcccaggcgaataaagccaaatccttccttaacctggtgtctgaggggttttgtccacggctcatcctgctacctttcttagttccctgaccgggaaatcgggtgactgatggacggtggaggcagccccttaggcagtttaggcctgccctgtgaagtatccctgtgggcggctctggccagcttgagtgacgcagatcctgagagcgctcctgggtaggtatttgccccggtgggatgccttatcagagtggtgcatggcaggcccccgtggaggatcaacgcagtggctgaacactgggaaggaactggcacttggagtctggacaactggaatacggtaggaccggtcctgggaatttccccactccgtttgagtggaagcgtagcctgatcacccaccgtgtgcccttatcggcacttgggtctcagcattgattttgatttggtttgacttgtttgcaatcggcactttggtctcagtattgattttgatttggcttgacttgtttgcaaaaaggaaagtgaaagtgagtgcttgagtttgagacaggcgagactagagtgacccctttaccctttccttcttgtagtgtgagtgttgttttgtctcgggaggaaggtgggtggaacgcaaagtaagcccactcttctaggaactatgttgaaaaatttcaaggaaggatttggtggagactatggagttaactatgacactaggaaagcttagaactttgtgtgagatagactgagcagcattagaagtgggttggccaacagaaggaagcctagacaggtcccttgtttcaaaggtgtggcacaaggtaactggtaaaggatacctagaccagtttccatacatagacacttggttacagctggttttagacccccccacagtggttaagaggataggcagtagtaatactagtggcaaagggacaaacagccaaggaagaatcctggtccacctgccgagggaatcaactcctaaagtcctgtccgacccaacatcagaggattcatggcaagaaacagcaccagtgacctcccccttttaccaagaaggaaggccttccattcctgagcccactgcacccaagcttccacaaggcctatatacccctaggccatcaagagtagaaaagaaaggatgtgaggcctcgggagaaacccctcccttggcagcctgtttgaggcctagaactgggatacaaatgcccccgagagagcaatggtatactggggtagacgaggacgggcatatggtggaaaggcgtgcctttgtgtaccagctcttcacccctaccgatctcctcaataggaagaacaataccccatcctataccggaaagcctcaagctataattgatttgctccaaactataatccagacccacaaccccacctgggctgattgccaccaggtgctcatgtacctctttaacacagatgaaaggaggagagtgctccaagcagcaactaagtggctggaagaacatgttcctgctgattaccaaaacccccaagagtatgtgaggatccaattaccaggaacagacccccagtgggacccagatgaaagacagtatgcaaaggctaaaccggtacagggaagcccttctggaagggttaaagaagggagcgcagaaggccacaaatgttaacaaagtctctgaggtcatttaagggaaagatgagagcccagcacaattctacgagagactatgtgaggcctatcctatgtatactccctttgatcccgatagccctgaaaatcagtgcatgattaccatggctttagtcaaactacagaagacattagaagaaaattgcagaaacaggctgggtttgtaggcatgaatatgtcacagttattggagatagccaaccaggtgtttgtaaatagagatgcagtaagccgcagagagcaccacagagagtgaatgccaagcccggcgaaacactgacctgctagcggcagctattagaggggtttcccccaaaggggcgagagaaggggggccccaggaaaaatacccaatctggccatccacacttgcagcgtaaccagtgtgctttactgtaagaaaacaggacattggaaggaaggggcccccagttgaaagggaaatgaggtgactctgagcaaagggtctcagacaaggacgaaggagacttgttcaatctgccagaagggttatgggacagagggggaccaggctcatgtgcccccaaagagcccatggtcaggatgacagctgggggcagaacattgagtttctagtcaatactggtgctgaacattctgtagtgaccaccccggttgcccccttatccaaaaagactattgatataattggagccacaggggttttggcaaagcaagctttctgtttgccccagacctgtaccatagggggacatgaagtgacttaccagttcctgtacatgcttgactgccccttgcctttgctaggaagggacctacttagcaaactgaaagccaccatctattttacaaagcacagctctttacagttaaagttacctagaacgggaatcatcactggtcaggcaaaaacagtacccggtccccagagaagctcttgaaggtatccaggtccatctcaagtgcctgagggcctttggaattatagtcccttgtcattctccatggaacactcccctcctgcctgttcccaagccagggaccaaggactacaggctgatacaggacttgcacttggtcaatcaagctacggtgactttacatccaacagtacctaacccatacacattgttgtggttgctgccagctgaggacagctggttcacctacctgggcctgaaggacgctttctttagcatcagactagcccctgagagccagaaactgtttgcctttcagtgggaggatccagggtca

SEQ ID NO: 96928 - DNA, 16451 bp, Homo sapiens
ccagatacagtaaaaagacacactcattattttttctagaaggaaaacagcacatgccaacgtcaacacatctttgaaaagttgccaccaacgcttcgcataagaggactactggaagggaagctgaattcaggtggctcttgtgacactccttaacccctgttaaaaaattcactgtaaaatctatactgaattttcctttaaattttggttgctgaatcaaaacttctcaaaagatttgtaaatttcagcaagaagtcagaaattccaactctaaaatgaattttctgactcaatattgaaaataaattcttaagtttagatgcttaggggaaaaacagctggagaattcaggagcctcccatattttaatacaaagtgacgtcattaccatcaaggcttccaagaactccttaaattgtgtggttaagcaacatctcaaagcacagtgatgactctaggaaggtgctatgctcctccctggtatacagattcaggtccagaataatttttctatttagagatttgatttgacttcctccttatgttaaaaagtagcctaatattagaaagacggtatatcaatttatgtgcattttcaaagctaaggctatgaattttctgtgctttacacacactaaattagcattcattttatcagatgtcttcctggagctggtttcttgttttaagtatttaactgcagattgtatggggtttcttaaaaacctgattacacttaaaattttacaattaagcaaaataatcatgcagacaaagtaggcaagatggctaaactttagaatacctggtgtaggtaaaagtttagttatgtagtcttgcatcatcttagtcaaaggttacgggagaaaacaatcccagtcagtatctgcggttcataatgaacctactgatagtgctgtaactgtttagggctgacttaaatcaactgcagtttttacggcagcttcatctttaccattcttcaaatatgaaaatgacacttcgcctcccacttatgtatgtcttttatttcaaatggtagttgttttactcaggattagtcataaacacacaagattcttgataaattctatgtcaagtttatttggttggactgccttttattcatctaaccacccctttgacacctgctgcctgttcctggggacccagccacagcaaggactttaattcagttccccacccccactgaacacaacacacacctacaggcaagctgaagttgcccaaactgtatttggtgatttccttacttgtttaaaacatatataagctcaggtcatttatatattcatttctagaggtttgtaaatgaattaaataaagttcatgttggccgggtgcagtggcttacacctgtaaccctagcactttgggacactgaggcgggcggatcacctgaggtcaggagttcgagaccagcctgatcaacatggtgcaaccccgcctctactaaaaatacaaaattagccgggcgtggtggtgcatgcctgcaatcccagctacttgggagactgagacaggagaattgcttgaacctgggaggtggaggttgcagtgagctgagatcacgccattgtactccagcctgggcaacaagaccaaaattccatctcaaaataaataaacaggccaggtgcggtggctcacgccagcactttgggggctgaggtgggtggactgcctgagctcaggagttcgcaaccagcctgggcaacaccatgaaaccccatctctactaaaatacaaaaaattagccaggtgtggcagcatgtgcctgtagtcccagctactcaagaggctgaggcaggaaaattgcttgaacttgggaggcagaggttgcagtgagccaagatcgcgccactgcattcagcctgggtgacagagtgagactccatctcgaaaaataaataaataaataaataaagttcatatttaaaaataaaacattaaaataagcttcctccaagagcagagaaaaggtttgatgcttgaggtgcaacatttgaataagtacttttaatgccagattaagtttttaagcagttgctaaaaaattaatgaggtttaatgtgacctatttaggagaaacagttctttgttgtgttctattagaaggctaatccgcctatggaaaaaaaaagtagaatcctatttctttactccttctttattgaatcgtatctgtctacaaaaggaaagggaaaatactgtgaggaaaaagagcataaagtgggtcagcagtgtgcagttataggggacagagtcacacctacctttactgaagacaagttgagatgaaaaactggggttacttttgcccctagagcagcagaaggccctgctcccctccgtagatcatgacattgtttaatggttagaagcggacattgtttaaatccccagcttaccaggtttcaccacctcgcctccctctctagggtcctattagggtgatatttgcgaggcactgtctaacccgagagagtcccgaagcgtcctgcaacaggaagatgccctggacccagtggatggtcaggagatgcgaagtaactgccagggtggcctgggcactcccaacagaccacaaatgttgatttcagaatctttggcactttccaaaatgtggctgagcagtaatttggaagcctaaatcctgactttagaaattcataagaacaaccaatgttttataaactcaacagaaagtaaaataaacaaacccagggttttacgctccttcgtgttatttttatggcaatctttcaaactagttcaaaatgttcaatcctctgccctctcaaaaatactgagttaggggtggcgggggggtgggcggggacaaaacgactaacagtaaccagcatacactgcagtttaccatagggaagagctaaggagaccttgtggcgaaagagtacaggttgctttcaggctggcactgaagtctctccccttcccaaccttctcattaaggagggcccagcaaagaaaacaaggatgtttatatttacccagaagtgtgcatggcaattgaccatcatggttctctcaatgagctcatcaggacattccagaaggtgatgcccagagaccacaccagcattattgaccaggactgagacttcgccaacctccttgcggactctttcagccgtcaggtagacgttctccctcttccccacgtcacaggtgtaggtaaaaacctgcaagttacagtggggcagaatttcttcctcaccattcccagctgtcctcagaagtccagatgaggagaaaacatgcaaaagagaaggaagtgcagaaagtgagtcacatggcgatcagtaggacaaagatcacacaaaacaaaaatactacagtgagcttcaaatttctaacgctgcaaggcttgccaacgactgagctttacagctgccttcctcccatgaagtctttgggaattacagcaatttactggataactttgcttaggggaaagtcatgtaattgtgacaagcccaatacaagtagaccacatgggatcagcttgctggagctaaagacacctgcaaagaactgatctcagcccagagctcagagaacaacacacacacactacacactcctctttttttggggaaacagtggcccaagagaaacagctcttagtctttagtatgagaaccctcaaaatggaaactcacttcaaggctcacaaatcaaaactgcaattaataatctgaactcatccaaagccaagaaatgaatccacaatttttaatgaagaaatagggatcactggcttgttctaactgggctgactcctctaagaagtactctcacaaatcaagttacaggtaaatatgcaattttaccgcataagaacttgacaatttaaaaaccaaaatcggtatcctggaaaatgaatacccttatcttttaggtttcggcagggagcacaaaaatctgtatttgctacacctccataccaccaatgaaaatggtacattttcacccttaaattaaaaacgcaggtatcaataagtttgatgataaattatcaatacaggggagaagtgcccaagtcaattttctccgtacaggtaaatgttttccctaaaaatgaaaaattttgttaaaaaccaacagccattatcaaatttcctgaaccaatatttatggttggttatggactttgctttggcttaaaaaaaaaaacaactcagattcaggttagttaataagtattcagaaatgcagattttctggggtgatcaaaaacatggaagaaatttacaacgaagcctaaatcctccaagagctttctcttaggaagcaaggcgtctttcaatcacgctcagggaatgtaactaaagcacttatcgctggcgaaacaatgtaattatgttcctcaggctaaacttataatgaaaccgtcaatactgccctcgtctaaggggttcagaccacagtaagacagacacttcttcagtctagtcagaacaacttcccaaagacgcttcagtttcccatcgcgccgcttgtaagtcggagcaagacatttctttgggatccaaacctgtggtaacaagttccctccgccttccctaccccggagggcttaggaaacccgccccctccccccgccgtggtccccagagaccgaacctccgcgaggacagggcaccttctccctggtaatacagaagtgatcgcgttcctttatcaggaagcgaattccactcgtctcccaaaagaccggtggggtgttcctttcctccacagcggggctgaccaggcagcggggtttggggcctgccgtggtagggcgcggggtggaaagaggcttgacccaacaatgctcccgcgcgggtccaggttaccttgcagcgcagcggcgtcggccgcctccaggtcgcggtagatgtggcgcaccatgccagccgtctcctcgttgctttgcgtgttgatgtcccacagcaccagcagcgcccgacgccgggcgaactccagcgcgaagaggcggcccaggccgctgccggcgccggtgatgaggcacacctggcccgccacgctcttctccttgggccgcaccagccagcgcgccgcggccagcacgaacgcccagagcactttgaaagtgaccacgaagaactccaccacgatgttcatcgcgacgcccggggccccgcacgagcccagtgcctgcgtccgcgcccaccccgagcccggcaatcgggctcccggctccggggcgcttgtcacagaggccgggacgagaaggctgcgccccgcgcccgcccccgaggtgcccgccgggttggagtgcgcggcgccgctccctgcctgcgcggggccactcccgcccgggctcggcgctgtggccccggactgtgcccgccgcggcagtcacccggctcggcgcctcctgccggcagccgcccgcccgtcccgcagcgcccggccggccggctccgctgcagtggcggtgacagccgcgagttagactactcgaactgccctcatggccaagctgctgccgcccgagcgtccccggaaccggcgcgccggctccctctcaccccgggggaggggtgcgcagcggaggcggcacgggccagcgggctgccgcgggagttgtcaactcgacccaagttgcgagagggtgggagagtggggtgcggggcggcggagcgccgggaaggggagactcgctcggcgcaggcaagcgctgcccaacgccttgcagctgcccccgagggctcgcgttccccggccctgcactctccgcgggtgtcactcgggcactgggctccgcagcgcagcccgcttgcaagtcagagcgctccgggccggctctgagcgggctccacgctccgcgctatataaccccgcgaccgggaagagcccgcgccagcctcggcatcggccctccctccgcccggcctccccgcccccgggcgcaccccgccccccggcccagcccccagcccgccagccgtccgcggagccgagccgggtagcccctctcacacggccgtggccgcaacctcagccctcctcgcacctcccttcgcagctcacgccccctcccgtggggtgtcctggcctccgcytgccgagctcggcagtcagcagagccccggccatcctcctccggccgtccggtccccactggtccctggctagccacttttcgtaagctagagcactccagaccgccccgcctgcgatcaggcgctgcggaagacagccctgtgggctggagcgacgacaaggacctcgcggagcggcgaaaggggtgtagtctgcgactaccgcggcagggagccgggagggcggccaaaagtgacttcgaattgcagctagccgtttggaacgtggcccaagaggctctcattttcctggctggaaccgtcgccgcggtgcttgcctgcggtcctggtcagccgttgccctcccgccgggcgggcgaagactggtgcatgctgggatttgtagttcgtccccatgaggctcgtcctgggaacattatggggaggaacggagcctaatcctgtcagcgcagcctggggattaggacccggagttgccaaggtgtcascactctttgctcttgaattgattaaaaagtctaatcaaatgcatatattttcttcaaacaagttttacccgaaagtttgttgaaagaggctaaatcagggagttctttgcgtctgcaaggcggctttttagttctggattcttttccggcttattctaagacacctatgagtcgtggggcttctctcgcgaagtctttaagtggacagtacgcatgcgccaacttcctctttttccggctggaaccatggagggtgtagagtgagttgcttctggtcctcttgagaatccttctccatctccagagccagatactttttgtgtcactttttctctctctggccgtagcttgcacctttgcccacctccctgcttgattgtgaacgctgtgtgacaccagtggggacctgaggctagggttgggatgcgggcggtcttaggacggaggttttggagatcccgggaacgagatgtcgggttggaatgtgtgtggaacccgtcggttggctgacggcccagtcctcggtagagggtctttcgggggaggcgcagaacctctgaattgtgttcgtccttggctggtgcttggtacaggcctccctgccgccaggcctttgctttcaacatgtggatcctgattgaaccagagtggtggtggcttgttttttttttatttttattttttaatttttgcgcttaaagtctcggggtcagtgccttgcagtagtctttcagctagtacattttgttattcgggtgttggtgtgttttttttgtttttttttttaattagtcgtcggaggccgggcctcttggttgaaatagggaaaaacgtattgctattgtcatatttgtgattgcgttttaggcaacatggtgttaaaggttattgacatggagctaaaatatgcatcgtacactgtagcatgccagagcaagtaaagttactagtgactaaagtcagtgacagcatttctggtaaacaacactgctcagtacgggagtaatacagcgctgtgagctttttgagctattgataacatttttgtttattaacgttagagagaagaagaaggaggttcctgctgtgccagaaacccttaagaaaaagcgaaggaatttcgcagagctgaagatcaagcgcctgagaaagaagtttgcccaaaagatggtaagtaaactttttgaggcactagcacataaggaggcgccttattgggattgaggatgaggtgaatgttcttggcaagatttacttcctaactgtactgagtaattgcttagctmcctaatgttacaatctgaaggtagtggggttttttggtgggggatgtaattgcatactgtggcaagaaaagatttaaaggaaacatgttgtagttttctttttaatgattggcattgctaattgtgattgagctaaaaattatgaataactgatwattggttttcagcttcgaaaggcaaggaggaagcttatctatgaaaaagcaaagcactatcacaaggaatataggcagatgtacagaactgaaattcgaatggcgaggatggcaagaaaagctggcaacttctatgtacctgcagaacccaaattggcgtttgtcatcagaatcagagggtaagttcagttttactgcattcgggtttgaatgggaaaaaaaaaaaaaaaccttcacattacttctgggagccctgattctgaaacaccggagtaacaatattttaggggaagctagaacaaggagggtgctgatcactaatggtttagttgcaagccatgttccccaagctcctatcccttctcttaatagaatacagaaattcagtgtgtaacatgagaggattcctatctgtttaggtaggattcgatattcaaaactataatggttagtattaataaaaatttcgatgaaaggcaaatgcatttctggtccgttttcaccacagtatcaatggagtgagcccaaaggttcgaaaggtgttgcagcttcttcgccttcgtcaaatcttcaatggaacctttgtgaagctcaacaaggcttcgattaacatgctgaggattgtagagccatatattgcatgggggtaagtctcttttctcctttgatttctatttgataaattggttatgtagcaacatgaattttagatgttttaacagtggtcaccttatttatgtttgctttttcacttcaggtaccccaatctgaagtcagtaaatgaactaatctacaagcgtggttatggcaaaatcaataagaagcgaattgctttgacagataacgctttgattgctcgatctcttggtaggttctatttgggggaaaatttggtattagaccatgcgataatttcttaccctcttgtggccgtacatttctcactattgtgaatcttcatgtgttccctatgattcttgatttagcttaaaagaaaacgtaagacatggtttcattagcttgaaccttatctttgtaaagccatgcatttaccttgtttattcctggttatgttttyatctcacagcctattcaaaaagattttgaataattatttcaaaactttttgcaactttaataatcttaaataaccttaaaatatttaggtaaatacggcatcatctgcatggaggatttgattcatgagatctatactgttggaaaacgcttcaaagaggcaaataacttcctgtggcccttcaaattgtcttctccacgaggtggaatgaagaaaaagaccacccattttgtagaaggtggagatgctggcaacagggaggaccagatcaacaggcttattagaagaatgaactaaggtgagagacctcatcctgagaaaggttgagttaatgttagagtataagtggtggtaatcttgaatacttttcccattaaatattgatgggggtttgaattttaatcagtgcttttgtggggagtgggggtcaactatcttaatgattacagttggtttgtttactgcttttgaggacctttctggaggaaaggaaaagcctgttttggggagtctttaaagatggaaattgggtggtcttaaaaatgtaaactcaatcattactttataactgcctagtttatgttaattgttagctgcctaaagtgttttctaatggttttcttttttcctttcaggtgtctaccatgattatttttctaagctggttggttaataaacagtacctgctctcaaattgaaatatattgttgtatttgtgatttgttgttgttgttgttagcctgcctctgtcttcccttaactactgtggcaagtgtggtgtgtgataaaattaagccaaatcaacagcccatttcgtgcaaaatcagggtcgagtctgtgtgaaagacatctcttgggtttttaaaaggcttttctatamaaaagattttaattttttgttttttaactgtgctgagtgattcgaaatgggtttattctaagaaagcctgtttcacaagcatttgtacatgatttgtcggtaaggtaatccaactttggtttatggaaaaaattgaatttagttgctaaaatttatttctcgggccttcgcttgtttataaactgccatgtaaatgtgttgttttccttttgcattccatttttgtgttcttgttttgcatcttttgccatacttacgtgagttactaataattgttacatactgtgggtattatgaaggaaggcatgaaatttgtgcccagggatgcaaattatttcagagcatctgatgaaattaatgggcaaaaacttcaaaggtttttttgtaaataacattcctttatacttcatgtattgtttcacctagactagtgaacaatgtagagtgtaacatgaagtacatagaatgagagtaaaaatgtttgtggtcctcatttagttgtcaaaggtctgacacactgtgaaacagctcccttagtaattattttggtactactgctccacagtcatttattgctttttaatattcgaaagttgctagacaaatagaatttctttgagttctttgttcctggttttgggacctatttctctggcttagtaagtttgtttagggtcagtgaattttggagagaaatcaagatgatcgtttataaaaatcattttacatatttatgattgtatcagtgttttgctagatgttttttgtcttagcagttgggtcaatattttgaaatagtacatggatatctaggtagagccaaagagtttattttttaattttcctttgtagagatgagatccacaccagcctgtattccccagcatgttactgaactcctggcctcaagcaatcctactgcctcagtcccctgaatagttgggattacaggcatgacccactgcctccagagggtttttaagttataaattcagttttgtcttactgctttggtagatagagagtacagttcccagtgttagcacatccagtgtcatgaagggtagttgtgcctcagaagatgtcagagcctgtttggcttccaggttttagaggaatagtgagggccatcagtggcctctgcagggtcagaattaagactaattatggaatgaagttgtacagatggtgtattgcttgcttaatctaggtgcaggtgggtgggtgcatgaaatgtgggaagtcttcattgggataggaataagcactttatatacagagagatacttagcaaagctttttttaaaaaaaaatatataaatatatagcccatgcagacacatattgtaagtgtggcctggggccagggaggatggggaaatgtgggaggggttgcagagaaccaggattcccatagagaacagagtaaagtgggataaccaatctggttttataagaggattgtgaggaacaataataggtacgaaaatgtttgtgagctggtggaacctattcaaatgcagattaacacctgattaggaaactcacttcttataaatgtcattgctttcaagggatcctcctctggaaggcctaaccaaccttaggggtctgggcacccagtaggttctcctacaagattacacctcatatatgtttatttcctgttcatccttctaaggtccggctttctctagtggatggtcccttagctatctcagtttttataaagttgtcttggactcactggcctttaaccagtgttaacctagttagtaacttctttgaaggttcatttgtggttcgctggattaggagtgttggcttcggagccagagtgcttgggttcatatctagtctccacttatttgttagcgtgggccaataaataatctctgtcttggtttccatgtcagcaaaatggagataattttgcctaatttcataggattttaatgaagattaaatgttaacaggtcctgtaaaatgcttagagcagcgcctagctcgaaagtgctcaatgctgctgtgcagtatagcttcagcacttaatgtgggcacacaacagtgaattacggaaaatagcctctgctttcaggtatcagtctgatgggaagacaggcaacagatacagtgaaatgagtgccctggggatgtataggatgtgatagagcttcttaggggtgtctggtgtctttgtgggcccacctccatgggaagattgacagctttctgctcccagtggttttccttagaaatgtggtgtcaaagagccaaaacattcctctcatgtgcctcccttctgttaggtagtaaactttaaggccaggccttttaatttctgcccatttgctgacatgtaggcactcagtgttaagtgaatgtattagttttcttttgctgctgtaacaaatgaccataaacttaagtgaatttattgttttaacttttctggaggtcagaaatctaaaataggtttcacagccaaatcaaggggtcagcaggcctgtgttacttctgaagactccttttctttgccttttccagttctgggagccccttgcttttcttggttcgtggcatctctgcttccatcgtctttgatcttcctcctgcctccctcttaatataaaaacttctgtgattacattgggctacttgaataattgaggataatctccccatctcaaaatccttaattcaagcacacatctacaaagtcccttttgttgctatataaggtaacaaatttacaggtccctgtaattagggcatggaaattgggaggcccattatttgatattttatttctggctccccagctatattctttgttcctcaaaagtgtcttcagcctccaggtctgggtacttggcttttcattctggaaaaaggtcttttctgacacacgtcttcatatatcaccttttttcatagcattaattactatctgaaactgctgacttgcttttcccagccattctccaatgtaaggtttgagtcttagctttctctattctggcacttagaacaatgcctggtgcattgtaggcacttcacttttttaagggaatctaacctcatcaggaaaatagatatttaaaatcttgagacttcaattactggcatattgtagtccttgagtatttggtgatgggggatggcgacaggaggaatggggtagagtgtggatttatggatatatatttctgtatatatagtttactttggaggactcagaaattgcattttgtaggaataatgatttgtaatagtagaaaaccatgttaggagagagtacaggagatgcttcatgctgtgaagatttggcaagtttcacagaagaggtagaatttggtcacctgatgataggaacagtttgagaaatggcatggagtttgggaagtgtcaggtaggggtgtgatagcagaactaaacaggagaccatttaataaacatttgatcacttgctgagtgccagtgtatcacttgatccacataatcctaggttagtgtttctccactttgattgcaaccccagaactaaattcttaattggttttgggatgagccctagacttttttctaattaagtactccacatgatttttaatatgcagcctagtcctcttgttaggtgggttaactttccctcacccaggatcacataactaagtagtggggccagtgttacgattccaggcctaatttgagtgttaaaaaaataaccaaatgacctaggagaggtttgtgtagagcttaataagaatggaggaaagtgtgttgagagcagtttcaggagtttttgtgggctctgaaaccttgttaccagggataagcttgcagctctagtggggagtcaagtcatgaaggcagaggctttatatgataacttaatctggcaagagtacagatgctaagatcccactgtgcaagacagggtgctaggtgtccaagccagagagggcacacacacctaaccttttataaaggaaccaaaacaaaggagtcagaacatggaatttgggtggactcgtgagggaactcgtcattgttgtcatttacctaaaattgggctagtcaggtattaagtggctaatatttgaaaggtacagctcatcagtactctggaaagcctggttattttgaacctgaaaaataagtctttgatacaagctgatgtgcaaacaacccagaaaattgaattacaccaagcttgcccaactgccctctctttgccctattgtgcttcctggtgctgtttgccattgggcccctcaccttgtgtcaccactgaccagtgttcacccagttttgattcagctcactcccccacattacccccatactcggcagcagtgacctgaaggcagaggcactagtgctggtcgaggagtcccggtggcctccgctgcccaagctgtccaagcacccgtcatggccctgaaccctaacactgggccccttgccctatggaactgaggcgcgaggccccgggcgcctagcaactggtgtgcgtagggcaggcagcgctgcagcctcgggagacgccggccgggccgggcccagcgtcgcagggctgctggctgcggggcatgctcaccccaggagtggtgaatgtgggagctcgcggccacctgcatcacctgtcccgccccgacgccgtggccagccctgcgacaaggctggactgggcggggggctgaggtgggcaccgggctgccgctggctcccacactgcccgctgtgcccgctgccccagccacccctgctgccggagcctcctacctgggccgcaacggccaggatcgcaaagaaatccctcccctcggtgcagctgcgggcacagtgagtgcgggtggctggcccgtctcaggacgagccctggccaaggagcgggaggctcaggggacttgccaggtcagggctggatgggaggtcgggtccagaggtcatctagtcccactccctcccacgaaggggacactaaggctcagagaggcacgtgggtcactccgaggatgctctagatgcactttatgatgggagctggcagaaacatctgagcatggggacctgaggaaggctactaggtggggtcgggggatgagattgagggaagcgggtccgcctgccggatctgtatattctttctgcaccccttacttctggtaagtaagtacttacatctatccgttaagtggacacacccttacagattgaccctcccaggcttaaactggagtggggggaacgtgtttactttccttcccttgcctacccctgtgtcttcccttctcccacacttgcacccagccatgcagtgggacatggaagaccaacccagttagactgttaaaaccctctttctgttgccaattttactttgaaccatttctgatttacctataatttgtgtgtgtgttacttttctcaccaggagttaaacattctagaaattatttgtgtaacataggtagtcttttctactgtactggtcattttcccatacaacctttttgggttcatagacatcataaaaactggagtctccagacaaatgcaaacaattttgtgagcacttttagggtattataatccctaaagcacaagaattcttgctcccctttattgacttgttatgtacattgttaacaagttaaaatctcttgttacaatggtatttcttcagaaatactctgacatttccttttttaagttcttccttacatttttcaaattacattataatgtataagtacttattgaaacagtacggaagtatatggagttagaaaggagaggtctatgcctttctttactttttaatccttgttagaattcatttggtgttcattcttccttcttttttcctttgttttttggtcataatggaatcataccatgaattattttgagaaatgtcttttttcacttatgatggagcgggccaggcatggtggcacacgcctgtaatcccagcactttgagaggccgaggcgggcagatcacaaggtcaggagttttgagaccagcctgaccaacatggtgaaaccccgtctccactaaaaatacaaaaattaactgggcatggtggcgcgtgcctgtagtcccagctactcaggaggctgaggcaggagaattgcttgaaaccgggaggcggaggttgcagtgagccaagatggtgccactgcacaccagcctgagtgacagagtgagactccatcacaaaaaaaaaaaaaaaaaaaaaaagatggagaataccattcatatcagtttacttaggtctgcactgagtatttcatagtacagatgtatcagtttatgtgaccattcctcattgagattggtttcaatttttccctgttacaaacaatgcaacaataggcattcttttttttttcttttttttttttaagacagagtttcgttcttgttgccc

SEQ ID NO: 96929 - DNA, 23845 bp, Homo sapiens
gacctcacatcgccataggagctgcttatcccatctgagcctcagttgtagcctctgtaaaatgggcggcacctgtctggctacaagtggttttagagactaagcatttggttctctgtgagattccagatttcccagaaaatctgatgaaagctgagagctcgctccctaggaacatgctgagaaagagacaagcagcccctgacatcccagagctggcttgatacccacggctagaccttagtgccctcctgttgaacacggacaatttcacaaaacatcagtatcagacaaggccactctgactgtgatggatcgagacaaaaacaagatcagtatgtcatcttgtcttagcacagacacatgaatacattgtccaaaccacaaaaatgaccaagtattccccgacttggctatacaatgcactttttttttttttttttggccaatgacaactttagcctccactctagttagtctgccctccttctagataaaatttattgtgatatccaatcatagaattagccccactccctatccagagcaaagccctgcttccttaaaccatcccccaaatcactgaacacaagccccaatcctattataagttctaactcccttttactgagacaccccacggttccccacagtgtacaccctcccttgttgcaatgagcaataaacccaacttgttcaaccacacatgtgttcctggggggttttggctagaggactttgacagcacttacagagttggctgtaagctcaaggactctttggaaccccatctctgcatgcccctagtccacagactcctaattaagtggccttgagtctagagcatcagtaataccattaaacagatggagaaaccgaggtctagagagattgacttcttcaaagtcccattgtgagccaacagctgggtaggaactggaaactgtggctgctggtcccaaggtgaggtatgtccagcagacatagaacccgtccccaagctccccttggccacaacagtgttctccctgcacaggccacagaactaaccggcaagatacgcacatgcgcatttctgaaggatggcttcattctctccctgtcctgcctttctctctgtagaatggggcagtgagatcccaggttgagggataaaggaacccccacaccggggctaccctcaaggacgctcacacactgtggtctcagcttaaaggagcctcatcttccctgtccagctgctgcgtcccagagtgtgcaccctcacagaccctgtcaccagtagcacctcattcccatctctcaatttccctctgcatttgcccaggtcaggcgagctacctagaacccccctcccttcctttcttgaccttgagttctcataatttttcttcgagatctagcgtggggccaggcatggtggctcacacttgtaatcccagcactttgtgatgtggcaggatggcttgaggccaggagttcaggaacaggctgggcaacatggcaagactccatctctagaaaagaatttttttttttttttgagacggagtattgcagtctagctctgtcacccaggctggagtgcagtggtgatctcagctcactgcaacctttgcttcccagattcatgcgattctcctgcctccgcctcctgagtagctgggattacaaggcgcccaccaccacacctggctaatttttttgtatttttagtagagatggggtttcaccatgttggccaggctggtctcaaactcctgacctcaggtgatccacccatctcagcctcccaaagtgctgggattacaggcgtgagccaccgcgcctggcccagaaaagaatttttaaaagtcccagctactcaggaggccgaggcaggaggatcacttgagcccaggagttgtaggctgcagtgagttatgattgagccactgccctccagcctgggcaacacagtgagaccctaacaatcaatcagtcaatcaacaaaataagaatctggccaggcacggtggctcatgcctgtaatcccagcactttgggaggctgaggcgggtggatcacctaaggtcaggagttcgagaccagcctggccaacgtggcaaaacccgtctctactaaaaatacaaaaattagccaggtgtggtggcgggtgcctgtaatcccagctactcgggaggctgaggcaggagaatccattgaacccaggaggtggaggttgcagtgagtggagatcacaccactgcgctccagcctaggtgacagaacgagactccgtttcaataaataaataaataaatataaaaaataaaataaaataagaatcttatgagtcccagagagagagagagagagagacaaagctcttcctcacagtaaaatcccaggtatatgtgtaaaagaaaaatcattatttggccaccatcagagtagttattgcttcaggcaagaatcaccaatgaatgctaaagtagtgagtaaaagtttgatttaaaaaaaattgcagagttacagtctcaaagtatctcccgaaaagctacttattaattacaaaaggggatcatgcctgtaatcccagcactttgggaggccaatgcaggaggattgcttaagcccaggaatccgagaccagcctgggcaacatagtgagactgtttctacaaaaaatttaaaaattagccgggcatggtgactcacacctgtagtccttgaagattacatgagcccaggagttcaaagatgcagtgaaccatgattgtgtcaatgccctcaagcttgcgtaatagggcaagaccctgtctccaaaaaaaaagaaaaaaaattacaaagggaaaaatagtaaatttatactggtgaaaactagaagaccactttaagcaaaagatcaatgctaatactaacaatttcgagactaactgaaccctcctgcctcctgataacgctgagaacacagcgtcacttctgtggaattcctgccaaaaatgcagaattcaaatctaatcatgaggagacatcagataaacccaaattgaaggacattcttccaaagaactggtctgtgctctcccaaaacatcaagatcatgaaagttaagtgaagatggagacattgttccacattggaggagactaaaaaaacctgataacagaatgtatcttgtgaccctatgattcccttttcctatacaaggacactattgacatgcccaccagggtggctagaaccaaaaagtcagataacaagtatttgtgaggatgtggagcaatggaaacctcatactatgctggtagcaatgtaaaaaaagaaaaaaaagtccttgctcttaggatattcatactgaagtatttagttaaaagggtgtcatatccgcaaccactaacaaataattcagaaaaatcactgtatatcattcagaaaaattatatatatgtaaattacatatgtatatacatggggagaaagaaacggacagagacagagagagagcaaatatgttatcattataaggcttggcatttttgtcagtcccataagtgaaaaatagtatatcattgtttttaatttgtatctctttaattatggagagctcatctaaaacaccccagaaaccacaacctagaatgaccacagacatttattgagtgtccaccctctactaagctccagtgataaaaatatgaagcacaacatctggtagatgtaaaatggtattatatctcactgttgttttaattttacatttccctgagcagtaaagagattgggttatcttttcatatattatacatattgaccattttaggtttcttctgctgtgaattacctatttgtacccaatgtctattgccaagtgtattgtttgtcctcttcggatttgtagatgttcgttatatatcctaaaacctagatcctacttctttgtgacacaggtcaaaagcctagatggaaacaatcaagtccgcaaagcccaggagcacatgtggtaagaatcttccagttttaaatgccaagtcttgcaattgagggaagtatttctggtaggtgctgtgggtcattgttgactcaacttgagtgggtttgacaactgagaaaaaaattaaaatgaaatttaattcataaaatgtatgtcctgtattctgctgttaaggaaaagaattgatatttgtgcatctggtctaagctattattccttatatatacatattcttaccgtattaaatgttttttgtttgtaatacatgaatactaatttatgagctagaactccatttaacttcatgttaaaatagagagaaaatatacatttctcttcaattaccattggtgtttcccagcaaaaacctgccaagcccactcttttgtttaacagaaaaggacaatggagacgggtgagtgaacatgacttgcccagctccatacaggccattgttaatctgattaaaatctgtttcagttggctgcccaggtcagggtggcgtccagtttgacctgggcttccttctcccttccacgtcacagctaagcatgtagtgcagtaagcgcccagtaagtgctcttttggaaaaataggcccttcatcagcctaggtacaaaggggaatgcctagaaactgcagcagtagggtaggtagaaggcgggtgctacataaatctttagtgttggtgcagatagaggtgcggatggggccagtgtaagcgctttcttttttattttatttatttatttatttagagaaggagtttcgctcttgtttatttatttatttattttggagaaggagttttgctcttgtcacccaggctggagtgcaatggcgtgatctcggctcactgcaacctccgtctcctgggctcaagtgattctcctgcctcagcctccggagtagctgggattacaggcgcccagctaaattttttgtatttttagtagagacagggtttcgccatattggccagcctggtctcaaactcatgacctcaggtgatccatccgcctcggccttccaaagtgctgggttacaggtgtgagccaccacgcccagtctttatttatttattttgagacggagtttcgctcttgtagcccacaatgacgcgatcttggctcactgcaacctctgcctcctgattctcctgctttaacctcccgagtagctgggattacaagcgtgcgccaccacgcctggctaatttttgtatttttagtagagacggggtttcgccatgttggccaggctggtctcgaactcctgacctcaagctatcctcctacccttggcctcccgaagtgctgggtttataggcgtgagccaccgagcctggcccttaagagctttataaatgccccccttttaagtgctcggtactagcctccctctagttcacagagaacatttactagtcgctggggtcaccttcgaagcaaagagtctgctggggaattaagcatgcaaatcacttctcaacgacgacacgccaagtgctcacagctcgtccccaggggaagcacaggcgcctaatttgtgttcctaggtgacacagtcattacttataaatgttcctggccggtcccaggaggtgggagggttgggagttacttcggttctctcaaaggttggggaaggagagatctcggtttgttttcccatctgtgaaacggggacaccacggtatttagaggacgtgcgcgggtgactatttgggggtgcagcggcttccctcctccctcccccatctttcccttctcacttccaaggcttggaaatttggagattcggaagtttgttcttggatggccagaaatcctccggaggcagacggtctggggctgaaaccgccacaggccggaaaggtgcgggcgtgaacgtcctgcgcgccgacgtccccccgcgccggtctcccctcaatcctcctgctcccctcctccgcgtccccgtccccgcccccctcctgctctcccattggccgagccggcggccgggccgccccgggatttaaagggcccgctcgccgcgccgctctgggagccgctgctggtcccggccttgcggcctgcgggggaggctgcccggaggaggcagcggcggcggcagcgcgtcctcggtccccaggaccacggcttctttcctgccaggtaggtcgccagtagtgcgcacgcggctccccagctcccatccctgggccggcctccccaggcggatctgtagcgcgagtgctaggaccccctccccatcacctttccgactctccctcaggctatgtctcctaccaccacctccttgcagcccccggacctgggcaggactttgttggcggcctctcgccgggtggggatgagatggggggcgcggaggatacaggacaccccccctccccgygccgcygcatccatacaaggagagatgcacacggcccccaagtgtcacagaatccccctctctgccctccactcagagcgactctaccttggaaaccagggattccccttcccgtcgcccgccccatttgatatatgggcctgaaatgtatgccatcccatcaccatcggactggactgttcacagcactggagagacagaggtccttcattcactccaggtcacaggctgtgcgtgtgcatgccgaacacccacatgcacacagttggtggctcagtctgatgtacctgacttctcacgccttcccccagtcctccagtaccgtgcctctacatgggctgggcagccccaaactgaaatgtgagtgccagagtgcatcctttaagcgaggtctgccccacggacacccgctccctctgtgtccctgctttgacagatctatccatctggccatccatccgtgggggtctgcaatggccacctttagccgccaggaatttttccagcagctactgcaaggctgtctcctgcctactgcccagcagggccttgaccaratctggctgctccttgccatctgcctcgcctgccgcctcctctggaggctcggtaagtgcctgccataccgtgtgccaccatgccaggccatatcagacctcccacattcatccatatcgagccacaccttaccctgtcacatcctgccaggccctagcatgtccaagctggaccccaacatgttcagccccaccacatcccaccaggccaaaccccattccaccataccacatcctactatgccagccaccccatgccatgccacaccgagccacatcctgccatgccaagccatgcccttcagtattcctgagttctgggattccagaaagctgagattcttggatcttgggattctgaaatgtctacatcccaaggttataagacattggcatgctgatgtcacagggttatggaatcccaaagtaccatgattacagcgtttggagattctgacaatttgaaattctcacattctagacttctaaaatgttggcattgtggatttctataatcagggcatgatgcgatttctggattctaggattctgaaatgtttccacagtcatagcaggcctgtatcttaatgaaagattccaagtccccaagattcctataggaggcggagatttctggaaatctgagatccgaaggttctacactttcttttttctttctttcttttttaattttaaatggatgttctattttttcccaggtttattattttgaaatttttcaaagctactgaaatgttgaaaaaatagtacagtgagcacccacgtatgcatcaccagattctctgtcaacatcttgccacgttagctggctctatctgtctatctatctatctatctgtatatctatccatctatctatctatctatctatccatctatctatctatcatcttcctgaattgcctgaataacctgctgacatcatgacactgtaccccacatccttcagtgtgtggcccctgagaacaaggacatcatctcccacaaccacatcctccaccatcaccccacaagacattgaatctggatacaataatgttatcctatataaattgatatttgaatttcttccaaggtcccccaaatgccctttatagatgtttcttttctttaaacccaggccctgccaccctctccagctccccaacacctgctttgggcccctccaatcccactacattccagcctgaaggcctttgccctggctacgccctctacccaggtcatcctccccttcctactagcccaccaaccttctctttcttgttctccctctctctctccctccctccctcccttcctcccactccctctctttctctctctttctcgttctctctctccctttctttctccctttcacccaaagggttgccatcctacctgaagcatgcaagcaccgtggcaggcgggttcttcagcctctaccacttcttccagctgcacatggtttgggtcgtgctgctcagcctcctgtgctacctcgtgctgttcctctgccgacattcctcccatcgaggcgtcttcctatccgtcaccatcctcatctacctactcatggggtatgagtatgcatccttatcctcacactgttggctgaagtgcatgggtgggtccccaggccccatatgaagttgtccaagacagggagggtggtgagattccccggagaaagaagggagtctgggagaatcatttgcctatgaggagacacagaacaggtaggacrtggagtgtccctggagaagggaatctgggagatttgtcctttcacaggactgtaagggacaggttgggcatgggctccccctggaggagggagcctgggagaatttttccaccatgagactgttgtaggacaggaggaggtagaaccctctgggcaccttggacccccttcccctgtcccccatggtctcagaggccatgagtgtcatgggaccaagaccagcacctttttcctcagtgagatgcacatggtagacaccgtgacatggcacaagatgcgaggtaggtagccctgcccctctcacctgcccaacccccctgccccactcctcgtctcctaactgcccccaccctgtgcctttcctctcctgcttttctccctcacctgcccaccccactggacgtgcagacctcacattactcttgggtccrtgtctctttccaccgtgcattttcccgaagtctgtctgtctcgtgtcatgtatgtgcctgactctctggagtaagggcatctatctgtcctgggcttccttgcccacctgcctatctgtcccatgcccacctatccatccttgtgcccgcttttcctaccacatctcacctggtgcacctcctccttgccatgctgatctgctctctgcccatccacttgaccatgggcaccacacataggggcacagatgattgtggccatgaaggcagtgtctctgggcttcgacctggaccggggcgaggtgggtacggtgccctcgccagtggagttcatgggctacctctacttcgtgggcaccatcgtcttcgggccctggatatccttccacagctacctacaagctgtccaaggccgcccactggtgaggtcctgagtggatgggtgggcagggactgtgggagccaccctggggcagcactcatggagtgcttgatccctacagagctgccggtggctgcagaaggtggcccggagcctggcactggccctgctgtgccttgtgctgtccacttgcgtgggyccctacctcttcccgtacttcatccccctcaacggtgaccgcctccttcgcaagtgagcacagccttygaggcccctgcccagcaatgagggggttgggtagggacccgcggtttccccagttctgagcctgtctcttaatgcttctttctgtcttctgttactacagcaagaaacgcaaagccaggtaaatgagggcaggtgtgagggcacgtggagtggggctgacatgagtgggggcagagcccatgaccaatgggttctgtgtgtccaagtgtgtctgaccgtcaactccatgactagacagagactgtggttggctggctggctgaygaagcttggctctgtgactctgtttgactgacactccaacacatactgtctctggctgtccatctgttcagctgtctcgctgttagaagcaagtcatattaactgtcatggagagtgacaagtatgtgttggttgggtgactttaacctgtcagtgactctgtctagggatatgtatgatgtatgtttgtctattggccactgacccccgaatgtaagcctgtgtggctgtctggctgtgccatcatcagtgatagggtatgtggctgtcattggataagataaatctgtgttcaagattctgactttttgtagctttggccaggaatgggtctgactgtggcatgtcatatgcctgtctgtggagttcatggactacctctgcctgtgtgtctgccttccctgatggcttggtgttgtctagctgaggggttgtacccgactctggtctgtgcctgtctgcaggactgactgcctctagtttgactatagggtttgatctggctctttggttgtatggcccctcccctactccctggctgctgattaggtctaatgccgaatgagtctccaaaaggtcaagtgacttgaccagtgtcacccagctaagcagccaggcatgaatcccaggcctaacttcagaacctatgctttttccaacgcaggatgctgcctgtttttgaccatgtctgattacaactagtagggggggtgtgtgtgtgcacagcagggtgtttgatggtctctgtgcccagctcagggatttttggctgtcctgtagtcgctgagtcaggttagagcattgcaaggctgggagtctgataagatttgtgtctggctgttagagggtgcaggtctgtgaagtcgggcctctgatggtggctggctttgkccgtctggccacgtgagcctgcagggccatgccatattataggatagctcatgcatccatttgagccacataagactaactgcctgagggtggatgtctgtgtgtgactatcatagttcaccttttttgtggctacatttcatctgtcttgtctgaacaattcagaccagcctccagggcctctctgactctcttttctttcttctctgctgccttcctgacccctgggggccctaggggcaccatggtaaggtgagtctacagagcggggcccaggatgctgacatgtggtggggtatcatgttgggacctgaacgtgatgcctctcacccctgcccctttctccccaggtggctgcgagcctacgagagtgctgtctccttccacttcagcaactattttgtgggctttctttccgaggccacggccacgttggcgggggctggctttaccgaggagaaggatcacctggaatggtgggggggcttggggaccccctctcccacagggtgctgcctagaggagctgcagggaggagggcgggtgctcccaggggagggaacggccaagacagaagtgtggcggtcagatgagttgagatcccaaatggatttgcatatctcttctgcccccagggacctgacggtgtccaagccactgaatgtggagctgcctcggtcaatggtggaagttgtcacaagctggaacctgcccatgtcttattggctaaataactgtgagtcaccaagtcaccactccagctgtgttggtaatccaggccctttcatacattcatacaacatttactgagcaccttctgtgtgctaggcacccaaaatccctacccttgtcgagctgcagttctcctgggggggcagatgataaatacgagaaaaaaaatacataatagctcaggtgttgataagtgctatggttaaaaaaaaaaatttttaaaaaagcaggtaaaggtgatccaggagtgctggcaggagataggagtggggagggtagggtattgcaattgtaaaaaaattagccagggcaagtctccctgaggaggtgacattggagcaaagatgcaaaacaggtgagggagcagggagcgcagatatatgggggaggattgtaacagatgcggggacagcaggtgcaaaggtcctgaggcgggaacttgcctggtgtgtggggaacagcaagaaggccagcagggcaggagcagagtgagccagggtccagtggcaggcggtgaggtcagggaaggcccggagggcctcatgggccatggagaggactttggctttttctctgagagagatgagagccacggcagggctctgagcagaggagggccctgggctgactcgggttgcagcaggatccctctggctgctgtgaggacagactgagaagagggatcgaggatgcagcagtgaggaggccgctgccatcatccaggccagtgatggtggtggtggcagtggatgtggagaggagagctcagattctggcatattctgaaggtggaactcacacaatttgctgaatttggatgtgggagtttggggagggcaaatcaagggtaattcccaggtttttgccctgaggaactggaaacgtggagttgacattgactgaacttgatgagactgggaggagcaggctgggaagatcgggagctgggctttgggcatgtgaagtttgaggccatctaaggactttatcctgggggctccaacaggttgtgggtattctcatcctgctgatggccctccaggaggggctgggggactttcaggagaattttatcccacatctcttcccctccagatgttttcaagaatgctctccgcctggggaccttctcggctgtgctggtcacctatgcagccagcgccctcctacatgtgagcagggtggagcaggatcagggtggaagctgggtgggggcgggtggcagggcctcttcctcactcatttcattgtcatctgcattcccccagggcttcagtttccacctggctgcggtcctgctgtccctggcttttatcacttacgtggagcatggtgagtgcagggcccagcccagccgttggatagaaggttggtgggggggctggagacagcctcccctgaggctaacctgacccccttacctctccccaccaccctagtcctccggaagcgcctggctcggatcctcagtgcctgtgtcttgtcaaagcggtgcccgccagactgttcrcaccagcatcgcttggtgagggttcagcctgggcaaccttgtgcccaacactccctgtcaaaaatgttccttctatctctatcttgtatgtgtctcagggtgcccaccttcttcttttggtgcctgagccatccccataacctctcctctattcgctggcatccgtttccctaacaggcatttatcgagcatctgctgtatacacacctggcattcgtttcccccagtgaacatccgttgagtgcctgttggtgctctaggtgctggagacacggtgaatgaaacagactgaagtcccagccctatgggacaaacattttaaccgggcagacagtagataaaaaatgagtcagtaaagtctaataatagtgtgtcagattgcaagtagtgctaaggagaaaatgtgtagggcaaaggggacgggaagtatgggggtgatttccatttgaaatagggaggtcagagaagcctccctggtgaggtgatgtttgaggcctttaaccgaaggaggtgagagagggaaacgttccaggcagagagacacccagtggaaaggccctgaggtaggagagggcctggaatctttgaggaatagcaaggcagccagggtggcttgagcagaggtagggtgaggaggggagatgggtgggaggcatgggccctctagatcatggtggggatttggttttgttgtgtgtttttcattctgtttgcaataagaagtacagacaacttcatacttgtctcccacccaactcccgttcattactataaagccctgactcaaagccctgccactcttcctcctctgcctggagactcgcacctcccccaacccaggatgccctcactgtgaacagtaccctcatcttggatgcctctgcataggaggctccctgaaccatctcttccctatctcagggggtaccctgggcatcctcagtcctggaacccactgtgccctgtgtgtcccctgggctcccccgtgcaggaggaggtgggacacagtgagtaggtccagttgccaagtatatccatctgtcccccacagggcctgggggtgcgagccttaaacttgctctttggagctctggccatcttccacctggcctacctgggctccctgtttgatgtcgatgtggatgacaccacagaggagcaggtgaggtggggccctgggctgtgtggttaacmaagggtggcgctatctggcggggggaaaccatgaggacaaaggctgggaagctgaggcctgagctcctcagactgtgctgcttcgcctgggcagccagtgctcctcggtcctttcccatagtccctctgcttgagtcacactgttaggtcttttatttgggtgaagtgtgcaaaatatgtttatttattttacttataaaataacttttaggctgggcatgctggctcacgcctacaatcccagcactttgggaggccaaggtgggcagatcacttgaggtcaggagttcaagaccagcctggccaacctggcgaaaccccgtctctaccaaaaatataaaaaattagccaggcgtgatagcatgcacctgtaattccagctactcgggaggctaaggcaggagaatcacttgaacccaggaggtrgaggtcacagtgagcccatgccactgcactccagcctgggcaacagagcgagactctctcaaaaaaaaaaatcactttatagagatggagtggaaaatccaggttttacttgtgttaattatttcacttcattattgtttaggtagaatttgcaagacttcttaattttttttttttttttgagacaaggtctgtcacccaggctaaagtgcagtggtgtgatcacggcccactgcagcctcacattcctgggctcaagccatccttctgcctcaacctcctgagtagctgggactacaggtgcatgacactaagcccggctaatgtttttttaattttttttgtagagacagggtctccctatgttgcccaggctggtcttgaactcctaggctcaagcaatccccttgcctcaacctcctaaagtgctaggataacaggcatgagcaccctgttttatttaatttaaatatatatatatatttttagacggagtcttgctcttgttgcccaggctggagtgcaatggtgcgatctcagctcactgcaacctccgcctcctgggttcaagcaattctcctgcctcagcctcctgagtagctgggattacaggcacgcaccaccatgctgggctaatttttgtacttttagtagagatgggatttcgtcatgttggccaggctggtcttgaactccaggcctcaggtgatccacccgcctcagcctcccaaagtgttgggattacaggcgtgagccaccacgcccggccaaaaaaatatatattttattttacttaggttgagtgtacaaaccctggattctgcactttaaaatttttcgttaaaatgtatgcactatttttgttcatgttgagtatgcaaataccagattttactcctttttaaattaagaacaatttaaaaataacatttattcatatggctcttgcagaatccaggtttttgcttctcttttagttaggtttcagtcaaaaacaaaactttgtgttttttgatattaaaaagtttttaattcaggttaagtgtgcaaaatctgggatttgcttttcttttttttttttgagacacggtctcactctgttacccaggctaaagtgcagtggcacaatcatagctcactgcagcctcaaactcccaggctcgagcagtccacccacctcagcctcccaagtagctgggactagagatgcatgccaccacacctggctttttgcttctttttaaataaagtttttgttttgttttcattaaaatattttaaaatagtgaatgcctatcatgtgcttcaaaaaccaaacagtattcaagatatttagagaaaagatttgctcccaccctctgccccctaccctcttacaggttacatggtgagacggggtttcaccatgttagccaggctggtctcaaactcctgacctcaggtaatccactcacctcagcctcccaaagtgctgagattgcaggcgtgagccaccgcactgagcccacttttatccttttattaaaatatctttccaaaatttaagcatatcaaacaaatataaaaatatattttaattctacccccttgccagtttttaccctaaagataacacatgaatgatactgttctgcaatttttgaaaatcttccacatcaggatatagtgtcctcattcattttttccactatgaggaagtgacacagtttattttttctcttatttgtggacatcaggtaatttctagtcctttcctattgcaagtgatgttgcagcaggaactctgtacccaagtggatccacacaggtgtggacagatctgtaggatctgttgatagtctcaatggagtagtacttttgtgctctcccaccagcaatgcctgaatgtgcctgctgccccaccagtacagagtgcctctcagacttcctggatatgtttgccacttcaataaagaggaagatggccgggcggggtggctcatgcctgtaatcccagcactttgggacgcccaggcaggcagatcacttgaggtcaggagttcgagaccagcctgaccaacatggtgaaaccccatctctactaaaagtacaaaaattagctgggcatggtggtgcagcatctgtaatcccagctactcaggaggctgaggcaggagaatctcttgaacctgggaggtagaggttgcagtgagctcagatcgtgccactgcactcaagcctgggtgacagaatgagagcctgtctcaaaaagaaaataaataaaatgaggaagattattaatgaggctgagcatcttttcatatgtttaagagccatttgtttttcctttactggaatgacctattcaccttctctggcaatttttctttccaaaaaattaatttttaggagctctttatatattagggagataacaggtcagagaatgggatcactttgtttttaaaatgatttttaaagaagaagacaaaaactatatctggtcacctttcatatgtacctaggcccttctgcggggcctcgcctagagcagtcacagaaatgtccttgggcaaaggatgggttttcctaagaacttctttgtccttgctaagtgggaccatcacctctttctctcccacagggctacggcatggcatacactgtccacaagtggtcagagctcagctgggccagtcactgggtcacttttggatgctggatcttctaccgtctcataggctgaggcacatctgtggaccctcataaccctcttaagacccctctcagggtgccactgatgggggatgagggaaggccctctctctactccttgaccccctccatccttgacccccaacacctcaacacacacacacacacacacacacaaaatcacaccattttcatgcctgtcaatccccaccccaccacaaggcaggaagggggtggtgcctgctggggcctagagggggatgcttggggaaacagagaaggggagatccagggcctccccgccttccttcttcctttttatatacaatttgttattgtcaaataaaagtaggaaatattcaataggcttcttcttcactgctcagaggggaataggaatgagtgaggaagggagcacagcatggataaaggtttggaagctggaaaccatgaagagagagcagactgtgattggttcatggttagtttatgattgattagatgatgagcctgaagatggcaggatcctggtcctgcttggtttgatcagggcagggacagattgcatagttggatgtgggggaggcctgattggctggaaaactgaaggatccccattctgattggttgctctgagtgggacacagaggagagaaagcaagagagatgaagggttggtgcctatttatccttaggactgagggttgtgggttctaattggatgggaggtctgggatgggtctggattctgattgattgctccatctgggggcccactggtggttaggcgtttgattggctttttagaactggcatatggagattgagggtcttcatgccaattggtcagtaggactgagaggcctgggttctaactagttcttctgacttgaggtcgggagaagagagaatgaccgctgctattaggactgaggagttctgagcactgaagagctggggagggggtggttgcagtgtatagcgtgtgatctgcttgtaacagtttcgttgcattatactaagggttactctacctagaaaagggcggaggtgaaaggatgcaacgcaacgctaatttcaccagcggaagaagcgggtacagaccttaatgagtccccgttttgatcgactgataagggaatggggaaattgaagccaggactcgatgcagattggctacggatccaaaacgcccactaaccttggcgcgtcccagtctccaccccaaacctaactcaggtgaaaatggcgccacgcgcgggggcggggctagaggtacaaagagagtgtctattggttgggagcggcacgggccgccttcttcgcttcaccattggctcgctccgtaaggcaagagaacccactaggggatgagcccgaactagggatgtgacagagcgcgagacccagcctaaagagagcccggagccagcgtgggaggccgctgccgtcgcgcgccttggtgagtgccctccacccggcccctgctccctcccccagctctccccggctacgcggccagccctcggcgtgccagcgcgagaccctttgccacccgccccccccaccgcccttttgcgcctgcgcgagacccccagctaccgcacggttgtccagaggacagaagatccgtcttctcattgggcagcgggactggagggttctggttcggattgaccggctttgtgttccgttctagcgctgcacgccagacaccggcctttcaatatccgtctcttccctgcaggttgacggcgttgcacgctctcgcggggaggctctggctttccaaacgctggcaccgagggttgtagttctgattcgttttctttcctctgtcccccagttgcagttttcaggactacgtgggggagggaatagctttttgttgaacggtttaagacgctgacctgtgcaactggaccacgcctggttcctgtgtctcttaccaaaccgtgaccccggagcacaggactgggtttggtggtcgtgagcagtttgtgacccttgaaggaagacaccaggcctggtcctgtatctccctcgccagactgtgaccagggagggctgggatcaggtgttgttcccatgtgcctcccaccagactttgacccccgagggctgagaccgggactgtttctaccacatcataatatggcttctaaagggctggaacaagctttcagcctttctgtggccttgtgtttcagtcatgttctttttcttttcttttttattttattttgagacagagtctcgctctgttgcccaggctggagtgcagtggcatgaccccggctcactgcagcctctgcctcccaggttcaagcgattctcctgcctcagcctcctgagtagctgtaactacaggcgcacgccaccacacctggctaatttttgtatttttagtagagacggggttttgccatgttggccgggctggtcttgaactcctgagctcaagtggtccactcgtcttggcctcccaaagtgctgggattacaggcgtgagccaccgcgcccggccttcttttttagaggcagagtctcagactggagggcagtgatgtggtcactgctcacttcagccttgaagtcctgggctcaaagcgatcctcctgcctcagcctacctactagctgggactacaggcctttgtcaccacacctgactgattttcttatttttttagagacagtttcgctgtgttgcccaggccggacttgaattcctggcctcaggtgctgctcctgcatcagcctcccaaagcactggaattacctgccacggtgcctggcctttagtcatggtcttaaaacagaatgtaggccgggcgcagtggctcacgcctgtaatcccagcactttgggaggctgaggcgggcggatcgtgaggtcaggagatcaagaccatcctggctaacacggtgaaaccccgtctctactaaaaatacaaaaaattagctgggcgtggtggcaggcacctgtagtcccagctactcgggaggctgaggcaggagaatcgtttgaacccggaaggcagaggttgcagtgagccgaggtcgcaccactccactccagcctgggtgacagagcaagactccgtctgaaaaaaaaaaaaaaaaacggaatgtaattagaagtgttacaatcctgtctgttaactggtaaattcggtccatttacatttctcatgataataaactatttgaatttgattttattatctcattctgtactttctatttgtccaggtttttctgttccttttttttttttttttttaacttcctgcctatacacacgcagccatcagcccacaaagacatgactaccaacgcgggccccttgcacccatactggcctcagcacctaagactggacaactttgtacctaatgaccgccccacctggcatatactggctggcctcttctctgtcacaggggtcttagtcgtgaccacatggctgttgtcaggtcgtgctgcggttgtcccattggggacttggcggcgactgtccctgtgctggtttgcagtgtgtgggttcattcacctggtgatcgagggctggttcgttctctactacgaagacctgcttggagaccaagccttcttatctcaactctgtgagtcctgatttctttcatatgctgtgggatgggatttgctgggcagggatcggcttgcatgtttacctatccacctattcttcttccattgatttattttaaatttttatttaatcttttaaaaaatttattataggccgggcacagtggctcacgcttgtaatcccagcactttgggaggccgaggcaggtggatcacttgaggtcaggaatttgagaccagcctggtcaacatggcaaaaccccatctctactaaaaatacaaaaattagccaggcgcggtggctcaagcctgtaatcccagcactttgggaggccgaggcaggcagatcacgaggtcgggagttgaagaccagccaggccaagatgatgaaaccccatctctactaaaaatacaaaaattagccgggtgtggtggcacacgcctgtaatcccagctactagggaggctgaggcaggagaattgcttgaacctgggaggcggaggttgcagtgagccaagaccatgccattgcactccagcctgggcaacagagtgagactttgtctcaaaaaaaaaattattatgtattgttattattattctttttgttttttgcccttctctaaaactggtagataacttatttttgagacaaggtcttgctctgttgcccaggctggagtgcagtggtatgatgattgctcactgcaacctccaactcctgggttcaagcgatcgtcttgcctcagcctccccagtagctgggactatactataggtgcacacctttatgcctggctaatattttcacttttttgtagagacaaggtcttgctatgttgctcaggctgttctttaactcctgggctcaagcaatccttccacctcagcctcccaaaattctgggatgacaggtgcgcaccaccgtgcccagccttatttaacttttttgttgcatgtatattcacgtgggtcaaaaaaccatttaaagagatttgcagtgaaaatctgctttctatccactaagtttccccaaacgctgttaggcactgttgatagttgtttatgtttcttttcagtttatttacacacgtaagtctcaatttgctcaattgtaaaaggaggataatagtaataaccaactatatgtaagatacttagaacagtgtttggcaaacagtggttgccatgtaactgttcactattattatcattatttgcacttttccctttttacacaaatggtaatatgctatatatacttctaatcttttctctttttctttctttccttacaagaaaaccaaagaagccattttcttttttgagacggggtctcgctctgtcacccaggctagagtgcagtggcatgattatagctcactgcaaccttgaactcctgggcaatcaagcaatcctcctgcctcagcctccctagtagctgggattataggcatgtgccaccccaccaagttattttttttttaacaacttttttttttaagagatggcgtcttgctttgttgcccaggctgttctccaactcctggcttcaagtgatctgcccacctcagcctcccaaagtgctaggattacaagcatgagccaccgcacccagctgctttttttaatgaggtcactcctcatgatttcataaagagctttcaaagcatggacattgtacagttgcttgacttgtgtagtattgatgggcattttccctcaatcttctgccattataaacaaggccgggcagagtggctcatgcctgtaatcccagcactttgtgaggcgaaggcgggcagatcacctgaggtcaggagtttgagaccagtctggccaacatagtgaaaccccgtctctactaaaagtctaaaaattagctgggcgtggtggcaggtgcctgtaatcccagctactcaggaggctgaggcaggagaatctctgggacctgggaggcggaggttgtggtgagctgagattgcgccactgcacactccagcctgagcgataagagcaaggctccgtctcaaaaaaaaaaaaaaaaaaaaaaaacattacaggcatgagccattgtgcccggctggtcagatgtttcttaaattttagtcattccagtagatgtgagtgatatctcattatggttttaatttgcttttccttagtgactaatggaagtttgaacatctttcatatacttattggccatttagaaatcctctttgtgaagaacctattcaagtcttctgcctattttatattggatgatctttttctttctttcttttttttttttttttttgagacagggtcttaccctgttgtccaggctgagcactgtggtgctatcatagctcactgcagcctcaacctcctgggctcaagacatcctcccactgcagcctgggactgtaggcacgtgccaccacgtccagctaatttttgtatgttttatagagttgggggtctcactatattgttcagactggtcttgaactcctttatgcaagccatcatcccacctcagcctcccaaagtgttgggattacaggcatgagccatcgtgcccggcggtctttttctttctgattctctgctcactcttgtattcactcatctgttcacctacattctctctctctcattggctacttcactcactccatcatctacacctgcttccttttataccacacacacttcttgagtaccaatcacagccacactgttttgtgtcaggctttacacatattac
